United States Patent Application Publication US 2018/0126003 A1 - sequence listing, part 181

SEQ ID NO: 321448 - DNA, 3306 bp, Artificial Sequence
  derived and/or modified sequence
atgttccagctccctgtgaataacttaggatctctgcgaaaggcacggaaaacagtcaagaaaattctgtctgatatagggctcgaatactgcaaggagcatatcgaagactttaaacagttcgagccaaacgatttctaccttaagaatacaacatgggaagatgtgggactgtgggacccatccctgaccaagaatcaggactataggactaaacccttttgttgcagcgcctgcccgttctcatccaaatttttcagtgcatacaagtcacacttccgaaatgtgcatagcgaagactttgagaatcgtattctgctcaattgtccctactgcacattcaacgcggacaagaagaccctggagacacatatcaagatctttcacgccccaaatgcctcagccccctcatcgagcctgagcacatttaaggacaagaacaaaaatgatggtttgaagcctaaacaggcagattccgtggagcaggccgtgtattactgtaagaagtgcacgtatagagatccgttatatgagatcgttagaaagcatatctaccgggagcactttcaacatgtggcagccccatacattgcaaaggccggagagaaatccctcaacggtgccgtgccactaggtagcaacgcccgggaagagtcctctatacattgtaagcgctgtctattcatgcctaagtcctacgaggcgctggtgcagcacgtgatcgaggaccacgagcgtattggctatcaagtgacagccatgatcggccatacaaatgtggtcgtcccccgcagtaagccactcatgctgattgctccaaaaccacaggataaaaaatcaatgggcctccctccgcggatcggatctctcgccagcggcaatgtcaggtcactaccgtcacagcagatggtaaacagactgtcaataccaaagcctaatctgaactcaaccggtgtgaacatgatgtctagtgtgcatttgcagcagaacaactacggtgttaaaagcgtgggccaggggtattccgtgggccagtctatgagattgggcctcgggggcaacgcgcctgtttcgatcccacagcagagccagtccgttaaacagttgctgccatccgggaacggtcgcagctacggccttgggtctgagcaaagatctcaggctcctgcccgatactccctgcaatcagctaacgcatcctcccttagcagcgggcaacttaaaagccccagcttaagccagtctcaagcatctcgtgtgctggggcaaagcagttctaaaccagctgccgccgctacaggcccacctcccggcaacacatcttcaactcaaaagtggaaaatttgtacaatttgtaatgagctgttcccggaaaatgtatatagcgtgcatttcgaaaaggaacacaaagcagagaaggtgcctgccgttgcaaactatataatgaaaattcataacttcacctcgaaatgtctgtattgcaataggtacttgcctacagatactctgctgaaccatatgctgatccatggactgtcgtgtccttattgccgatctacatttaatgatgtggagaaaatggccgcacacatgaggatggtccatattgacgaagagatgggtcctaagactgacagcactttgagttttgacctgaccctgcagcaaggctcacatactaacatccatctgttggtaaccacatataaccttcgcgatgcacctgcggaatccgtcgcataccatgcccagaacaatcctccagtcccccctaagccgcaaccaaaggtccaggagaaagccgacatcccagtcaagtcttcaccccaagctgcagtgccctataagaaggacgtgggtaaaacactgtgccctctctgcttcagcatcctaaagggccctatttcagacgccttggcccatcatctacgggaacgacatcaggttatacagaccgtgcaccccgtggaaaagaaattgacctataaatgcatccactgcctgggcgtgtacacttcgaacatgaccgccagcacaataacactccacctcgtgcactgccgcggcgtgggtaagactcagaatggtcaggacaagacgaatgctccgtcacgcctgaatcagagcccctccctggccccagtaaagaggacctatgaacagatggagttcccactcctgaagaagaggaaacttgacgacgattctgacagcccatcatttttcgaagagaagcctgaggagccagttgtgctggctttggatcctaagggccacgaggacgacagttatgaagcaagaaagagctttctgacgaagtacttcaacaaacagccctacccaacaaggagggagatcgagaagctcgctgctagcctgtggctgtggaaatctgacattgcatcccacttcagcaataaacgcaagaagtgtgtccgagactgtgagaagtataagccgggtgtacttctcggttttaacatgaaggagctgaataaagttaagcacgaaatggactttgatgctgaatggttgttcgagaaccacgatgaaaaagattcaagagtgaacgcgagtaagactgccgacaagaaattgaatttaggcaaggaggatgattcatccagtgactcttttgagaatctcgaagaggaatccaacgagagtggatctcctttcgacccggtgttcgaagtggaacctaagatctctaacgacaatcctgaggagcacgttctaaaagtgatcccagaggatgcttcagaaagcgaagaaaagctcgatcagaaagaagatggttctaaatacgaaacaatccatctgacagaagaacctaccaaacttatgcataacgctagcgattcggaggtggatcaagatgacgtagtcgagtggaaggacggagccagcccatctgaaagcggccctggctctcagcaggtcagcgattttgaggataatacatgcgaaatgaagccagggacgtggtccgatgaatcctcccagtctgaggatgcgcgatcatcaaagcctgccgctaagaaaaaagccactatgcagggagatcgtgagcaattgaaatggaaaaacagctcctacgggaaggtggaaggcttttggagtaaggaccagtcacagtggaagaacgcatctgagaatgacgagcgcctcagtaacccacagatcgaatggcaaaattccacaatcgattctgaggatggagagcagttcgataacatgactgacggcgtggcagagcccatgcatggcagtctcgctggagtgaagctcagtagccaacaggct

SEQ ID NO: 321449 - DNA, 3306 bp, Artificial Sequence
  derived and/or modified sequence
atgttccagctgccagtgaataacttggggtcgctgcgcaaggcaagaaagaccgtgaaaaagatcctgagcgacatcggactggaatactgcaaggaacacattgaagatttcaaacaatttgagccaaacgacttctacctgaagaacacgacttgggaggacgtgggactgtgggatcccagcctgacgaagaaccaggattaccgcacgaaaccattttgttgctcagcctgtccgtttagttctaaattcttcagcgcctacaaatcccactttcggaacgtgcactcagaggacttcgaaaaccgcattcttcttaactgtccgtactgtactttcaatgcggacaagaaaactctcgaaacccacatcaagatcttccacgctccaaacgccagcgccccttcctcatcgctcagcacgtttaaggacaagaacaagaatgacggcctcaagccgaagcaggcggactcagtggagcaggccgtctactattgtaagaaatgcacctaccgagatccactgtacgagatcgtgcggaagcatatctacagagagcatttccaacacgtggcagcgccttacatcgcgaaggccggcgagaaatcactgaacggcgctgtgccgctgggtagcaacgcccgcgaggaatccagcattcactgcaagcgctgcctgttcatgcctaagtcgtacgaagcgctcgtgcagcacgtgatcgaggatcacgagaggatcggatatcaggtcactgccatgatcgggcacaccaacgtcgtcgtgcctaggtcgaagccgctgatgctgatcgccccgaagccacaagataagaagagcatgggactcccgcccagaatcggatccttggcctccggcaacgtgcggtcgcttccatcccagcagatggtgaaccgcctctccattcccaaaccgaacctcaactcgaccggagtgaacatgatgtcctcagtccatctgcaacaaaacaattacggtgtcaaatcggttggccaaggatatagcgtgggccagagtatgcgcctgggactcggaggcaacgcaccggtgtccattcctcaacagtcacagtcggtgaagcagctgctgccgtccgggaatggacgcagctacggactgggctccgagcagcgatcgcaggctccagcacgatactcactccaatccgcgaatgcatcgtccctctcatcggggcagcttaagtcgccgagcctgtcgcaaagccaggcttcccgcgtcctgggacagtcctcatctaaaccggccgctgcagccactggaccgccaccagggaatacgtcgtcgacccagaagtggaagatctgcacgatttgtaatgagctgtttcccgagaacgtgtactcggtgcacttcgagaaggagcataaagccgaaaaggtgccggctgtggcaaactacatcatgaagatccacaatttcaccagcaagtgcttgtactgcaacagatacctcccgactgatactctgctgaatcacatgctcatccatggcctctcttgcccgtactgcagatcgaccttcaatgacgtggaaaagatggccgcccatatgaggatggtccatatcgatgaggagatgggccctaagactgactcgaccctctcatttgatttgactctccagcaggggagtcacactaacatccatctgctggtaaccacttacaatctccgagacgcgcccgcggagtccgtggcttaccatgcgcagaacaatccccctgtccctccgaagccgcagccgaaggtccaggaaaaggccgacatccctgtgaagagcagcccgcaggccgctgtgccgtacaagaaggacgtgggtaagaccttgtgtcccctctgtttctccatccttaagggaccgatctcagacgcactggctcaccacctgcgggagagacatcaggtgatccagactgtccacccggtggaaaagaaactgacttacaaatgcatccactgcctcggtgtgtacacctcgaacatgactgcttcgactatcactctccatttggtgcactgccggggtgtgggaaaaacccaaaatggacaagacaaaaccaacgcaccgtcccgcctgaaccagtcgccgtcccttgcgccggtgaaacgtacgtacgagcagatggaattcccactgttgaaaaagagaaaattggacgacgactcagactccccttccttctttgaagagaaaccagaagagcctgtggtgcttgccctcgacccgaagggacacgaggacgacagctacgaggctagaaagtccttcctgaccaagtacttcaataagcagccttatcccacccggcgggagattgaaaagctggctgcgtcgttgtggctgtggaagtcggatatcgcctcccacttcagcaataaacggaagaagtgtgtgcgcgattgcgaaaagtacaagcccggcgtgctgctcggcttcaatatgaaggaactcaacaaggtgaagcacgaaatggatttcgacgccgagtggctgtttgagaatcatgacgaaaaggactcgcgcgtcaatgccagcaaaacggccgacaagaagctcaacctggggaaggaagatgactcgtcatcagatagcttcgaaaacctggaagaggaatcgaatgaatcgggttccccgtttgatcctgtgttcgaagttgaaccaaaaatctcaaatgacaaccctgaagagcacgttctgaaggtgatcccggaggacgcttctgaatccgaagagaaattggaccaaaaggaggatggttcgaaatacgaaaccatccaccttactgaagagccgacgaaactgatgcacaacgccagcgattcagaagtggaccaagatgatgtggtggagtggaaggatggggcatcaccgtccgaatccgggccgggttcacagcaagtctcggatttcgaagataacacctgtgaaatgaagccaggcacttggtcggatgagtcctcgcagtcggaggatgcaaggtccagcaagccagctgcgaagaaaaaagccaccatgcagggagatcgggagcagctgaagtggaaaaactcatcgtacggtaaagtggaaggattctggtcaaaagaccagtcacagtggaagaatgcctccgagaacgacgagagactgtccaatccgcagatcgaatggcaaaactccactatcgattccgaagatggcgagcaattcgacaacatgactgatggcgtggctgagccgatgcatggatcgctcgccggagtcaaactgtcatcgcagcaggcg

SEQ ID NO: 321450 - DNA, 3306 bp, Artificial Sequence
  derived and/or modified sequence
atgtttcagctgccagtgaataatctgggtagcctgcgcaaggcacgaaagaccgtgaaaaaaattttgtctgatatcggattggagtactgcaaagagcatattgaggatttcaagcaatttgagcccaatgatttttatctcaaaaacactacatgggaagatgtggggctgtgggacccaagcctgactaagaatcaggactaccgaaccaaacctttctgctgctctgcttgcccattctctagcaaatttttttctgcatataagtcacactttcggaacgttcactccgaggactttgaaaatagaattctcttgaattgcccttattgcactttcaacgccgataaaaagactctggagacacacattaaaattttccatgcacctaatgcatcagctccaagttccagcctgagcaccttcaaagacaagaataaaaatgatggtctgaaaccaaaacaggctgacagcgtggagcaggcagtgtactattgcaaaaagtgtacctaccgcgaccccctttatgaaatcgtgcgcaaacacatctatcgggaacatttccagcacgttgccgccccatatatcgccaaagcaggggaaaaatctttgaacggggctgtcccgctgggatccaacgcacgcgaggagtcctctattcattgcaaaagatgtctcttcatgccgaagtcatatgaggcgctggttcagcacgtgattgaagaccatgagaggatcggctatcaggtgaccgcaatgatcggtcacaccaacgtggtcgttccgaggtccaaacccctgatgcttatcgctcccaagcctcaggataagaagtccatgggccttccacctcggattggtagcctcgcaagtggcaatgttcggagtctccccagtcagcaaatggtcaatcgcctctctattcctaaaccaaatttgaattctacaggggttaacatgatgagctctgtgcacctgcagcagaataactacggggtgaaaagcgtgggccagggctattcagtggggcagtccatgcggctgggcctggggggaaatgctcccgttagcatacctcaacagtctcagtcagtcaagcaactgctgccctcagggaatggtaggtcctatggcttgggatctgaacaacgctctcaggcacctgcaagatattctttgcagtccgcaaacgcgagcagtctctcaagcggccaactgaaaagcccttccctgtcccagagtcaggcctctcgcgtcctgggtcaaagttctagcaaacccgccgccgcagccacaggccccccccctggaaacacaagcagtacccagaagtggaaaatctgcacgatttgtaatgagctgttcccggagaacgtctactcagtgcactttgagaaagagcacaaagctgagaaggttccagccgtggccaattacataatgaagatacataatttcacttccaagtgtctctactgcaatagatacctccccacggacaccctgctgaatcacatgctgatccacggcctcagctgtccttattgccgatctacattcaatgatgtggagaaaatggccgcgcatatgcgcatggtgcatatcgatgaagagatggggcctaagaccgactccactctcagctttgatctgacactgcagcaaggtagccatactaacattcatctgctcgttacaacttacaacctgcgagacgcgccggcggaatctgttgcataccatgcccagaataatccacccgtgcctcccaagccgcaacccaaggtgcaggaaaaggccgacattcccgtgaagagtagtccacaggctgctgtgccatacaagaaggacgttggcaaaacgctgtgccctctgtgtttcagtatcctgaaaggtcccatcagcgacgcccttgcgcaccacctgcgggagcggcaccaggttattcaaaccgtgcatccagtcgagaaaaagctcacttacaagtgcatccactgtctcggcgtctatacctccaatatgacggccagcaccatcacactgcatctggttcactgtcgaggagtgggaaagacccaaaacggtcaggacaaaacaaacgctccatcccgcctgaaccaatcccccagcctggcacctgtgaagcgcacatacgaacagatggaatttcccctgctcaagaagaggaaactggacgacgacagtgatagcccaagtttttttgaggagaagcccgaggaacctgtagtcttggccctggacccgaaagggcacgaggatgacagctatgaggcacgcaagtcattcctcaccaagtactttaataaacaaccgtatcccactagacgagaaattgagaaactggctgcctcactgtggctgtggaaaagcgacatcgcctctcacttcagcaacaagaggaaaaaatgcgtccgcgactgtgaaaaatataaacccggagtgctgcttggcttcaacatgaaggaactcaacaaagtcaagcatgaaatggattttgacgcggaatggctcttcgagaatcacgacgaaaaggacagccgcgtcaacgccagtaagacagcggacaaaaagctcaacctgggaaaagaggatgactcttcctcagacagctttgaaaacctggaggaggagtccaatgagtctggcagtccattcgatcctgtcttcgaagttgagccaaaaatcagcaatgacaaccctgaagagcacgtgctcaaggttattcccgaagacgcttccgagagtgaggagaagctggaccaaaaggaggatgggagtaagtatgagactatccacctcacggaagagccaactaagctgatgcacaacgcttctgattccgaagtcgaccaggacgatgtcgtcgagtggaaagacggtgcttccccgtccgagtcaggtcccggatcccagcaagttagcgacttcgaagataatacgtgcgagatgaagccaggcacttggtctgacgagagctcacaatccgaggacgcacgcagctccaaaccagcagctaagaagaaagccacgatgcagggcgaccgagaacagctgaaatggaaaaatagctcatacggtaaagttgagggtttctggagcaaggatcagagccagtggaaaaacgcttcagagaatgatgaacgcctgagcaatccccagattgagtggcagaacagtaccatcgacagcgaggacggtgagcagtttgacaatatgaccgatggtgtggcagaaccaatgcacggctcccttgccggggtcaaactcagctctcaacaggcc

SEQ ID NO: 321451 - DNA, 3306 bp, Artificial Sequence
  derived and/or modified sequence
atgtttcagcttcccgttaataatctgggctccctccggaaagctcggaagacggtcaagaagatcctgtccgatatcggcctggagtactgcaaggaacacatcgaggattttaaacagtttgagcctaatgacttctacttgaaaaacactacctgggaggatgtggggctgtgggatccctctcttactaaaaatcaggattaccggactaagccattctgctgttctgcttgtccatttagttcgaagtttttttctgcctataaatctcattttcgaaatgtgcattctgaggatttcgagaaccgcatactactgaactgtccttactgcacattcaatgcagataagaaaaccctggaaactcacattaaaatctttcatgcgcctaatgcctcggcccctagctcctcactatccacatttaaagataaaaacaagaatgacggactaaagcccaaacaagcagattctgttgagcaggcagtctactactgtaaaaaatgtacctacagagatcccctgtacgagatcgtgcggaagcacatctatagggagcatttccagcacgtggcggccccttacattgccaaggccggagaaaagagcttgaatggggccgtgccattggggtcaaacgccagggaagaatctagcatacactgcaaacgatgcttatttatgccgaagtcttacgaggccctggtgcagcacgttattgaagaccatgaaaggatcggctaccaggtcaccgccatgatagggcacactaatgttgtggtgccacgaagcaagcccctcatgctcattgctcccaaacctcaggacaagaaatccatgggtctgccacctaggatcgggtcgctggccagcggtaacgtgagatccctgccatcacaacaaatggttaacagactgagtatcccaaaacctaatctgaacagcactggcgtgaacatgatgagcagcgtgcatctacagcaaaacaattacggtgtgaagagtgtcggtcaagggtattccgtaggacagtccatgcgactgggccttggaggtaatgctcccgtgagcatccctcaacagtcacagagcgtgaagcagctgttgccatctgggaacggtcgctcttatgggctcggtagcgaacagaggtcgcaggccccagcacgctactccctccagagcgccaatgcctcttcactgtccagcggccagctgaagagtccatcactgtcccagtcacaagcgagccgcgtgcttggccaaagttccagtaagccggcggcagccgcgaccggaccgccaccggggaatacctcatctacacagaagtggaagatctgcacaatttgtaatgaactttttcccgagaatgtgtattctgttcacttcgaaaaggagcacaaagcagaaaaagtgcccgctgtcgccaattacattatgaagattcacaacttcacatccaagtgtctgtactgcaatcgatacctcccgactgatacattgctaaaccatatgctaatacatgggctgtcatgtccatactgtaggtccacatttaacgacgtggaaaagatggccgcacacatgaggatggtacatattgacgaggaaatgggtccaaaaactgacagcacactgagctttgacctaaccctgcagcaggggagccatacaaatatccacctgctggtcacaacctacaacctgcgcgacgctcccgccgaaagtgtggcttatcacgcacagaacaatccaccagtgccccccaaaccacagcctaaagtgcaggaaaaagctgatatcccagtgaaatcctcgccccaggctgcagtcccttataagaaggatgtcgggaagactctctgccccttatgctttagtattctgaaaggaccaattagtgacgccctggctcaccatttgcgggaacgccaccaagtgatccagaccgtgcaccccgtcgagaagaagttgacatacaaatgcatacactgtctcggcgtgtatactagcaacatgactgcctcaacaattacattgcatctggtacactgtcgcggcgtgggaaaaacccagaatggtcaggacaagaccaacgctccctcacggctcaaccagtcgccttctttagctcccgttaaaaggacctacgagcagatggaatttccactcctgaaaaagcgaaagttggatgacgatagcgactccccttctttttttgaagaaaagcctgaggagcctgtcgtactcgcccttgatcctaaaggccacgaggacgactcttacgaagcccgaaaatcttttttgaccaagtacttcaacaaacagccttatcctaccaggcgcgagatcgagaagctcgctgcaagcctgtggctgtggaagagtgatatcgcttctcatttcagcaataaaaggaaaaaatgtgtaagggattgtgagaagtacaaacctggggttctgctgggatttaacatgaaagagttgaacaaggtcaaacacgagatggattttgacgccgaatggttgttcgaaaaccatgatgaaaaagactcacgcgttaacgcctccaagaccgctgacaaaaagctgaatttggggaaagaggacgattccagcagtgattccttcgagaatctggaggaagagagcaacgagtctggatctccatttgacccagtcttcgaagtggagcccaagatttccaacgacaaccccgaagagcacgttctgaaagtcatcccagaggatgcttcggaatcagaagagaagcttgaccagaaggaagatggctctaaatacgagacgattcacctcacagaggagcctacaaagctaatgcataacgccagcgattccgaggtcgaccaagatgacgtggtggagtggaaagatggcgcaagcccttctgaatccggccccggctcacagcaggtgagcgatttcgaggacaatacctgcgaaatgaaaccaggcacgtggagtgacgaaagctcccagagcgaggacgcacgctctagtaagcccgcagcaaaaaaaaaggcaaccatgcagggggacagggaacagctgaaatggaaaaatagcagctacgggaaagttgaaggattctggagtaaggatcagagccagtggaagaacgctagtgagaacgatgagcgactttccaacccacagattgagtggcagaattccacaattgatagcgaagatggcgaacagttcgacaatatgacagacggggtagccgaacccatgcacggaagcctggctggagtgaaactctcaagtcagcaagct

SEQ ID NO: 321452 - DNA, 3306 bp, Artificial Sequence
  derived and/or modified sequence
atgttccagttgcccgtaaacaacctagggtcacttcgcaaagccaggaaaactgtgaaaaaaattttatcagacataggactggaatattgcaaagaacatatcgaggatttcaagcagtttgaacctaatgatttttacctcaaaaacactacttgggaagacgtggggctgtgggatccttctctaacgaaaaatcaggactataggacaaaacctttctgttgtagtgcctgccccttttcttccaagttcttttcagcttataaatcccattttcggaatgtgcattctgaggatttcgaaaaccgaattctgctgaactgtccttattgcacattcaatgctgataaaaaaactctggaaacacatataaaaattttccacgccccaaacgcctcagccccatctagttccctttcaacttttaaggacaaaaacaaaaacgatgggctcaaaccaaaacaggccgattctgtcgaacaagctgtttattactgcaaaaaatgtacttatagagatcctctttatgaaattgtgagaaagcacatttatcgagaacatttccagcatgtagcagctccatatatcgcaaaagctggagaaaaatccctcaacggagcagtgccacttggaagtaatgcacgggaagagtcttctatacactgtaaaaggtgtctttttatgcccaaaagttatgaagcgctagtgcagcatgtcatcgaagatcacgaacggatcggatatcaggtgactgcaatgattggacatactaacgtggttgtcccgcgatcaaagcccctaatgcttatcgcacccaaaccccaggataaaaaatccatgggactgcctccccggataggatccctcgcctccgggaatgtacgctcattaccctctcagcagatggtgaacaggctcagtatccctaaaccaaatctaaactctacaggggtgaatatgatgagttctgtgcacctgcagcagaataattatggggtgaagtccgtgggacagggatattctgtggggcagtctatgaggctgggacttgggggaaacgctccagtaagtattccccagcaatctcagagtgtgaagcagcttctcccttctgggaatggaaggagttacgggcttggatccgaacaaaggtctcaggctccagcccgatattccctccagtcagcaaatgcttcttcactgtcttctgggcagctcaaatccccctcactctcacagagtcaggcttcacgggttttggggcagtcgagttctaaacccgctgcagccgcaacaggacccccacctgggaatactagttcaactcagaaatggaaaatctgtactatatgcaacgaactttttcccgaaaacgtgtattctgtacattttgaaaaagaacacaaagcagaaaaagtgcccgctgtcgctaattatattatgaaaatccacaactttacttctaaatgcctgtattgcaacaggtatctgcctacagatactctcctgaaccacatgctgatccacggactcagttgcccttattgtaggtcaacatttaatgatgtggagaaaatggctgcacacatgaggatggtgcatatcgatgaggagatggggcctaaaactgattctacactgtcgtttgacttaacgcttcagcaagggtctcatactaacatacatctgctggtcacaacatataatctaagggatgctcccgctgaaagtgtggcttatcacgcccagaataaccctccagtgccaccaaagccccagcccaaagtgcaggagaaagccgatattcccgtcaaatctagtcctcaagcggctgtgccctataaaaaggatgtcgggaaaacactttgcccattgtgcttctctatactgaaaggacctatcagtgatgccctagcacaccatctgcgagaaaggcaccaggtgatccagactgtgcatcctgtggaaaaaaaactgacatataaatgcatccactgcctgggggtgtatactagtaatatgacagcaagtacaataactttgcatctcgtccattgccggggggtggggaaaactcagaatgggcaggataaaactaatgcccctagtaggctgaatcagtcccctagtctcgctccagtgaaacgcacgtatgaacagatggaattccctttattgaaaaaacgaaagcttgatgacgattcggatagtccctcttttttcgaagaaaaacccgaagagcccgtggttctagctcttgatcctaaaggacatgaagatgattcgtatgaagcacgcaaatcttttctgacaaaatacttcaataagcaaccctaccctacaagacgagaaatcgaaaaattagcagcttctctgtggctttggaaatctgatatagctagtcacttttccaataaaaggaaaaaatgcgtgcgggattgcgaaaaatataaaccaggagtactcttggggtttaacatgaaagaactaaacaaagtaaaacacgagatggacttcgatgccgaatggctctttgagaaccacgatgaaaaagatagtcgcgtcaacgcttctaaaactgcggataagaaacttaatctaggaaaagaagacgattcatcctccgattcttttgaaaatctggaagaagaatcaaacgagtcgggatcacccttcgatccagtgtttgaagtggagcccaaaatttccaacgataatccagaagaacatgtccttaaagtgatacccgaagatgcttcagagtcggaagaaaaactggatcagaaagaagatgggtctaaatatgaaacgatccatctgacagaagagcccactaaactgatgcataacgccagtgattctgaagtcgatcaggatgatgtggtagaatggaaagatggggccagtcctagtgaatctgggcctggatcacagcaggtatctgatttcgaggataacacatgtgagatgaaacctggaacttggtcggatgaaagtagtcagagtgaagatgccagatccagtaaacctgcagccaaaaaaaaagcaacaatgcagggagatagggagcaattaaagtggaagaattcatcatacggaaaagtggaaggattctggagtaaagatcagtcccagtggaaaaacgcaagtgaaaatgatgaacgactgtcaaacccacagatagaatggcagaactctacaatcgattcagaagacggagaacagttcgacaatatgacagacggagtcgcagaacctatgcatgggtctctagctggagtgaaactgtcttcacagcaggcc

SEQ ID NO: 321453 - DNA, 3306 bp, Artificial Sequence
  derived and/or modified sequence
atgtttcaattgccagttaacaacctggggagccttaggaaggctcgcaagaccgtcaaaaagattctttcggatatcggcctggagtactgtaaggagcatatagaggactttaaacagttcgaacctaacgatttctacctcaagaataccacgtgggaagatgtcggtctgtgggaccctagcctgactaagaatcaagactacagaaccaagccgttctgttgttcagcatgtccattttcctccaagttcttttccgcatacaaaagccattttcggaatgtgcacagcgaggacttcgaaaaccgaattcttcttaactgcccttattgtacctttaatgccgacaagaaaacgctggaaacccacatcaagatttttcatgcccccaacgcctcagctccttcctcctcactgagcaccttcaaagataagaacaagaacgacggacttaagcctaaacaagcggactccgtggaacaggcagtgtactactgcaagaagtgtacttaccgcgatcccctctacgaaatcgtgcgtaagcatatctacagggagcactttcaacatgtggcagcaccatacatcgcaaaggcaggcgagaagagcctcaatggagcagtgcctctgggctccaatgcccgtgaagaatccagcattcactgtaagcgctgcctgttcatgccaaagagctatgaagcactggtccaacacgtcattgaggatcacgagcgtattggataccaagtgactgccatgattggtcacacgaatgtggtggtcccacgctccaaaccacttatgctgatcgcccccaagcctcaggataagaagtccatgggactcccccctcgcataggctcgcttgcatccggcaatgtgcgatccctgccttcgcaacaaatggtcaacagactcagcattcctaagccgaatcttaattcgaccggtgtgaatatgatgtcgtccgtgcacctgcaacagaacaactacggagtgaagtcagtgggacaggggtactcggtgggacaatcgatgcggctgggcctcggaggaaacgcccccgtctcgatcccacaacaatcacaaagcgtcaagcaacttctgcctagcgggaacggacgcagctacggcctcggttccgaacagcggtcccaggctcccgcacgatactcactgcaaagcgctaatgcatctagcttgagctcgggacaactgaaaagcccctctctgtcgcagtcgcaagccagcagagtcctgggccaatcatcgagcaagcccgcagcggcggcaactggtccaccgccaggtaacacttcgtcgactcaaaagtggaagatctgtactatttgtaatgaactgttccctgaaaacgtgtactcagtccattttgaaaaggagcacaaggctgaaaaggtgcctgcagtggccaattacattatgaaaattcataactttacgagcaaatgtctttactgtaatcgataccttcctaccgatactctcctcaaccatatgcttatacacggtctttcgtgtccttattgcagaagcacttttaacgatgtggagaaaatggcggctcacatgcggatggtgcatattgatgaagaaatgggacccaagaccgattcgactctgtcgttcgacctgaccctgcagcagggctcgcatactaacatccatcttttggtgactacttacaacctcagggacgcccctgctgaatccgtggcctaccatgctcagaacaatcctcctgtgcctccaaagccacaaccaaaggttcaagaaaaggctgatattcctgtcaagtcctcaccccaggcagcagtcccctacaagaaagatgtgggcaagaccctctgtcctctgtgtttttcaatactcaagggacctatttcggatgcactggcacatcatctgcgcgaaagacatcaagtgatccaaacggtgcatccagtggaaaagaagctcacttacaaatgtattcattgccttggagtgtacaccagcaacatgactgccagtaccattactcttcaccttgtccattgtaggggagtgggcaaaacccagaatggacaagataagactaacgcgccatcacggctgaaccaaagcccttccctggcaccggtcaaacgaacttacgaacaaatggaattcccgctgcttaagaagcgtaagctggacgatgactccgatagcccttccttttttgaagaaaaaccggaggaaccagtggtcctggcacttgacccgaaagggcatgaggacgatagctatgaagcgagaaagtcgttcctcactaagtatttcaacaagcaaccctacccaactcggcgggaaatcgagaagttggctgcctctctctggttgtggaagtcagacattgcatcccatttttcgaacaagagaaagaaatgtgtgagagactgtgaaaagtataagccaggcgtcctgttgggtttcaatatgaaggaattgaacaaggtgaagcatgaaatggactttgatgcagaatggctgtttgagaaccacgatgaaaaggattcacgggtgaatgcatctaagaccgcagacaagaaacttaacttgggaaaagaggacgactcttcgtccgactcgtttgagaacctggaagaggagtcgaacgagagcggaagcccgtttgaccccgtgtttgaagtcgagccaaaaatctccaacgacaacccagaagagcacgtccttaaggtgatcccagaggatgcatcagagagcgaagaaaaacttgatcaaaaggaggatggaagcaaatacgagactatacatcttactgaggagccgaccaagctcatgcataatgctagcgacagcgaagtggatcaggatgacgtcgtggaatggaaggacggtgcaagcccttctgaatccggaccaggcagccagcaggtgtcggatttcgaggataatacttgcgaaatgaagcctggaacgtggtccgacgaatccagccaatccgaagatgcacgtagctcgaagcccgccgcaaagaaaaaggcgaccatgcaaggcgatcgagagcagctgaagtggaagaactccagctacggaaaggtcgagggtttctggtcaaaggatcagtcccagtggaagaacgcctcagaaaatgacgaacggctctctaaccctcaaatagaatggcagaattcaactattgactcggaggacggagagcaatttgataacatgaccgatggagtggcagaacccatgcatggatccctcgcaggagtgaagctctcgtcacaacaggcc

SEQ ID NO: 321454 - DNA, 3306 bp, Artificial Sequence
  derived and/or modified sequence
atgtttcagctgcccgtgaataacctcggaagcctccgcaaggcaagaaagaccgttaagaagatcctctccgatatcggcctggaatattgcaaagagcacatagaggactttaaacaatttgagcccaatgacttctacttaaagaacactacttgggaggatgtggggctgtgggatccaagtctgacaaagaaccaggactaccggacaaaaccgttctgttgctctgcatgcccgttctcctctaaatttttcagcgcgtacaagagccacttcagaaacgtccactccgaggattttgaaaaccgaatcttgctgaattgtccatactgcacttttaacgccgataaaaagacccttgagacgcacatcaaaatttttcacgcacctaatgcctcagcaccctcatcttctctgtcaacgttcaaagacaaaaacaaaaatgatggcctgaaacctaaacaggccgactctgtggaacaggctgtttactactgcaaaaaatgtacctacagggatcccttatacgagatcgtgcggaagcacatttatcgcgagcactttcagcatgtggcagcgccttatattgctaaggcaggggaaaaaagcctaaacggcgctgtgcctttaggaagcaatgccagagaagaatccagcattcattgtaagagatgtctgttcatgccaaaatcctacgaggccctcgtgcagcacgtcatcgaagaccatgagagaatagggtaccaggtcactgctatgatcggtcacacgaacgtggtggtcccgcgcagcaaacccttgatgcttattgctcccaaaccccaagacaagaaatctatgggactgccaccaaggataggttccttggcttccggaaacgtgcgttccctgccatcccagcagatggtcaatcggttgagtatccccaaacccaacctaaattccacaggagtgaatatgatgtctagcgtacacctacaacaaaacaattatggagtcaaaagtgtggggcagggctacagcgtcggccaatctatgcgactgggtttgggcggaaacgctccggtaagtatacctcagcagtctcagagcgtgaagcagttattaccttctgggaatggcaggtcgtatgggttaggttccgagcagaggagtcaggccccggcccggtatagtctgcagagcgcgaacgcttcctctctgtcctccggacagctgaagtcccctagcctgtctcagtctcaagcttccagggttttgggacagtcctcaagtaaacctgctgcagcagcgacagggcccccccccggtaacacatcctctactcagaagtggaagatttgtacaatatgcaatgagctctttccagagaatgtttactccgttcattttgagaaggaacataaagccgagaaggtgcctgccgtagcaaactacataatgaagattcacaacttcacatctaaatgtctttattgcaaccgctatctccccactgatacgcttctgaatcatatgttgatacatgggctgtcctgcccctattgtagatctacatttaacgacgtcgaaaaaatggccgcccatatgcggatggtccacatagacgaggaaatgggcccaaaaactgatagtaccctgagttttgatttgactcttcagcaaggttctcacacgaacattcacctgctcgtgaccacttataacttgagggatgctcctgctgagtccgtagcctaccacgcccaaaacaaccctcctgtgccgcctaagccccagccaaaagtgcaggagaaggccgacattccagtgaaatcttcacctcaggctgccgttccatataagaaagatgtgggcaagacactgtgcccactctgcttctccatcctgaaaggtccaatcagcgacgctttggcccaccatctgcgggagaggcatcaggttatccaaactgtacaccctgttgaaaaaaaactgacgtataaatgtatccactgtctgggagtgtacaccagtaatatgaccgcgagcacaatcaccctgcatctcgtccactgtagaggcgttgggaaaacacaaaacggacaggacaaaactaacgccccaagtagattaaaccaaagcccttctttggctcctgtcaagagaacctacgaacagatggaatttcctctgctgaagaagaggaagctcgatgatgactcagattcaccaagctttttcgaggagaaaccagaagaaccagtggtgttggctttagatcccaagggtcatgaggacgatagctacgaggcacggaaatctttcttaacaaaatactttaataaacagccctacccaacacggcgagaaattgagaaattggccgcctcactttggctgtggaaaagcgacatagccagccacttctctaacaaaaggaagaaatgtgtgcgcgattgtgagaaatataaacccggcgtactgctcggtttcaatatgaaggagctgaataaggtcaagcatgagatggactttgatgccgagtggctctttgaaaaccacgatgagaaggactcccgcgtgaatgccagtaagaccgctgataaaaaactgaaccttgggaaggaggacgacagcagctccgacagttttgaaaatctggaggaggaaagcaacgagagcggctcaccattcgacccagtctttgaggtagagcctaagattagcaatgataaccccgaagaacacgtgttaaaggtgataccggaggatgcatccgaatctgaggagaaactggaccagaaagaggacggaagcaagtacgagaccatccacctgaccgaggaaccaaccaagctcatgcacaatgcgagcgactctgaagtcgatcaagacgatgtcgtcgagtggaaggatggcgctagccccagcgagtccggtcccggcagtcagcaggtgtcagacttcgaagacaacacatgtgaaatgaaaccgggcacgtggtctgacgaatcttcacagtcagaagacgcacggtcttctaaaccggccgccaagaagaaggcaaccatgcagggtgatcgggaacaactgaagtggaagaacagctcttatggcaaggtagaggggttttggtccaaagaccaaagccagtggaaaaacgccagtgaaaatgatgagcgattgagcaacccccaaatcgagtggcagaactcaaccatcgactctgaggacggcgagcagttcgacaacatgactgatggcgttgcagagcccatgcacggcagcttagccggggtcaagttgtcttctcagcaggct

SEQ ID NO: 321455 - DNA, 3306 bp, Artificial Sequence
  derived and/or modified sequence
atgtttcaattaccagttaataacttgggaagcttaagaaaagcaagaaagacagttaaaaaaatattaagtgatattggattagaatattgtaaagagcatattgaagatttcaaacagtttgaaccaaacgacttctatttaaagaatactacttgggaagatgtaggtctttgggatccatcactaacaaaaaatcaagattacagaacaaaaccattttgttgtagtgcttgtccattttcatcaaagttttttagtgcatataagagtcatttcaggaatgttcatagtgaagattttgaaaacagaattttacttaattgtccatattgtactttcaatgcagataaaaaaacccttgaaactcatattaagatatttcatgcacctaatgcatcagcaccatctagttctttatcaacatttaaagacaagaataaaaatgatggattaaaacctaaacaagcagatagtgttgaacaagcagtttattattgtaagaaatgcacttatagagatccattatacgaaatcgttagaaaacatatttatagagagcattttcaacatgtagctgcaccttatattgctaaagctggtgaaaagtctttaaatggagcagtacctcttggttctaatgctagggaagagagtagtattcattgtaaaagatgtctttttatgccaaagagttatgaagctttggttcaacatgttatcgaagaccatgaaagaattggatatcaagttacagctatgataggacatacaaatgttgttgttcctagatcaaaaccattaatgcttattgcacctaaaccacaagataaaaagtctatgggattaccacctagaattggaagtcttgctagtggaaatgttagaagtcttccatcacaacagatggttaatagattatctattcctaaaccaaaccttaactctactggtgttaatatgatgtcatcagttcatcttcaacaaaataattatggagttaaatcagttggacaaggatatagtgtaggacaatcaatgagattaggattaggaggaaatgcaccagtttcaattccacaacaatcacaatctgttaaacaattgcttccatcaggaaatggaagaagttatggattgggatcagaacaaagaagtcaagcaccagcaagatattctttacaaagtgctaatgcttcttctcttagtagtggacaattaaaatcaccaagtttatcacaatcacaagcttctagagttttaggacaatcatcttcaaaaccagctgcagcagctacgggaccaccaccaggaaatacatcatcaacacagaaatggaaaatttgtactatttgtaatgaactttttccagaaaatgtttattcagttcatttcgagaaggagcacaaagcagaaaaagttccagctgttgctaattatataatgaagatacataattttacctcaaaatgtttatattgtaatagatatttaccaactgacactttacttaatcacatgcttattcatggactttcatgtccttattgtagaagtacttttaatgacgttgaaaaaatggcagctcatatgagaatggttcatatagatgaagaaatgggaccaaagacagatagtacattatccttcgatttaacattacaacaaggatcacatactaatattcacttattagttactacttataacttaagagacgcaccagcagagagtgttgcatatcatgctcaaaataatcctcctgttcctcctaaaccacaaccaaaagtacaagaaaaagcagatattccagttaaatcttccccacaagcagctgttccatacaaaaaagatgttggaaaaactttatgcccattatgtttcagtattttaaaaggaccaataagtgatgccttggcccatcacttgagagaaagacatcaagtaattcaaacagttcatcctgtagagaaaaaacttacgtataaatgtattcattgtttaggagtatatacaagtaatatgacggcctcaacaatcactttacatttagttcattgtagaggtgttggaaaaacacaaaacggacaagataaaactaatgctccaagtagacttaatcaatcaccatcattagctccagttaagagaacatatgaacaaatggaatttccattattaaaaaagagaaaattagatgatgattctgatagtccatctttttttgaagaaaaaccagaagaaccagttgtcttagcacttgatccaaaaggacatgaagatgattcttacgaagctagaaaatcatttttaacaaaatatttcaataagcagccatatccaactcgtagagaaattgaaaaattagctgcttctttatggttatggaaatctgatatagcatctcatttcagtaataagcgtaaaaagtgtgttagagactgtgaaaaatataagccaggtgttttattaggtttcaatatgaaagaacttaataaggttaagcatgaaatggatttcgacgcagaatggttattcgaaaatcatgatgaaaaagattctagagttaatgcatctaaaactgcagataaaaaacttaatcttggaaaagaagatgattcatcatcagattcattcgagaatttagaagaagaaagtaacgaaagtggatctccttttgatcctgtatttgaagttgaaccaaaaatttctaatgacaatccagaagaacacgtattaaaggttataccagaagatgcatcagaatcagaagaaaaacttgatcaaaaagaagacggttcaaaatatgaaacgatacacttaacagaagaaccaacaaaacttatgcacaatgctagtgattcagaagttgatcaagacgatgttgtggaatggaaagatggagctagtccatctgaatctggaccaggatctcaacaggtttctgatttcgaagacaatacttgtgaaatgaaaccaggtacttggtcagatgagtcatcacaatcagaagatgctagatcatctaaacctgcagctaagaaaaaagctacaatgcaaggagatagagaacaattaaagtggaaaaattcttcatatggaaaagttgaaggattttggagtaaagaccaatcacaatggaaaaatgcttctgaaaacgatgaaagattaagtaatccacaaattgaatggcaaaattctactattgatagtgaagatggagaacaatttgataatatgacagatggagtcgctgaaccaatgcatggatctcttgcaggagttaaattatctagtcaacaagca

SEQ ID NO: 321456 - DNA, 3306 bp, Artificial Sequence
  derived and/or modified sequence
atgttccagctgcctgtgaataacctggggtcgctcagaaaggcccgcaagactgtgaagaagatcttgtccgatattggactggagtactgcaaggaacatatcgaggactttaaacaattcgaacctaatgatttctacctgaagaatacgacttgggaggacgtcgggctctgggacccatccctgaccaagaaccaggattaccgcactaagcccttttgctgctccgcatgcccctttagctcgaagttcttctcagcgtacaagtcgcacttccgcaatgtccactcggaggactttgaaaatcgcatcctgctgaactgtccctactgcacttttaacgcggacaagaaaactcttgaaactcatatcaaaatcttccacgcgccaaacgcttcagccccgtcctcgtcactctccaccttcaaggacaagaacaagaatgacggcctgaagccgaagcaggctgattccgtcgaacaagctgtgtactattgcaagaagtgcacttatcgcgacccgctgtacgaaatcgtgcgaaagcacatttatcgcgaacatttccaacatgtggccgctccatatatcgcaaaggccggcgaaaagtcactgaacggagctgtgccgctgggatcgaacgcccgggaggagagcagcatccactgcaagagatgcctcttcatgccgaagtcctacgaggccctggtgcagcatgtcattgaagatcacgaaaggatcggataccaagtgaccgcgatgatcggacacactaatgtggtggtgcctcgctcgaaaccactgatgctcatcgcaccgaagccgcaggacaagaagtcgatgggtctgccgcccaggatcggaagcctggcttctggcaacgtgagatcactgccttcccagcagatggtgaaccggctcagcatccctaaaccgaatctgaactccactggcgtcaacatgatgtcctccgtgcatcttcagcagaacaactacggagtgaaatcggttggtcaagggtactccgtcgggcaatcgatgcgcctgggcctcggaggcaacgcccctgtgtcgattccgcaacagtcgcaatcagtcaagcagctgctgccgtccggaaacggacggtcatacggactgggaagcgagcaaagatcacaggcgcctgcacgatactcattgcagagcgcgaatgcgtcatcactgtcgtcaggacagctcaaatccccgtcactgtcccagtcgcaggcctcccgcgtgctcgggcaatcgtcgagcaagccagcagctgcggccaccggtccaccgccgggaaatactagctcgactcagaagtggaagatctgcacgatctgcaacgaattgttcccggagaacgtctactccgtccactttgagaaggaacataaggccgaaaaggtgcccgccgttgccaattacatcatgaagattcacaactttacctcgaaatgtctgtactgcaacaggtacctccccaccgacactttgctcaaccatatgctgattcatggcctgtcctgcccatactgccggtccaccttcaacgatgtggagaagatggccgcacacatgcggatggtgcacatcgatgaagagatggggccaaagaccgactcgaccctgagcttcgacctcactctgcaacaagggagccacactaacatccacctgctcgtgacgacctacaatctgcgagatgccccagcggagagcgtggcgtaccacgcccagaataaccccccagtaccgccgaaaccacagcctaaggtccaggaaaaagcagatatccctgtgaagtcgtccccgcaggcagcggtgccgtacaagaaagatgtcggcaagaccttgtgtccgctgtgtttctccatcctgaaggggccaattagcgatgcgctcgcccaccatctgagagagaggcaccaggtgatccagaccgtccaccctgtggaaaagaagctgacctacaagtgcatccattgccttggagtgtacacctcgaacatgaccgcatcgacgatcactctgcaccttgtccattgcagaggagtgggtaaaacccagaacgggcaagacaaaaccaacgcgccaagcaggctgaatcagagcccgtcgcttgctcctgtgaagcggacgtacgaacagatggaatttccgcttctgaagaagcggaaactggatgatgattcagatagcccgtcattctttgaagagaagccggaggaaccagtcgtgctggcactggatccgaagggacatgaagatgattcatacgaagcaagaaaatcctttctgactaagtactttaacaagcagccgtacccgactcgccgtgagatcgaaaaactcgccgcttctctgtggctgtggaagtccgatattgcttcccacttctcaaataagaggaagaagtgtgtgcgcgattgtgaaaagtacaagccaggagtcctcctgggcttcaacatgaaggaactcaacaaggtcaaacacgagatggattttgacgctgaatggctcttcgaaaatcatgatgagaaggattcgcgggtcaacgcctcgaaaacggctgacaagaagttgaatctgggaaaggaggatgattcctccagcgattcgttcgaaaacctcgaagaggagtcgaacgaatcaggatcccctttcgatccggtttttgaggtggaacctaagatcagcaacgataacccagaagaacatgtgctcaaagttatcccagaagatgcttccgagtcagaggaaaaactggaccagaaggaggacggatcgaagtacgaaactatccaccttactgaggagcctactaaactcatgcataacgccagcgactccgaagtcgaccaggacgacgtcgtggagtggaaggacggagcatcaccttccgagtccggaccgggcagccagcaagtgtccgacttcgaagataatacctgcgagatgaaacctgggacttggtcagatgagtcaagccagagcgaagatgcccgatcgagtaagcctgcggcgaaaaagaaggcgactatgcagggcgaccgggagcagctgaagtggaagaattcgtcgtacggaaaggtggagggattttggtcgaaagatcagtcacaatggaagaacgcgtcggaaaatgacgaacggctgtccaacccacagatcgaatggcagaacagcaccatcgattccgaagatggcgagcaattcgacaatatgaccgatggagtcgcggagccgatgcacggctcgctggcgggcgtcaaactgtcctcgcagcaggcc

SEQ ID NO: 321457 - DNA, 3306 bp, Artificial Sequence
  derived and/or modified sequence
atgtttcaattaccggttaataatttaggttcgctacgtaaagcgcgaaaaacggttaaaaaaatattatcggatataggtctagaatattgtaaagaacatatagaagattttaaacaatttgaaccgaatgatttttatctaaaaaatacgacgtgggaagatgtaggtttatgggatccgtcgctaacgaaaaatcaagattatcgaacgaaaccgttttgttgttcggcgtgtccgttttcgtcgaaatttttttcggcgtataaatcgcattttcgtaatgttcattcggaagattttgaaaatcgaatactactaaattgtccgtattgtacgtttaatgcggataaaaaaacgctagaaacgcatataaaaatatttcatgcgccgaatgcgtcggcgccgtcgtcgtcgttatcgacgtttaaagataaaaataaaaatgatggtctaaaaccgaaacaagcggattcggtagaacaagcggtatattattgtaaaaaatgtacgtatcgtgatccgttatatgaaatagttcgtaaacatatatatcgtgaacattttcaacatgttgcggcgccgtatatagcgaaagcgggtgaaaaatcgctaaatggtgcggttccgctaggttcgaatgcgcgagaagaatcgtcgatacattgtaaacgttgtctatttatgccgaaatcgtatgaagcgttagttcaacatgtaatagaagatcatgaacgaataggttatcaagtaacggcgatgataggtcatacgaatgtagttgtaccgcgttcgaaaccgttaatgttaatagcgccgaaaccgcaagataaaaaatcgatgggtttaccgccgcgtataggttcgttagcgtcgggtaatgttcgttcgttaccgtcgcaacaaatggtaaatcgtttatcgataccgaaaccgaatctaaattcgacgggtgttaatatgatgtcgtcggtacatttacaacaaaataattatggtgttaaatcggtaggtcaaggttattcggtaggtcaatcgatgcgattaggtctaggtggtaatgcgccggtatcgataccgcaacaatcgcaatcggtaaaacaattactaccgtcgggtaatggtcgatcgtatggtttaggttcggaacaacgttcgcaagcgccggcgcgttattcgttacaatcggcgaatgcgtcgtcgttatcgtcgggtcaattaaaatcgccgtcgttatcgcaatcgcaagcgtcgcgtgttctaggtcaatcgtcgtcgaaaccggcggcggcggcgacgggtccgccgccgggtaatacgtcgtcgacgcaaaaatggaaaatatgtacgatatgtaatgaattatttccggaaaatgtttattcggttcattttgaaaaagaacataaagcggaaaaagttccggcggtagcgaattatataatgaaaatacataattttacgtcgaaatgtctatattgtaatcgttatctaccgacggatacgttactaaatcatatgctaatacatggtttatcgtgtccgtattgtcgttcgacgtttaatgatgtagaaaaaatggcggcgcatatgcgtatggtacatatagatgaagaaatgggtccgaaaacggattcgacgttatcgtttgatctaacgttacaacaaggttcgcatacgaatatacatctattagttacgacgtataatctacgtgatgcgccggcggaatcggtagcgtatcatgcgcaaaataatccgccggtaccgccgaaaccgcaaccgaaagtacaagaaaaagcggatataccggtaaaatcgtcgccgcaagcggcggttccgtataaaaaagatgttggtaaaacgctatgtccgttatgtttttcgatattaaaaggtccgatatcggatgcgctagcgcatcatctacgagaacgtcatcaagttatacaaacggtacatccggttgaaaaaaaattaacgtataaatgtatacattgtctaggtgtatatacgtcgaatatgacggcgtcgacgataacgctacatttagttcattgtcgaggtgttggtaaaacgcaaaatggtcaagataaaacgaatgcgccgtcgcgtctaaatcaatcgccgtcgctagcgccggtaaaacgaacgtatgaacaaatggaatttccgttattaaaaaaacgtaaattagatgatgattcggattcgccgtcgttttttgaagaaaaaccggaagaaccggttgtactagcgttagatccgaaaggtcatgaagatgattcgtatgaagcgcgaaaatcgtttctaacgaaatattttaataaacaaccgtatccgacgcgacgtgaaatagaaaaactagcggcgtcgttatggctatggaaatcggatatagcgtcgcatttttcgaataaacgaaaaaaatgtgtacgagattgtgaaaaatataaaccgggtgtattactaggttttaatatgaaagaattaaataaagtaaaacatgaaatggattttgatgcggaatggttatttgaaaatcatgatgaaaaagattcgcgagtaaatgcgtcgaaaacggcggataaaaaattaaatctaggtaaagaagatgattcgtcgtcggattcgtttgaaaatctagaagaagaatcgaatgaatcgggttcgccgtttgatccggtttttgaagtagaaccgaaaatatcgaatgataatccggaagaacatgttttaaaagtaataccggaagatgcgtcggaatcggaagaaaaactagatcaaaaagaagatggttcgaaatatgaaacgatacatttaacggaagaaccgacgaaattaatgcataatgcgtcggattcggaagtagatcaagatgatgtagttgaatggaaagatggtgcgtcgccgtcggaatcgggtccgggttcgcaacaagtttcggattttgaagataatacgtgtgaaatgaaaccgggtacgtggtcggatgaatcgtcgcaatcggaagatgcgcgatcgtcgaaaccggcggcgaaaaaaaaagcgacgatgcaaggtgatcgagaacaactaaaatggaaaaattcgtcgtatggtaaagtagaaggtttttggtcgaaagatcaatcgcaatggaaaaatgcgtcggaaaatgatgaacgtctatcgaatccgcaaatagaatggcaaaattcgacgatagattcggaagatggtgaacaatttgataatatgacggatggtgttgcggaaccgatgcatggttcgctagcgggtgttaaactatcgtcgcaacaagcg

SEQ ID NO: 321458 - DNA, 3306 bp, Artificial Sequence
  derived and/or modified sequence
atgttccaacttcctgtgaacaatctcggctcgttgcgcaaagcgcgaaagaccgtgaagaaaatcttgtccgatattggactggaatactgcaaagaacacatcgaggatttcaaacaattcgaaccgaacgatttctacctcaagaataccacctgggaggacgtcgggctgtgggatccgagcctgaccaagaatcaggattacagaacgaagccgttttgctgttcagcatgcccgttctcgtcgaaattcttctcggcatataagtcgcacttccgcaacgtgcattcagaagatttcgagaacaggattcttctgaactgcccctactgcactttcaatgcagacaagaaaactcttgaaactcacataaagatattccatgcgccaaacgcctcggccccaagcagcagtctgtcgaccttcaaggacaaaaacaagaacgacggactgaaaccaaaacaagccgattcagtggaacaagcggtgtactactgcaagaaatgcacttaccgcgatcctctttacgagatcgttagaaagcatatctaccgagaacatttccagcacgtcgccgctccttacatcgcaaaggccggcgagaagtccctcaatggcgcagtgccactggggtcgaacgccagagaagaatcgtcaatccactgcaagcgctgcctcttcatgcccaaatcgtacgaggctctggtccagcatgtgatcgaggatcacgaacggatcggttatcaggtgaccgctatgattggacacacgaacgtggtggtcccgcgttccaagccactcatgttgatcgcgcccaagccacaggacaagaagtcgatgggtctgccgccaagaattggatctcttgcctcgggaaacgtacgctccttgcctagccagcagatggttaatcggctttccatcccgaaacctaatctgaattcaactggtgtcaatatgatgtccagcgtccacctgcaacagaacaactacggagtgaaatccgtcggacagggatactcggtcggacagagcatgcgcctcgggctcggtggcaatgctccggtgtcaatccctcagcaatcgcaatccgtcaaacagctgctgcccagcggcaacgggagatcgtacgggctcggcagcgagcaacgttcccaggcaccggcaaggtacagtctgcaatctgccaacgcaagtagcctgagctccggacaactcaaatccccgtcactctcacagagccaggcctccagggtcctgggacagtcgtcgagcaagcccgctgccgctgccactggaccaccaccgggaaacacgagctctactcaaaagtggaaaatctgtaccatctgcaacgaactctttcctgaaaatgtgtattccgtgcatttcgaaaaggagcacaaggccgaaaaggtcccagctgtggcaaactacattatgaagatccataacttcaccagcaagtgcctctactgtaacaggtatttgccgactgatacccttctgaaccatatgctgatccatgggctgtcatgcccgtactgccgctcaacctttaatgacgtggagaagatggccgcacacatgcggatggtgcatattgacgaagaaatgggcccaaagactgacagcactctttcatttgatctcacgctccaacagggatcgcacactaacattcacctcctggtgaccacctataatctccgagacgctccggccgaatccgtggcataccacgcccaaaacaacccaccagtgcctccgaagcctcagccgaaggttcaagagaaggccgacattccggttaagtcctcacctcaggccgcggtcccctacaagaaggacgtgggcaagactctttgccctctgtgcttctctatcctgaaaggaccgatctctgatgctttggcgcaccatctgcgggagcgccaccaggtcatccaaaccgtgcaccctgtggaaaagaaactcacgtacaagtgcattcactgtcttggggtgtacacttcaaatatgactgcctcgaccatcaccctgcatctcgtccattgtcgcggagtgggtaaaacccagaacgggcaggataagactaacgctcctagccggttgaatcagtccccttccctggccccggtaaaacggacttacgagcagatggagttcccgctgctgaagaagcggaagctggatgatgatagtgactcgcccagcttctttgaggagaaaccggaagaaccggtggtgctcgctctggacccgaagggccacgaggacgattcgtacgaggccagaaagtccttcttgaccaaatactttaacaagcagccctacccgacccgcagagaaatcgagaaactggcggcgtccctttggctgtggaagagcgatatcgccagccactttagcaataagagaaagaaatgtgtgagagactgtgaaaagtacaaaccgggagtgctcctggggtttaacatgaaggaattgaataaggtgaagcacgaaatggacttcgatgccgagtggctgttcgaaaatcacgatgaaaaagactccagggtgaacgcgagtaagaccgcggacaagaaactgaatctggggaaggaggacgactcgtcgtcggactctttcgaaaacctggaggaagagtccaacgagtcgggatccccatttgatccggtgttcgaggtcgagccgaagatcagcaatgacaacccggaagagcatgtcctgaaggttatcccggaggacgcctcggaatcagaagaaaagctcgaccagaaggaagatggatccaagtacgaaactatccatttgaccgaagagcctaccaagctgatgcacaatgcgtcggacagcgaagtggatcaggatgacgtagtggaatggaaagatggagcgtctccatccgaatccggaccgggttcccaacaggtttcagactttgaggataacacttgcgaaatgaagccgggtacttggtcggacgagagctcacaatcggaagatgcgcggtcgtcgaagccggctgctaaaaagaaggcaactatgcagggagatcgcgaacagctgaaatggaagaactcttcatacggaaaagtggaaggattttggtcgaaggaccagtctcaatggaagaatgccagcgagaacgacgaacggctttctaacccacagatcgaatggcagaactcaaccatcgactcagaggacggcgagcagttcgataacatgaccgacggggtggcggagccaatgcacggctcgttggcgggagtgaagctgtcctcacaacaggcg

SEQ ID NO: 321459 - DNA, 3306 bp, Artificial Sequence
  derived and/or modified sequence
atgttccagctccccgtgaacaatcttggttccctgagaaaagcaagaaagactgtcaagaaaattctgtccgatatcgggctggaatattgtaaggagcatattgaagatttcaagcagtttgaaccaaatgatttctacctcaagaatactacctgggaagatgtgggactctgggatcctagccttacgaagaatcaagattacagaaccaagccgttctgttgctcggcatgccctttttcttccaaattcttctcagcgtataagtcgcatttcaggaacgtgcattcggaagatttcgaaaataggattctgctcaattgtccctactgtaccttcaatgccgacaagaaaactcttgagactcatatcaagatttttcacgcgccgaacgcatccgcccctagctccagcctctccacctttaaggataagaacaaaaatgacggtctgaagcctaaacaggcggatagcgtggagcaagcagtctactactgtaagaaatgtacttacagggaccctctgtacgaaattgtccgtaagcacatttaccgagagcatttccagcatgtggcagcaccgtacatagcaaaggctggggaaaagtcgctgaacggagcagtcccactgggttcgaatgcacgggaagaatcctcaattcattgcaaacgctgtcttttcatgcctaaatcctacgaagcactggtgcagcacgtgattgaagatcatgaaagaattggctaccaagtgactgcaatgattgggcacaccaacgtggtggtgccacgatccaagccactgatgctgatcgcacctaagccacaagataagaagtccatgggtctgccacctcgcataggctcgttggcatcgggtaatgtgcgatcattgccatcgcaacagatggtgaacagactctctattccaaaacctaacctgaactccaccggagtgaatatgatgtcgtccgttcatctccaacaaaacaactacggagtgaagtctgtgggtcaggggtactcagtcggtcaatcgatgcgcctggggctcggtggtaacgctccagtgagtataccgcaacagtcccaatccgtgaaacagctgctgccatcaggaaatggtcggtcgtacggactcggctccgaacaaagatcgcaggcgccagcaagatactccctgcaaagcgcgaacgcgtcgtctctgtcctccggtcaacttaagtccccttcgctgtctcaatcacaggcatcgagagtgcttggccagtcgtccagcaaacctgcggcagcagcaaccggacctcctcccggtaacactagctcaacccagaagtggaagatttgcactatttgcaatgaactctttccggaaaacgtctactccgtccactttgaaaaagagcataaggcagaaaaggtccctgccgtggccaactacatcatgaagatacacaactttaccagcaagtgtttgtactgtaatagataccttccgaccgataccctcctgaaccatatgcttatccacggactctcttgtccatactgcagatcaaccttcaatgacgtggaaaagatggcggcacatatgaggatggttcatattgatgaggagatgggtcccaagaccgactccactttgtcctttgacctcactcttcagcaaggatcacataccaacattcaccttttggtcaccacctacaatttgagagacgcgcctgcagaaagcgtcgcataccatgcacagaataatcctccagtccctcctaaaccccagcctaaggttcaggagaaagcggatattccagtgaagtcctcgcctcaggcagcagtcccctacaagaaggatgttggtaagactctgtgtcctctgtgtttctccattctgaagggtcctatatctgatgccctcgcgcatcacctgagagagagacatcaggtgatccaaactgtccacccagtcgaaaagaagctgacctacaagtgcatccattgtctgggtgtgtatacttccaacatgaccgcgtcgactatcactcttcatctcgtgcattgtcggggtgtgggcaagacgcaaaacggtcaggataagaccaacgcaccatccaggctgaaccaaagcccatctctcgccccagtgaaacgtacctacgagcagatggaatttccccttttgaagaaacgtaagctcgatgatgattcggatagcccttcctttttcgaggagaagccagaagaaccagtcgtcctggcacttgaccccaaagggcacgaagatgactcgtacgaggccagaaagtcattcctgaccaagtacttcaataagcaaccttaccctacccgtagagaaattgagaaacttgcagcttcactgtggctttggaagagcgatattgcatcccatttttcaaacaaacggaagaaatgtgtgcgggattgtgaaaagtacaaacctggagtcctcctgggctttaacatgaaggaactcaacaaggtgaagcatgaaatggactttgacgcagaatggcttttcgagaatcatgatgaaaaagattccagagtgaacgcttctaagactgcagataagaaacttaacctggggaaggaggatgattcatcgtcggactcatttgagaaccttgaggaagagtcgaatgaatcaggttcgccttttgatcctgtgtttgaggtggaacccaagatttcgaacgataacccggaagaacatgtcctgaaggtgatccccgaagatgcatcagaatcggaagaaaagctcgaccagaaggaagatggatcaaaatacgaaaccatccatcttacggaggagcctactaagctcatgcataatgcctcagactcagaggtcgaccaggatgacgtagtcgaatggaaggacggagcttccccttccgaatccgggcctggctcacagcaggtcagcgattttgaagataacacttgtgagatgaagcctggaacttggtcagatgagtcctcgcaatcggaagatgcacgtagctccaaacccgccgcgaagaagaaagcaactatgcaaggcgatcgggagcaactgaagtggaagaattcgagctacggtaaggtggagggattctggagcaaagaccaatcccaatggaaaaatgcgtcagaaaacgatgaacgtctgagcaatccgcaaatcgaatggcaaaactccactatcgattcagaggatggagaacaatttgataacatgacggacggcgtggcagaaccaatgcatgggtcacttgctggcgtgaaactttcgagccaacaagct

SEQ ID NO: 321460 - DNA, 3306 bp, Artificial Sequence
  derived and/or modified sequence
atgtttcagctgcccgtgaataatctaggaagccttcggaaggcccggaagactgtgaagaagatactatccgacataggtcttgagtactgtaaagagcatattgaggattttaagcagttcgagccaaatgatttctacctgaaaaacactacctgggaggatgttggcctgtgggatccctctctgaccaaaaaccaggattatcgaaccaagcccttttgttgtagcgcctgtcccttctcttctaaattcttcagcgcatacaagagtcattttaggaacgttcattccgaggatttcgagaacagaattctcttaaactgcccttattgcacctttaatgcagataagaaaaccctggagactcacataaaaattttccatgcacctaacgctagtgcaccaagctccagtctgtccacctttaaagataagaacaaaaacgacggtctaaagcccaagcaggccgacagtgtggagcaggcagtttattattgcaagaaatgtacatatagagatcctctatacgaaatcgttcgaaagcacatttaccgggaacattttcaacacgtcgccgccccatacattgctaaagccggcgagaagtccctcaatggagccgtgcctttaggcagtaatgccagggaggaaagcagtattcattgcaagaggtgcctgttcatgccaaagtcttacgaagctctggttcagcatgttatcgaggaccacgagcgaatcggataccaagtgaccgcaatgatcggacacactaatgtggtggtacccaggtctaaacccttaatgctgatcgcacctaagccacaggataagaagagtatggggttgcctccccgaattggcagcctagcaagcgggaatgtcaggtccctgcctagccagcaaatggtgaacagattgtctatacccaagccgaacctgaattctaccggggtgaacatgatgtcctcagtgcatttacagcagaataattacggggtcaagtcagtgggacaggggtactccgtgggccagtccatgcgactaggcctcggcggaaacgcacctgtcagtattcctcagcaaagtcagtcagttaaacagctgcttccaagtgggaatggcagatcttatggactggggtctgaacaaagaagccaggcacctgctcgttacagcctgcagtctgctaatgctagcagcttaagcagcggacagttaaagtcccctagtctatcccagagtcaagcatctcgggtcctaggccagtcctcctctaagcccgccgctgctgccactggcccccccccaggcaacacttctagtacacagaaatggaagatttgtaccatatgcaacgagctgtttcctgaaaacgtgtacagtgtgcatttcgaaaaagagcataaggcagagaaagtgcctgccgttgcaaattacattatgaagatccataacttcacctcaaagtgcctctactgtaatcgctacttaccaacagataccttactaaatcatatgttaatccacggcctgtcttgtccttactgtaggagcacttttaacgatgtagagaagatggcagctcatatgaggatggtgcatatagacgaggaaatgggacccaaaacagatagcacattgtcctttgacttaaccctgcaacaggggagtcacaccaatatccaccttctcgtcactacttataacctaagggacgcccctgccgagagcgttgcatatcatgctcagaataatcctccagtgcccccaaaaccacagcctaaagtgcaggagaaagctgatatcccagtgaaatcttccccacaggctgccgttccctacaaaaaggacgtgggaaagactctgtgtcctttatgttttagtatcctgaaggggcctataagtgatgctttggctcaccacctacgcgagcgccaccaggtcatacagactgtgcacccagtggagaagaagctgacttataagtgtatccactgtctaggggtgtataccagtaacatgacagctagtaccattaccctgcatctggtacattgtaggggggtggggaaaacccagaacggccaagacaaaaccaatgccccatcaagactgaaccagagtcctagcctggcaccagtgaagcgcacctatgagcagatggaatttcccctactgaagaagcgcaaacttgatgacgattctgacagcccttcttttttcgaagagaagcccgaggagcctgtcgttctagctctggaccctaaggggcacgaggatgactcctatgaagcccggaaatccttcttgactaaatattttaataaacagccttaccctaccagacgcgaaatcgagaaactggcagccagtctgtggctgtggaagtcagacattgcaagccactttagcaataagcgcaaaaaatgcgttagagattgcgaaaagtacaaacctggagttctcctcggctttaacatgaaggaactcaataaggtcaaacacgagatggacttcgacgccgagtggctcttcgaaaaccacgacgagaaggattctagagtgaatgcctctaagaccgctgacaagaagctgaacctgggcaaggaggacgactcatctagtgactccttcgaaaatctggaagaagaatcaaacgagtcaggctctccatttgatccagtgttcgaggttgagcctaagataagtaacgataaccccgaggagcacgtgttaaaagtgatccccgaggatgccagcgagtccgaggagaagctggaccaaaaggaggacggatccaagtacgaaaccatccacctgacagaggagcctacaaaactgatgcataatgccagtgattctgaggtggaccaagacgacgtcgtggaatggaaggacggagcatccccctccgagagcggccccggctcccagcaggtgagtgatttcgaagacaatacttgcgagatgaaacctggcacatggtctgacgaaagcagccagagcgaggatgccaggtcatctaaacctgctgccaagaaaaaagcaactatgcagggagatcgagagcaactgaaatggaagaacagcagctacggcaaggttgagggtttctggtccaaggatcagagtcagtggaaaaacgctagtgaaaatgatgaacgcctgtcaaacccccaaattgaatggcagaactctaccattgattccgaggatggggagcagtttgataacatgacagatggagtggcagaaccaatgcacggatccctcgctggagtgaaactgtcatcccagcaggca

SEQ ID NO: 321461 - DNA, 3306 bp, Artificial Sequence
  derived and/or modified sequence
atgttccagctgcctgtcaataacctggggtctctgcgtaaggcccggaagaccgtgaaaaaaatcctttccgatatcggtctcgaatactgcaaagaacacattgaggacttcaagcagttcgagccaaatgatttttacttaaaaaacacaacttgggaggacgtgggcctttgggacccatctctcactaaaaatcaggactatcgaaccaaaccattctgctgtagtgcatgcccgttctcttctaaattcttctccgcctacaaatctcatttccgcaatgtacattcggaggactttgaaaaccggatcctgctcaactgcccttattgtacattcaatgccgataaaaaaacattggagacacacattaaaatctttcacgccccgaatgcttccgcccctagctcttccctgtccacattcaaagacaaaaacaagaatgatggtctaaaacctaagcaggctgactctgtcgaacaagccgtgtactattgcaagaagtgcacctatcgtgatcctctctatgaaattgtgcgcaagcacatatatagggagcactttcagcacgttgccgcaccttacatcgcgaaggctggggagaagtccttaaacggggctgtgcccctgggctctaacgcccgcgaggaatcttcaatccattgtaagagatgtttgttcatgccaaagagctacgaggccctggtgcagcacgttatcgaggatcatgagagaataggttaccaagtcaccgcaatgattggacacacaaacgttgtagtaccaagatcgaagcctctgatgctgatcgctcccaagccgcaagataagaagagtatggggctgcctcctagaattgggtccctggcgtccggcaacgtcaggtccctcccttcacagcagatggtgaaccggttgtctatccccaaaccaaatctgaattcaaccggcgttaatatgatgtcttcagtgcatctgcagcagaataattatggggtgaaatcagtgggccagggatacagcgttggccaaagtatgaggttaggactaggaggaaacgcaccggtcagcataccgcagcagtcccaaagtgtgaaacagctccttccatcgggtaacgggcgaagctacggcctcgggtctgaacagaggagccaggcccctgctcgctactctttgcagtccgcaaacgcatcttctttgagcagtggacagttaaagtccccttctctctcgcagtctcaggctagtagagtcctgggacagagttcaagtaaacctgccgctgcagccaccggtccaccaccaggcaatacttcctctacacaaaagtggaaaatctgtactatatgtaatgaattgtttcctgagaacgtgtattccgtacactttgagaaagagcacaaggccgagaaggtccccgcagtggccaattatattatgaaaatccacaacttcactagcaagtgtctctactgtaatagatatttacctacggatacactacttaaccacatgctgattcatggactatcttgcccctactgcaggtctacatttaacgatgttgagaaaatggctgcacacatgcggatggttcatatcgacgaggagatgggaccaaaaaccgatagcaccttgtcctttgacctgactctgcagcaggggtcgcacactaacatacacttgcttgtgaccacatataacctgagagatgcccccgcagagtccgtggcatatcacgctcagaataacccgcctgtcccccctaaacctcagcccaaagtacaggaaaaagccgatataccggttaaatcctctccccaggccgctgtaccctacaagaaggatgttggcaagacactgtgcccactgtgcttttcgattctaaaaggccccataagtgatgcactcgctcatcacttgcgagaacgccaccaggtgatacagaccgtacacccagtggaaaagaaattaacttataaatgcattcactgcctgggtgtctacacgtctaacatgactgcctccaccattacgctgcacctggtgcattgtaggggcgtgggcaagacacagaacggccaggataagacaaatgcaccatctcggcttaaccagtcccctagcctggccccagttaagcgtacctacgagcaaatggagtttccactgctaaaaaagagaaaactcgatgacgacagcgattctccaagtttcttcgaagaaaaacctgaagagcccgtggtgctggccctagaccctaagggacacgaggacgactcatacgaagcgcgtaagtcattcttgaccaagtactttaacaagcaaccgtacccaacccgacgtgaaatcgaaaagctcgccgcctccctatggctgtggaaatcggatatcgcatcacactttagcaacaagcgaaaaaaatgtgtacgggattgcgagaagtataaaccaggggtgctcttgggtttcaacatgaaggaactcaataaggtaaagcacgagatggattttgatgctgaatggttgtttgagaatcatgacgagaaggacagccgcgtcaacgcttccaagaccgccgataaaaaattaaatcttgggaaggaggacgactctagttcagattcttttgagaaccttgaagaagaatctaacgagagcggctctccgtttgaccccgtatttgaggtcgagcccaaaatctccaacgacaatccggaggaacacgtgttgaaagtgattccagaggacgcatcagagagtgaggagaaattggaccagaaagaagatggcagcaaatatgagaccattcacctgaccgaagagccaaccaagctgatgcataatgccagtgattcggaggtcgatcaggatgatgtggtggagtggaaagatggtgcctcaccctctgagtcggggcccgggagtcagcaggtcagcgatttcgaagacaatacatgtgagatgaagccagggacttggtcagacgagtcctcacaaagtgaggacgcccgttcatccaaacctgctgcgaaaaaaaaagctactatgcaaggggaccgagagcagctgaaatggaaaaactcatcctacgggaaagtggaaggattctggagtaaggatcaatcccagtggaagaatgcaagcgagaacgacgagcggctctcaaaccctcagattgagtggcaaaactcaactatcgattctgaggacggtgaacaatttgacaacatgacagacggcgtcgccgagcctatgcatggctcactcgcaggcgtgaagcttagtagtcaacaggcc

SEQ ID NO: 321462 - DNA, 3306 bp, Artificial Sequence
  derived and/or modified sequence
atgttccaactcccagtgaacaaccttggatccctgcgaaaggcacgtaagactgtgaaaaagattcttagcgatattggtcttgagtactgtaaggaacatattgaggatttcaagcagtttgagcctaatgacttctacctcaagaataccacgtgggaggatgtgggattgtgggacccttcgctgaccaagaaccaggactaccggaccaagccattttgctgctcagcctgtcctttctcgagcaagttcttcagcgcctacaagtcccattttagaaatgtgcattcagaggactttgagaatagaattctcctcaactgtccatattgtacgttcaacgctgataagaaaacgcttgaaactcacataaagatattccatgcgcccaacgcatccgcgcctagctcgagcctctccacttttaaggacaagaacaaaaacgatggactgaagcctaaacaggcagattcagtcgaacaagcagtgtactactgtaagaaatgtacttaccgggacccactgtacgaaattgtgaggaaacatatctaccgggagcatttccaacatgtggcggcaccttacattgcaaaggcgggagagaaatcacttaatggtgcagtgccgctcggctccaatgcaagagaagagagctccatccactgtaaacgctgtcttttcatgcccaaatcctatgaagcccttgtgcaacatgtaattgaggaccacgagaggattggttaccaagtgaccgcgatgatcggtcataccaatgtggtcgtgccaaggagcaagcctctgatgttgatagcccctaagccacaggataagaagtcgatggggcttccaccgagaatcggtagcctcgcatccgggaacgtcaggtcgctgccatcccaacaaatggtgaacagactctcaatcccaaagcccaacctgaactcaactggggttaacatgatgtcctcggtgcatctccaacaaaacaattacggcgtgaaatctgtgggtcaaggctactccgtggggcaatccatgcgtctcggacttggaggcaatgcgcctgtgtcaataccccagcaaagccaatccgtcaaacagcttttgcctagcggtaacgggcggtcctacggccttggatccgagcagagatcccaagcaccggcacgatactccctgcaatcggcaaacgcttcgtccttgtcaagcggccagctgaagagcccatcgctgtcgcaatcccaggcctcaagggtgctcggtcagagctcatccaagcctgcagccgcagccactggtcctcccccagggaacacttcatccacccaaaagtggaaaatctgtaccatatgtaacgaactttttccagagaatgtgtacagcgtgcattttgagaaggaacacaaagcggaaaaggtccctgctgtggcaaactacattatgaagattcataacttcactagcaaatgtctttactgtaatagataccttcctactgatactcttcttaaccacatgctgatccatggtctttcatgcccatactgccgatccactttcaacgatgtggaaaagatggcagcacatatgcgtatggtgcatatcgatgaagaaatgggccctaagaccgattcgactctgtcctttgatttgacgcttcagcagggatcacataccaacattcacctgctggtcacgacttacaatctgagagatgccccggcggaatccgtggcgtaccatgctcagaacaaccctcctgtgcccccgaagcctcagccaaaggtgcaagaaaaggcagatatccccgtcaagtcgagcccccaggcggcagtgccctataagaaggacgtgggcaagactctgtgccctctttgtttttcgattctgaaaggtccaatctctgatgctctggcacaccatttgcgggaacgccatcaggtcatccagaccgtacacccagtggagaaaaagttgacctataagtgtatccactgtctgggtgtgtacacttcgaacatgacggcaagcactataacgcttcatttggtgcactgtcgaggtgtcggaaagacgcaaaacggacaggataagaccaacgccccatcgcgcctgaatcaatcaccttcacttgcaccagtcaagcgcacctacgaacagatggaatttccgcttctcaagaaaaggaagctggatgatgattccgactcgccttccttctttgaagaaaagcccgaagagccggtcgttctggcgcttgatcccaagggtcatgaggatgattcctacgaagccagaaagtcgttcttgacgaagtactttaacaagcagccgtaccctactagacgggaaattgagaaactggcagcctctctttggctttggaagtcggatattgcatctcatttttcgaataagcgaaagaaatgtgtgcgtgactgtgagaaatacaaaccaggggtgcttctcggatttaacatgaaggaactgaacaaggtcaaacatgagatggattttgacgcagaatggctgtttgaaaaccacgacgaaaaagattccagagtcaacgcgtccaaaactgctgataagaagctgaacctcggaaaggaagatgacagctcatccgatagcttcgaaaaccttgaagaagaaagcaatgagtccggttctccatttgatcccgtgtttgaagtggaacctaagattagcaacgacaatcctgaggaacatgtgctgaaggtcatacctgaagatgcctcggaatcggaggagaagctcgatcagaaagaagatgggagcaaatacgaaacgatccaccttaccgaagagcctaccaaacttatgcacaatgcatcggactctgaggtcgatcaagatgatgtggtcgagtggaaggacggagccagccctagcgagtcgggacccggaagccagcaggtatctgacttcgaagataacacctgtgaaatgaagcctggcacttggtcggatgaatcgtcccagtccgaggacgcacgtagcagtaagcctgcagcgaagaagaaggctacgatgcagggagatagggaacagctcaagtggaagaactcgtcatacggaaaggtggagggcttctggtcgaaggaccagtcgcaatggaagaacgcatccgaaaatgatgaacgcctgtccaacccccaaattgaatggcagaatagcaccatcgacagcgaggacggcgagcaattcgataacatgaccgacggagtcgcagaacctatgcacggttcgcttgccggtgtgaaacttagctcacagcaagca

SEQ ID NO: 321463 - DNA, 3306 bp, Artificial Sequence
  derived and/or modified sequence
atgttccagcttccagtaaataatctcggcagcctgagaaaggcacgcaagaccgtgaaaaagattttgtcagatatcgggctcgagtattgcaaggagcacatagaggatttcaagcagtttgagcccaacgatttttatctcaagaacaccacatgggaagatgtaggcctctgggacccttccctgactaaaaaccaggattaccggactaaacccttttgttgttcggcctgtccattcagtagcaagtttttttcggcatacaaatctcatttcagaaatgtccacagcgaagacttcgaaaaccggattctcctgaattgtccctactgtaccttcaatgcggataagaaaacgcttgaaactcatatcaaaatcttccacgcgcccaatgctagcgctccctccagctccctgagcacatttaaagataaaaataagaatgatggtctgaagcccaaacaagccgactctgtggaacaagccgtttactactgtaagaagtgtacataccgtgatccactctatgagattgtccggaaacatatctacagagagcacttccaacacgtggccgccccctatatcgccaaggcaggagagaaatctctgaatggtgcagtcccgttgggaagtaatgccagagaagagagctctattcattgtaagcggtgcttgttcatgcccaaatcttatgaggctctagtgcaacacgtgatcgaagaccacgagagaatcggataccaagtgacagccatgatcggccataccaacgtcgtcgttccccgcagcaaacctttgatgctaatcgcccccaaacctcaggataaaaagtcaatggggctacccccgcgcattggatcactagcaagtggaaatgtgaggtcattgccctcccagcagatggtgaaccgcttgagcatccccaaacctaacctgaattctactggagtcaatatgatgtcatctgtccacctgcagcaaaacaactatggcgtaaagagtgttgggcagggttattccgttggtcagtccatgcggctgggactaggtggcaacgcgccagtgagcatacctcaacagagccagtctgtgaagcagctgctcccatcgggtaacgggcggtcctacgggctcggctcagagcagcgaagccaggcacccgctcgctatagcctacagtccgcaaacgcgtcctccttgagcagcggtcagctcaagagcccctccctgtcccagagccaagcaagtagagttcttggacagagcagctccaagcccgcggcagccgccacagggcctccacccggtaataccagttccacgcagaagtggaaaatttgcacaatctgcaatgaactgttcccggagaacgtctactctgtccacttcgaaaaggaacacaaagctgagaaagtgcccgccgtcgcaaattacatcatgaagattcataacttcacctccaagtgcctgtattgcaaccggtatctcccaaccgacacacttctgaatcatatgctgattcacggattgagctgcccttactgccgaagtacctttaatgacgtagagaagatggcggctcacatgcgcatggtccacatcgacgaagagatggggcccaagactgacagtacactttccttcgacctaacactgcagcaaggcagtcatacaaatattcacctgctcgtgacaacttacaacctgcgcgacgcacctgctgaaagcgtggcttaccatgctcaaaataatccgcctgtccctcccaagccccagccaaaggtccaggaaaaagcagacatccctgtgaaatcatctccccaggccgcggttccttacaaaaaagatgtgggtaagaccctgtgccccctctgttttagcattcttaagggcccaataagcgacgctctggcccaccacttgcgggaacgacaccaagtgatccagaccgtccatccagttgagaaaaagctgacatataaatgtattcactgcctgggggtttacacctccaatatgaccgccagtacgataacgctgcacctcgttcactgtagaggagtggggaaaactcaaaatggtcaggataagacaaatgctcccagtagactgaatcagagtccaagtctggcacccgtgaaaaggacttacgagcagatggagttcccattactgaagaagaggaagctggacgatgacagtgacagcccgtcattcttcgaggaaaaaccagaggagcctgtcgttttggccttagatcccaaagggcacgaagacgactcctacgaggcccgcaaatcgtttctgactaaatacttcaataaacagccttatcccacgcggcgcgaaattgaaaagctagccgcgtctctttggctctggaagtctgacatcgcgagccattttagcaataagcggaaaaaatgtgtcagagattgcgagaaatataaacctggggttctgctcgggttcaacatgaaggagctgaacaaggtcaagcacgaaatggatttcgacgcagagtggctgtttgaaaatcacgatgagaaagatagccgcgtgaacgccagcaaaaccgcggacaagaaattaaatctggggaaggaagatgatagctctagcgatagttttgaaaatttagaggaagaaagcaatgaaagcggaagcccctttgacccagtatttgaagtggaacctaagataagtaacgacaatcctgaggagcatgttttaaaagtcatccctgaagacgcaagcgagtccgaagaaaaacttgatcaaaaggaagacggatcaaaatacgagaccatccacctaactgaggagccaacaaagctgatgcacaacgcaagcgactcggaagtcgaccaagacgatgtggtagagtggaaggatggtgctagtccatcagagagcggaccgggttcacagcaggtgtctgattttgaggacaatacttgtgaaatgaagcctgggacctggtctgacgagtcctcacaatccgaggatgctcgcagttctaaaccggccgccaaaaagaaagccaccatgcagggcgatcgtgaacagctgaaatggaagaattcgtcctatggcaaggttgaagggttctggtccaaagaccagtctcagtggaaaaatgcttcggaaaatgacgagcgtctgtccaaccctcaaatcgagtggcaaaactccactatcgactctgaggacggtgaacagtttgacaatatgaccgatggggtcgctgagcccatgcacggtagcctggccggtgtgaagctgagttcccagcaggcc

SEQ ID NO: 321464 - DNA, 3306 bp, Artificial Sequence
  derived and/or modified sequence
atgtttcaacttccggtgaataacctgggatctctgcggaaagccagaaagactgtgaagaaaattctctcggacatcggcttggaatactgtaaagagcacatcgaggacttcaagcagttcgagccgaatgacttctatttgaagaacacgacgtgggaggacgtcggattgtgggacccaagcctgactaagaaccaggattaccgaaccaagccgttttgctgcagcgcatgcccattcagctccaagtttttctcagcctacaagtcgcacttccggaatgtgcactcagaggacttcgaaaatagaatcctcctcaattgcccctactgcaccttcaatgccgacaaaaagaccctcgagactcacataaagatcttccatgcgccaaacgcctcggccccgagcagcagcctgagcacttttaaggacaaaaacaagaatgatgggttgaagccgaaacaggccgactcagtggagcaggcggtgtactactgcaagaaatgtacttaccgggatccgctttacgaaatagtaaggaagcacatttacagagagcatttccaacacgttgccgccccgtacatcgccaaagccggagaaaagtcgctgaatggggcagtcccactgggaagcaatgccagagaggagtcgtccatccattgcaagcgctgcttgttcatgccgaagtcatacgaagccctggtacagcatgtcatcgaagatcacgagcgcatcggttaccaggtcactgccatgatcgggcataccaacgtcgtggtgcccagaagcaagcctctgatgctgatcgccccgaaacctcaggacaagaagtctatgggactgccgcctcggattggatccctcgcatcaggcaacgtgcgctccctgccgtcgcaacaaatggtgaatcgcctgtcgatcccaaaaccaaatttgaatagtactggcgtgaacatgatgtcctcggtgcacctgcagcagaacaactacggcgtaaagagcgtcggacagggttattcagtgggccaatcaatgcgcctgggactgggaggaaacgccccggtgagtatcccgcagcaaagccagtccgtcaagcagctgctcccgtccggtaacggacgctcctacggcctcggatccgaacagcgctcgcaagcgccggctcgctactcgctccagtcagcaaacgcatcctcactgtcgtcaggtcaacttaagtccccgtccctctcgcagtcgcaggcgtcgcgggtgcttggccagtcctcgtcaaagcccgcagcagctgctaccggacctccgcccggtaacacctcatccacccagaagtggaaaatctgcaccatctgcaacgagctgtttcctgagaatgtgtactccgtgcatttcgagaaggagcacaaggctgaaaaagtgcccgcggtggccaactacatcatgaaaatccacaatttcacctcaaaatgcctgtactgcaaccgatacctgccaactgatacgctgctcaaccatatgctcatccacggactgtcatgtccatactgcagatccactttcaacgacgtcgaaaagatggcagcgcacatgcgcatggtccatatcgacgaagagatggggccaaagaccgatagcactctttcctttgatctgaccctgcaacaggggtcgcatactaacatccacctcctggtcaccacctacaacctgcgggatgccccggctgaatcagtcgcgtaccacgctcagaacaacccaccagtgcctccaaagcctcagccgaaggtccaggagaaggcggatatcccggtgaagtcgagccctcaagctgcggtgccttataagaaagacgtgggaaagactctgtgcccgctctgtttcagcattctcaaggggccaatcagcgacgctctggcacaccacctccgggagcgtcaccaagtgattcaaactgtgcacccagtggagaaaaagctgacgtacaagtgcatccattgtctgggcgtgtacactagcaatatgacggcgtcgacgatcactcttcaccttgtccattgccgcggagtgggaaaaacccagaacggacaagataaaaccaatgccccgtcacggctcaatcagtcgcctagcctcgcaccggtgaagcggacgtacgaacagatggaatttccgctgctgaagaagcgcaagctggacgacgattccgatagcccgtcgttctttgaggagaagcccgaggaaccagtggttctggctctggatccaaagggacatgaggacgattcctacgaggctcggaaatcattcctgacgaagtactttaacaagcaaccttatccgactcgcagagagatcgaaaagctcgcggcatccttgtggctgtggaaaagcgatatcgcaagccacttctccaacaagagaaagaagtgtgtgcgggattgcgaaaagtacaagccgggagtgctcttgggattcaatatgaaagagctgaacaaagtgaaacacgagatggacttcgacgccgaatggctcttcgaaaatcatgatgagaaggattcgcgggtgaacgcatcaaaaaccgcggacaagaaactcaacctcggaaaggaagatgatagcagttccgatagcttcgaaaacttggaagaggagtcaaatgaatccggctcgcctttcgacccggtattcgaagtggaaccaaaaatcagcaatgacaacccagaagagcatgtcctgaaggtaatcccggaagatgcctcggaatccgaagagaaactggatcaaaaagaagatggaagcaagtacgaaaccattcaccttactgaagaaccaactaagctcatgcataacgcctcagactcagaggtggaccaagacgacgttgttgaatggaaagacggtgcctctccttcagagtccggaccagggtcccagcaagtctcggactttgaggacaacacctgtgagatgaaaccaggcacctggtcggacgaatcatcccagagcgaggacgcgcgcagctcgaagcccgcggcgaaaaagaaggcgactatgcaaggggacagagaacaactgaagtggaagaattcgtcgtacggcaaagtcgaaggattctggtccaaggatcaatcccaatggaagaacgcttccgaaaacgacgaaaggcttagcaacccccagatagaatggcagaactccaccatcgacagcgaggacggggaacagttcgacaacatgaccgacggcgtcgccgaacctatgcacggatcgctcgccggtgtgaaactgtcctcgcagcaggcg

SEQ ID NO: 321465 - DNA, 3306 bp, Artificial Sequence
  derived and/or modified sequence
atgttccagctgcccgtgaacaatctgggcagcttgcgcaaggccagaaagactgtcaagaaaatcttgtcagatatcggcctggaatactgtaaagagcacatcgaggatttcaagcagttcgaaccgaatgacttttacctgaagaacactacctgggaagatgtgggtctgtgggacccatccctgactaagaatcaggattaccgcaccaagccgttttgctgctccgcatgcccattctcctcaaagttcttcagcgcctacaagtctcacttcaggaacgttcactcggaggacttcgaaaatagaattttgcttaactgcccttactgcactttcaatgcggacaaaaagacgctcgaaacccatatcaagatcttccatgccccgaacgcttcggcgccatcgtcctcactgagcaccttcaaggacaagaataagaatgatggactgaaaccgaaacaggcggactcagtggaacaagcggtctactactgcaagaaatgcacttatcgtgaccccctctacgaaatcgtccggaagcacatctaccgcgaacacttccaacatgtggccgccccttacattgccaaggcaggagaaaagtccttgaacggagctgtgccgctgggatcgaacgcacgggaagaaagcagcatccactgcaagcgctgcctgtttatgccaaagtcctacgaagccctggtccaacacgtcatcgaggaccacgaaagaatcggataccaggtcactgctatgatcggccacacgaatgtggtggtgccaagaagcaagccgctgatgcttattgctcctaagcctcaagataagaagtcgatgggtctgcccccaagaatcggatcactcgcgtcgggcaacgtgcgctccctcccttcccaacagatggtcaatcggctgtccatccctaagccgaacttgaactcaacgggcgtgaacatgatgtcgagcgtgcatctccagcaaaacaattatggagtgaagtcggtggggcaaggatactcagtcggacagtcgatgcgtttgggactgggtggtaacgccccggtttccatcccacagcagagccagtccgtcaagcagctgctcccgtccggtaacggacggtcctacggtctgggatcagagcaacggtcccaggccccggcgcgatactcactgcagtctgccaatgcctcgtccctttcatcgggacaactgaaatcgccgtctctgagtcagtcccaggcgtcaagagtgctcggccagtcctcctccaaaccggccgctgcagccaccgggccaccgccaggaaatacctcgagcacccagaagtggaagatctgcaccatctgcaacgaactgttccccgaaaatgtgtacagcgtgcacttcgagaaggagcacaaggccgaaaaggtgccggcagtggcaaactacatcatgaagatccataacttcacctcgaagtgcctttactgcaatcggtatcttccgactgataccttgttgaatcatatgctgatccacggactgagctgtccgtactgccgctccactttcaacgacgtcgaaaagatggcggcccacatgcgcatggtccacatcgacgaggaaatggggccgaaaactgactccaccctgtcctttgatctcacgctgcaacagggatctcacactaacatccacctgttggtcactacgtacaacctgcgcgacgcccctgcggaaagcgtggcctaccatgctcaaaacaacccgccagtcccacctaagccacagccgaaggtgcaggaaaaggctgacatcccagtgaaaagcagcccgcaggccgccgtaccgtacaaaaaagatgtcgggaaaaccctctgccctttgtgcttttcaatcctgaagggcccaatctccgacgcactggcacaccacctcagagagagacaccaagtgatccaaaccgttcacccggtggaaaagaagctcacttacaagtgtatccactgcctgggagtgtacacctcaaacatgactgcctccaccattactcttcatctggtccactgccggggagtcggcaagacccaaaatggacaggataagactaacgctccttcaaggctcaaccaatctcctagcctcgctccagtcaagcgtacctacgaacagatggaattcccacttctgaagaagcgcaagttggatgacgattcagactcaccgagcttcttcgaagagaaacccgaagaacctgtcgtgctggcactcgatccgaagggacacgaagatgattcctacgaagcgcggaagtcattcctcacgaagtactttaacaagcaaccgtaccctaccagacgcgaaatcgaaaagctggccgccagcctctggctctggaagtcggatatcgcctcccatttctcaaacaaacgcaagaagtgtgtgcgcgactgcgagaagtacaaaccgggtgtgctcttgggattcaatatgaaggaactgaataaggtgaagcatgagatggacttcgacgccgaatggctcttcgagaatcatgatgagaaagactcacgagtcaatgcctcaaagaccgctgacaaaaagctgaacctgggcaaggaagatgactcatcctccgatagcttcgagaacctcgaggaagaatcaaacgagtcaggatcaccgttcgatccggtgtttgaggtggagcctaaaatctcaaacgataacccggaggaacacgtcctgaaggtgatcccggaggacgcgtcggagtcggaagaaaagttggatcaaaaggaggatggaagcaaatacgaaaccattcacctgacggaggagccgaccaaactgatgcacaacgcctcagactcggaagtggaccaggacgacgtcgtggagtggaaagacggagcctcgccgtcagaaagcggcccgggttcccagcaggtgtccgatttcgaggacaacacctgcgaaatgaaaccaggaacttggtccgacgaaagctcacagtcagaagatgcgcggtcatccaagccggccgcaaaaaagaaggctactatgcagggcgaccgggaacaactgaagtggaagaattcgagctatgggaaggtggaaggattctggagcaaggaccaatcccaatggaagaacgcgtccgaaaatgatgaacgcctgagcaacccgcagatcgaatggcaaaacagcactatcgattcggaggatggcgaacagttcgacaacatgactgacggagtggcggagccgatgcacggctcgctggctggagtgaaactgtcgtcgcaacaggcg

SEQ ID NO: 321466 - DNA, 3306 bp, Artificial Sequence
  derived and/or modified sequence
atgtttcagctccctgttaacaaccttggcagcctgcgaaaagcccgtaagaccgtcaagaaaatcctgtccgacattggtctggagtattgtaaagagcacatagaggactttaaacagttcgagcccaatgatttttacctgaagaatacgacctgggaggatgtcggtctctgggacccaagcctcacgaaaaatcaggattaccgcacgaagccgttctgctgtagcgcgtgtccttttagctccaagttcttttccgcctataaaagccacttcaggaacgtccattcagaggatttcgagaatcggatcctgctcaattgtccgtactgcacgtttaatgcggataaaaaaacgttggagacccatattaaaatctttcacgcaccgaacgcatcagcgcctagcagtagcctaagcacgtttaaggacaaaaataagaacgacggcctcaaaccgaagcaggcggatagcgtagaacaggcagtgtattattgcaaaaagtgcacctaccgggaccctctgtatgagattgtgcgcaaacatatctaccgcgaacacttccagcacgttgccgcgccatacatcgcgaaggcaggcgagaaatccctgaacggtgctgttccattgggtagcaatgcacgggaagaatccagcattcactgcaagcggtgtctgtttatgccgaagtcttatgaagcgcttgtgcagcatgtgattgaggaccacgagcggattggttaccaagtgacggccatgatcggtcacaccaatgtcgtagtgccacgaagtaaacctcttatgctaattgccccgaagccacaggataagaaatcgatgggtctgccgcctcggatcggctctctggcgagcggcaacgtgcgtagcctgccttcccagcagatggtcaatcggctgagcattcccaagccaaacctgaattctaccggcgtaaacatgatgagttccgtccatctgcagcaaaataactacggtgtcaaaagcgtgggacaaggctacagtgttggtcagagcatgcgccttggtttaggagggaatgcgcccgtgtccatccctcaacaatcccaaagcgtcaaacaattgttaccaagcggtaacggtcgttcttacggcttgggctccgagcagcgcagccaggcaccggcacgctattccctgcaaagcgcaaatgcgtctagtttgagtagtggtcagctgaagagtccttctctgtcccaatcgcaagcgtctcgagttttgggtcagagctcctctaaaccggcagcagctgccacgggccctccgcccggcaatacctctagcacccaaaaatggaaaatctgcaccatttgtaacgagctgtttccggaaaatgtctatagcgtgcactttgagaaggagcacaaagctgagaaggtgccagcagtggcgaattatattatgaaaattcataatttcactagcaagtgcctgtattgtaaccggtacttgcccaccgatacgctgctcaatcatatgttgattcacggcttgtcttgcccttactgccgttccacctttaacgacgtggagaaaatggccgctcatatgcggatggttcatatagacgaggaaatgggcccgaagaccgacagcaccctgtcgttcgatttgacgctgcagcagggttcacatactaacatacacctgctggtgacgacctacaatctgcgcgacgcgccggccgagtcagtggcctaccacgcccagaacaatcccccagttccacctaagccgcagccaaaggtgcaagaaaaggccgacatcccggtgaaatcttcccctcaagcagctgtgccgtataagaaagacgtcggaaaaaccctgtgccccctgtgctttagcattctgaaaggccctattagcgatgctctggctcaccatctgcgcgagcgccaccaggtcattcagaccgtccatccggtggagaagaagctgacatacaaatgcattcactgtttgggcgtatatacctcgaatatgactgcttcgacaatcactctgcatcttgtgcattgtcgtggtgtgggcaaaacccagaacggtcaggacaagacaaacgccccgagccgcttgaaccagtcgccgagcctggcccctgttaagcgcacctatgagcagatggaattcccacttctgaaaaaaaggaaactggatgatgatagcgactctccatcattcttcgaagaaaaaccggaggaaccggtggtgcttgcgcttgatccgaagggccacgaggacgacagctacgaggctcgtaaaagctttctgactaagtattttaacaagcaaccataccccacccgccgcgagatcgaaaaactggctgcatcactgtggttgtggaagagtgatattgcctcacacttcagcaataaacgcaaaaagtgcgttcgtgactgcgagaagtataagcctggtgttctgctgggttttaatatgaaagaactgaacaaagtcaagcatgagatggatttcgacgcggaatggttgtttgagaatcatgacgagaaggacagcagggttaacgctagcaagaccgctgacaaaaagctgaatttaggtaaggaggatgacagctcttccgattccttcgagaacttggaagaggagagcaatgagagcggtagcccattcgaccccgttttcgaggtcgaaccgaagattagcaatgataaccccgaagagcatgtcctgaaagtgatcccagaagatgcaagcgagtcagaggagaagctcgatcagaaggaagacggtagtaaatacgaaactattcatctgactgaggagccaaccaagctgatgcacaatgcctcggacagcgaggtggaccaggatgacgtggtcgagtggaaggatggtgccagtcctagcgaaagcggtccggggtctcagcaggtgagcgatttcgaagacaacacctgcgagatgaagccagggacttggtctgacgaaagctctcagagcgaggacgcacgttcttcgaagcctgccgcgaaaaagaaggctaccatgcaaggtgacagggagcagctgaaatggaaaaatagcagctacggtaaggtggaagggttctggtccaaagaccagagccagtggaagaacgcgtcagagaacgatgagcgtctgagcaacccgcagattgagtggcagaactccactatcgacagcgaagacggcgagcagttcgacaacatgaccgacggtgtcgctgagccgatgcacggcagcctcgcaggtgtaaaactgagctcccaacaagca

SEQ ID NO: 321467 - DNA, 3306 bp, Artificial Sequence
  derived and/or modified sequence
atgttccagttaccggttaataacttgggaagccttaggaaagcgagaaaaactgttaagaagatcctgagcgatattggtctggagtactgtaaggaacatatagaagattttaagcagttcgaacctaacgatttctatctcaagaatactacatgggaagacgttgggttgtgggacccatctcttacaaagaatcaggactataggaccaagcccttctgttgttccgcgtgcccattctcttcaaaatttttttccgcatacaagagtcacttcaggaacgttcattcggaagattttgagaatagaatattacttaactgcccctattgtacctttaatgctgataagaagacattggaaacccatatcaagatctttcatgcccctaatgcttctgctccctctagttctctttcgactttcaaagataagaacaagaatgacggtttaaaacctaagcaggctgattcagtagaacaagcagtatattactgcaagaagtgcacctatcgtgaccccctctatgaaatcgtgagaaagcatatataccgcgagcattttcaacacgtggctgccccgtatattgccaaagctggcgagaagtctctcaacggtgctgtcccactaggttcaaacgctagagaagagagctccattcactgcaaaaggtgtctttttatgccaaaatcctatgaagctctggttcagcacgtcatcgaggatcatgaaaggattgggtaccaagttacagctatgattggacataccaatgtagtcgtcccacgatctaagcctttgatgcttattgctcctaagcctcaggacaagaaatccatgggtcttccacctagaattgggagcctagccagcggtaatgttcgatcacttccatctcaacagatggtcaacagactgtcgattcctaagcctaatcttaactctactggagtaaatatgatgagttccgtccatttgcaacagaataactacggagtgaagtccgtcggacagggttatagtgtcggacaatccatgcgactcggactggggggtaacgctcctgtaagtataccccagcaatctcaaagtgttaagcaacttttaccatcgggaaacggtagatcatatggtttgggctccgaacaacgtagccaagcccctgcacgatactcgcttcaaagtgctaacgcatcaagtctttctagtggacaattgaaatccccaagtctttcgcaatcacaagcttcgcgcgttctaggtcagtcttcctcaaaaccagctgctgctgcaaccggacctcccccgggaaacactagttccacccaaaagtggaagatttgcaccatttgcaacgagctctttcctgaaaacgtatattcagtgcacttcgagaaggaacataaggctgaaaaggttccagcagttgctaactatataatgaaaattcacaatttcacatcgaagtgcctctattgcaaccgctatcttccaaccgacacgcttcttaatcacatgttaatccatggactttcttgcccatattgccgttccacctttaatgatgttgaaaagatggctgcccatatgagaatggtgcatatagatgaggaaatgggtcccaagaccgattcaaccttgtcattcgacctaactcttcaacaaggaagtcacaccaatattcatctgttagttaccacatataatcttcgtgatgcccccgcagagtcagtggcatatcatgctcagaacaatccgccggtgccacctaagcctcaacccaaagtgcaggaaaaggctgatatccctgtaaagagtagcccacaagcagctgttccatacaagaaagacgtgggcaaaaccttatgtcctctgtgtttttcaattttgaaaggacctatctccgatgctctcgcgcaccatctccgtgaacgccatcaggtgattcagaccgtccatccggtcgagaagaagttaacttataagtgcatacattgccttggagtgtacacatccaatatgacggcatcaaccataacactccacttggttcattgtcgtggcgttggtaaaacgcagaacggacaagataagactaacgcaccatctaggctcaaccagtctccttcacttgcaccagttaagagaacctacgaacaaatggaatttcccttacttaagaagagaaaattggatgatgacagcgattctccgagcttcttcgaagaaaagccagaggagccagtcgttttggctttggatcctaaaggtcacgaagatgattcctatgaagctaggaagagcttcctgaccaaatacttcaataagcaaccttatcctacaaggagagagattgagaagcttgctgctagcctctggttgtggaaatctgatattgccagtcatttttcaaacaaacgcaaaaaatgcgttcgagattgtgagaagtataaacccggtgtgttgttgggatttaatatgaaagaactaaataaagttaagcatgagatggatttcgatgcggaatggttattcgaaaatcatgatgagaaggatagtcgagtgaacgcaagtaagacagctgacaagaaattgaacctcgggaaagaagatgatagcagctcagattctttcgagaacctagaggaagaatctaacgaatcaggtagcccgttcgatccggtttttgaggtggaaccgaaaatttctaatgacaatccagaggagcatgtgttgaaggttatccctgaagacgcttctgagtcagaagaaaagttggatcaaaaagaagatggtagcaaatacgagacgattcatctgacagaagagcctactaagcttatgcacaacgcctctgattcggaggttgatcaagatgatgtggtggaatggaaggacggtgcgagtccaagtgagagcggacccggtagccagcaggtgtctgattttgaggataacacttgcgagatgaagcccgggacgtggagcgacgaatctagccaatctgaagatgctaggagtagcaagcctgccgccaagaagaaagcgaccatgcagggtgatcgagagcaattgaaatggaagaattcatcatatgggaaagtcgaaggattttggagtaaagaccagtctcagtggaagaatgcttccgagaacgacgaacgtctctctaacccccagattgagtggcaaaattctaccatagatagcgaggatggcgaacagtttgacaacatgaccgacggagtagctgagccgatgcacggcagcttggcaggagttaagttgtcttcacaacaggca

SEQ ID NO: 321468 - DNA, 3306 bp, Artificial Sequence
  derived and/or modified sequence
atgttccaactgccagtgaataaccttggctcccttagaaaggcccggaaaaccgtcaagaaaattctgtcggatattggccttgaatactgtaaagaacatattgaagatttcaagcagtttgaacctaatgatttctacctgaagaataccacctgggaggatgtgggcctttgggatccttccctgaccaagaaccaagattacaggactaagcccttctgttgttcggcgtgtccattctcatctaaattctttagcgcgtataagtcgcactttagaaatgtccattccgaggactttgaaaataggatattgctgaattgcccatattgtaccttcaatgcagacaagaaaactcttgagactcacataaagatattccatgcccctaacgcatccgcacccagctcaagcctttccacctttaaggataagaacaaaaacgacggtctgaaaccaaagcaggccgattcggtggaacaggcagtgtactactgcaagaaatgtacctatcgcgatcctctttacgagatcgtgcgcaaacacatttaccgggagcatttccaacacgtggcagcaccatacattgcaaaagcaggcgaaaagagcctgaacggggcagtgcctctcggttcgaatgcaagagaagaatcctcgattcactgtaaaaggtgtctcttcatgcctaaatcgtacgaggcacttgtccagcacgtgatcgaagatcacgaaagaattggctaccaggtgactgcaatgatcgggcacactaacgtggtcgtgcccagatcaaagccacttatgctcatcgcccctaagcctcaagacaagaaatcaatgggcctgcctccccgaatcggaagcctcgcatccggaaacgttagatcactgccttcgcagcagatggtgaatcgcctgagcattccaaaacctaatctgaacagcactggtgtgaacatgatgtcgtccgtgcacctccaacaaaacaactacggagtcaagtccgtgggacagggatactcagtgggacagtcaatgagacttggactcggcggaaacgcccccgtgtcgatacctcagcaatcccagtcagtgaagcaactgcttccgtctgggaatggtcgctcgtacggactgggttcggaacaacgctcgcaagcacctgcaagatactctctccaatccgcgaacgcgtcctctctgtccagcggccaactgaaatcgcctagcctgagccagtcccaagcatctcgtgtgctgggacaaagttcgtccaagccagcagcagctgcgactggtccaccacctgggaacacctcctccactcaaaagtggaagatttgcaccatctgtaacgaattgtttccggagaacgtgtattccgtgcatttcgagaaagaacataaagcagaaaaagtacctgccgtggcaaactacatcatgaagattcataactttacttcgaaatgcctctactgcaaccggtaccttccaaccgacaccttgcttaaccacatgctgatacacggtttgagctgtccatactgtagatcgacctttaatgacgtggagaagatggccgctcacatgcggatggtgcacatcgatgaggaaatgggaccaaagaccgattccaccctctcgtttgacctgaccctccaacagggttcccatacgaacattcatcttctggtcaccacttacaacctgcgggatgcgccagctgagagcgtggcgtaccatgcccaaaacaatccgcctgtgccgcccaagccgcagcctaaggtgcaagaaaaggcggatatccccgtgaaatcatcaccgcaggcagcggtgccatacaagaaggacgtcggcaagactctgtgtcctctctgtttttcaattctgaagggacctatatccgacgccctggcgcatcatctgcgagaacggcatcaggtcatacagactgttcatcccgtggagaagaagttgacctacaagtgtatccactgtctgggagtgtacacctcgaatatgactgcctccactattaccctccatctggtgcactgcaggggggtgggcaagacgcagaacggacaagataaaaccaacgcaccaagccgcctgaatcagagcccttcgcttgcaccggtgaaacgaacctacgaacaaatggaattcccacttctcaagaagcggaagctcgacgatgattcggactcgccttcatttttcgaggaaaagcccgaggaacctgtggtcctggcgctggaccctaaggggcacgaagatgatagctacgaagctcggaaatcattccttaccaagtactttaacaagcaaccgtacccaactcggcgcgaaattgagaaacttgcagcatcactctggctctggaaatccgacattgcaagccacttttcgaataagcgcaagaaatgtgtgcgagattgcgaaaagtacaaacctggggtgctgctgggattcaatatgaaggagctgaataaggtgaagcatgaaatggactttgatgcagagtggctgttcgaaaaccacgatgaaaaggattctcgcgtgaacgcgagcaagaccgcagataagaagctgaatcttggaaaggaagatgattcctcatccgattcgtttgagaacctcgaagaagaatcgaatgaatcgggttcacctttcgacccagtgtttgaagtggagcccaagatatcgaacgataacccagaagaacatgtgcttaaggtcatacccgaggacgcctccgagagcgaggaaaagttggatcaaaaagaggacggatccaagtacgagactatccatctgaccgaagaaccaacgaagttgatgcataacgcttccgattccgaggtggaccaggatgatgtcgtcgaatggaaggacggagcctcgccttccgaatcgggaccaggttcgcaacaggtgtccgatttcgaggataacacttgtgagatgaaacctggaacttggtcggatgaatcgagtcaatcggaggacgcgagatcatccaaacctgccgcaaagaagaaagcaactatgcaaggtgatagggagcaacttaaatggaaaaactcgtcctacggcaaggtcgaaggtttttggtcaaaggatcaatcgcaatggaagaacgcgtcggaaaacgatgaaaggttgagtaatccacaaattgaatggcagaactcgactatcgatagcgaggacggagaacaattcgacaatatgacggatggagtggccgaacccatgcatggatccctcgccggagtgaagctgtcctcccaacaagcc

SEQ ID NO: 321469 - DNA, 3306 bp, Artificial Sequence
  derived and/or modified sequence
atgttccagctgccagttaacaatctcggcagcctgcggaaggccagaaagactgtgaagaagatcctctccgacatcgggctggaatactgcaaggagcacatcgaagatttcaagcaatttgagcctaatgacttctacctgaaaaacaccacttgggaggacgtggggttgtgggatccatcgctgactaagaatcaagactacaggactaaaccgttctgctgcagcgcctgccccttctcgtccaagtttttctccgcctacaagtcccatttccggaacgtgcatagtgaagatttcgagaaccggatcctgctgaattgcccttactgtactttcaacgccgacaagaaaaccctcgaaacccatatcaagatcttccatgctcctaacgcatcagccccaagctcctcgctgtccaccttcaaagacaagaacaagaacgacggactgaagcccaagcaggcagacagcgtggaacaggctgtgtactactgcaagaagtgcacttacagggacccactttacgagatcgtccggaagcacatttaccgggaacatttccaacacgtagcggccccatacatcgcgaaagccggcgaaaaatcgctgaacggagccgtgccgttgggcagcaatgcgcgcgaggaaagctccatccactgcaaaagatgtctcttcatgccgaagtcctacgaggcattggtgcagcacgtgattgaagatcacgagcgaataggataccaagtgactgccatgatcggacacacgaatgtggtggtcccacgctccaagcctttgatgctgatcgccccgaagccgcaagacaaaaagtccatgggactgccaccgagaattggcagcctggcctcaggtaacgtgagatccctcccaagccagcagatggtgaaccgactttcgatcccgaaacctaatctgaacagcaccggagttaacatgatgtcctcggtgcatctgcaacaaaacaattacggagtgaagtctgtggggcaaggttactcagtcggtcaatcgatgcgcctgggacttggtgggaacgcgccagtgtccatcccacagcaaagccaatctgtcaagcagttgcttccgagcgggaacggacggtcgtacggactcggatcggagcaaagatcgcaggcacccgctcgctattcattgcagtcggccaatgcgagctcgctgtcctcgggccagctgaagtccccttcactctcccagtcgcaggcgtcccgcgtgctgggacaatcatcatcgaagccggcagcggctgctaccggacctccgcccggcaatacttcctccactcagaagtggaagatctgtactatctgcaacgaattgttccctgagaacgtctactcagtgcacttcgagaaagagcacaaggcggaaaaggttccggctgtggccaactacatcatgaagatccataacttcacttcaaagtgtttgtactgcaacagatacctcccgaccgatacgctgcttaatcacatgctcatccatggactgtcatgcccttattgtaggtctaccttcaacgacgtggaaaagatggctgcgcacatgcggatggtgcatatcgacgaagaaatggggccaaagactgactcgacccttagcttcgacctgaccctgcaacaaggatcccacaccaacatccacttgctggtgaccacttacaacttgcgggacgcgcccgccgagtctgtcgcataccacgcacaaaacaatccacctgttccgcccaagccgcagccgaaggttcaggagaaggcggacatcccggtcaagtcctccccacaagccgccgtcccttacaaaaaggatgtgggaaagaccctgtgccccctgtgtttctccatcctcaagggaccgatttcggacgcccttgcacaccacctccgggaacggcaccaggtgatccagaccgtgcatcccgtggaaaagaagttgacttacaagtgcatccattgcctgggagtgtacacttccaacatgactgcctccaccatcaccctgcacctcgtgcattgccggggtgtcggcaaaacccagaacggacaggacaagacgaacgcacctagccgccttaaccagagcccgagcctggcaccggttaagaggacctacgagcagatggagttcccgctgctcaagaaacgcaagttggacgatgatagcgatagcccatcgtttttcgaggagaagccggaagaaccggtggtgctggccttggacccgaagggacacgaggatgactcttacgaggcgaggaagtccttccttactaaatacttcaataaacagccgtatccgacgaggcgcgaaattgagaagctggcggcttcactgtggctgtggaaatcagacatcgccagccatttttcgaacaaacggaagaagtgcgtccgcgattgcgagaaatacaaacctggagtgctgctggggtttaacatgaaagaattgaacaaagttaagcatgagatggacttcgatgccgaatggctgttcgaaaaccatgatgaaaaggatagcagagtgaacgcatcaaaaaccgctgacaaaaaacttaatctcggaaaagaggacgactcttcctcggactcattcgagaatctggaagaggaaagcaatgaaagcggttcaccattcgatccagtgttcgaagtggagccgaagattagcaacgataatccagaggagcatgtgctgaaagtgatcccggaggacgcatcggaaagcgaagagaagctggaccagaaggaggacggaagcaagtacgaaactatccatctgactgaagagcccactaaacttatgcataacgcctcagattcggaggtggaccaggacgatgtcgtggaatggaaggacggagcctccccgtctgagtccggaccaggatcccaacaagtctccgatttcgaagataacacttgcgaaatgaaaccgggcacctggtcggacgagtcaagccaatccgaggacgcacgctccagcaagccggcggccaagaagaaggctactatgcagggagacagggaacagttgaagtggaaaaactcctcctacgggaaggtggaaggtttctggtccaaagatcaatcccagtggaaaaatgcttccgagaacgatgagcgcctctccaacccacagatcgagtggcaaaattcgaccatcgactcggaggacggtgagcaattcgacaacatgaccgacggagtggcagagccgatgcacggatccctcgcaggcgtcaaactgtcctcccaacaggcc

SEQ ID NO: 321470 - DNA, 3306 bp, Artificial Sequence
  derived and/or modified sequence
atgttccagttaccagttaacaatctgggcagtctccgcaaagcacggaagacagtgaaaaaaatactaagcgatatcgggcttgagtactgtaaggaacacattgaagatttcaaacaatttgagcctaacgatttctacctgaaaaataccacatgggaagacgttgggctgtgggacccttccctcactaaaaatcaagactacaggacaaaaccattttgctgcagtgcgtgtcccttttcttcaaagttcttctccgcatataaatcccacttcagaaatgtccactctgaggacttcgaaaacaggatcttacttaactgcccatactgcaccttcaatgctgataaaaagacccttgaaacccacattaagatctttcacgctcctaacgcttccgcgccctcctctagcttaagcacttttaaagataagaataagaatgacggcctgaaaccaaaacaggctgattccgtggaacaggctgtgtactattgtaagaagtgcacctatagagacccgctgtatgagattgtgcgtaaacacatctatagggaacattttcagcatgtggcagccccatacattgccaaggctggagagaaatcacttaacggagccgtaccactgggaagcaatgcgagagaagaaagcagcatccattgcaaacgctgcttgtttatgcctaagagctacgaagctctggtgcaacatgtgatcgaggaccatgaacgaataggataccaggtgacagcaatgatcggtcacaccaacgtggtggtcccccgtagcaagcccttaatgcttatcgcaccaaaaccacaagataaaaagtccatgggcttaccaccaagaatcgggtcactggccagcggaaatgtcaggtcactgcctagccagcagatggtcaatcgcctttctataccgaagcccaacctgaacagcaccggcgtcaacatgatgtcctctgtccatcttcagcagaataactacggggtgaaaagcgttggacaggggtacagtgtaggccagtccatgcggctgggattgggcggcaacgcgcccgtatccatcccacaacaatctcaaagtgtcaaacagctgctgccctccggaaacgggaggagctacggcctgggcagtgagcaacgtagtcaggctccagcaaggtattctctgcagagtgccaacgctagtagcttgagtagtggacagttgaaaagtccatctctctctcagtcgcaggcttctcgcgtgctaggacaaagctcttcaaaacccgccgctgctgctactggaccccctcctggcaacaccagttctacacagaaatggaaaatctgtactatttgtaacgagcttttccccgaaaacgtgtacagtgttcactttgagaaggagcacaaagcagagaaagttcctgcagtagcaaactacataatgaaaatccacaacttcacctcaaagtgtctatactgcaatagatacctgcccacggataccctgcttaaccatatgctcatccacggcctgagttgcccttattgcagatcaacattcaatgacgtggaaaaaatggccgctcatatgaggatggttcatattgacgaggagatgggaccaaaaaccgatagtacactgagctttgacctgacccttcagcaaggttcccatacaaacatccatcttttagtgaccacctataacttgcgggacgcccccgcagagtcagtggcttaccacgctcagaacaatccccctgtacccccaaaacctcagcccaaggttcaagaaaaggcggacatcccagttaagagcagccctcaggcagctgtaccttacaagaaagacgtcggcaaaaccctgtgtcccctgtgcttcagcatcctcaaaggccccatctccgacgcactggcccatcatcttagggaaaggcatcaagtgatacagaccgtccaccccgtcgagaagaaactgacctacaaatgcatacactgtctgggagtgtatacctctaacatgaccgctagcacaatcaccctgcacctggtccattgtaggggggttggtaagacccaaaacgggcaggacaagactaacgctccttctaggctgaatcaatctccgtccctggcacccgtcaaacggacatacgaacagatggagtttcccttgctcaaaaaacggaagctggacgatgacagcgatagcccctcattcttcgaagaaaagccggaggagcctgtcgtcctcgctcttgatccaaagggacacgaggatgatagctacgaagccaggaagagcttcctcactaagtattttaacaaacaaccataccctaccaggagagaaatcgagaagctggcagcgtctctttggctttggaagtccgatatcgcctcccatttcagcaacaaaagaaaaaagtgcgttcgcgactgcgagaagtacaagccgggtgttctgttgggatttaacatgaaggagctcaacaaagtcaaacacgaaatggattttgatgctgagtggctgttcgagaaccacgatgagaaagatagtagggtgaacgcaagcaaaacagccgacaagaagctcaacctgggcaaggaagatgactccagtagcgactcatttgaaaatctggaagaagaaagcaatgaatccgggtcaccgtttgatcctgtgtttgaagtggaacctaaaattagtaatgataaccccgaagaacacgtgcttaaggtgattccggaggacgcctctgagtcagaggagaagctcgatcagaaagaagacggctcaaaatacgagaccattcacctcactgaagaacccacgaagctcatgcacaatgcttctgacagcgaggttgatcaagatgacgttgtggagtggaaagatggcgctagtccttcggaatctggccctggaagccaacaggtgagtgatttcgaggataacacctgcgagatgaaacccgggacttggtctgatgagtccagtcagtctgaagacgctagaagttccaagccagccgccaaaaagaaagctactatgcagggcgatagggagcagctcaagtggaaaaatagctcatacggaaaggtggaaggattttggtccaaagatcagagccagtggaaaaacgcaagcgagaacgatgagaggttgtctaacccacaaatagagtggcaaaacagtaccatcgatagtgaggacggcgagcaattcgacaatatgacagatggcgttgccgagccgatgcacggtagcttagctggcgttaagctcagttcccagcaggcc

SEQ ID NO: 321471 - DNA, 3306 bp, Artificial Sequence
  derived and/or modified sequence
atgtttcaactgccagtgaacaaccttggatctctccgcaaggcgagaaaaactgtgaagaagattctttccgatatcgggcttgaatactgcaaggaacatattgaggatttcaaacagttcgaacccaatgacttttaccttaagaacaccacttgggaagatgtgggtctgtgggacccatcgctgactaagaaccaagactatcgcactaagcctttctgttgttccgcatgtccctttagcagcaagttcttctcagcatacaagagccatttccgtaacgtccattcggaagattttgaaaataggattctcttgaattgtccatactgcactttcaacgcagataagaaaacgctggaaactcatatcaagatttttcacgcgccaaatgcaagcgccccttcctcgtcactttctaccttcaaggataagaacaaaaatgatggcctcaaacccaagcaggctgactcagtggaacaggcagtgtactactgcaaaaagtgcacctacagagatccattgtatgaaatcgttcggaaacacatataccgtgaacacttccagcacgtcgcagcaccgtatattgcgaaagccggagaaaagagccttaacggggcagtgccgctgggatccaacgcgagggaagaatccagcattcactgtaaaaggtgtttgtttatgcccaagagctatgaggcactcgtgcaacatgtcatcgaagatcatgaacggataggttaccaagtgaccgctatgattggccacaccaatgtggtggtcccccggtctaagccacttatgctgatagccccgaaaccccaagataagaagagcatgggccttcccccacgaattgggtccctcgcaagcgggaacgtgcgcagcctgccttcccaacagatggtcaacagattgtccattcccaaaccaaacctgaactccactggggtgaatatgatgagctcggtgcacttgcagcaaaacaactacggagtgaaatccgtcggacaaggttactcggtgggacaaagcatgagacttggacttggaggtaatgcaccagtgtcaatcccacagcaatcccaatccgttaagcagcttcttccatctggaaacggaagatcgtacggcctcggctcggaacaacgatcccaggcgcctgcacggtactcccttcagtcagccaacgcttcgtctcttagcagcggccagctcaaatcaccttcgctttcccaaagccaagctagccgggtgctgggtcaatcctcgtccaagcctgcagcggccgcaaccgggcctcctcctggcaacacctccagcacccagaaatggaagatatgtaccatttgtaacgagctttttccggagaatgtgtactcggtgcatttcgagaaggaacacaaggcagagaaggtgccagcagtggccaactacattatgaaaatacataactttacttcaaagtgtttgtactgtaaccgatacctgccaactgatacccttcttaaccatatgctcatccacggactttcctgtccctactgccgctcaacgtttaatgacgtggagaagatggccgcacatatgagaatggtgcacatagacgaggaaatgggaccaaaaactgattccacccttagctttgacctgactctccaacagggttcacacactaatatccatctgctggtcaccacctacaatctccgggatgcgccggcagaatccgtggcataccatgcacaaaacaaccctcctgtgccacctaagccgcaaccaaaggttcaggaaaaggcagatataccagtgaagtcatcaccacaagcagccgtgccttacaagaaggatgtgggcaagaccctgtgcccactctgtttttcgattctgaagggtccaatcagcgatgcgctggcccatcatctgcgcgagagacatcaagtgattcaaaccgtgcaccctgtcgaaaagaagctcacctacaagtgcatccattgtcttggagtctacacttcgaacatgaccgcctcaactataactctccacctggtccattgtagaggggtgggcaagacgcagaacggacaggacaaaactaacgccccgtccaggcttaatcagtccccaagcctcgcacccgtcaaacgaacctacgagcaaatggaatttcccctgctgaagaagagaaaactcgacgatgactccgactcgccttcctttttcgaagaaaagcccgaagagccggtggtgctggctcttgatcccaagggacacgaagatgattcttacgaagcgcggaagtcgtttcttaccaagtactttaacaagcaaccctacccgactcggcgagagatcgagaaactggcggcatctctgtggctgtggaagtccgatattgcatctcatttttccaataagcggaaaaagtgcgttcgggattgtgaaaagtacaagccaggtgtgctccttgggttcaatatgaaagaactgaataaggtgaagcacgagatggactttgatgccgaatggctgtttgaaaaccacgacgagaaggatagccgggtgaatgcaagcaagactgcagacaagaagctgaaccttggaaaggaagatgattcatcgagcgattcgtttgaaaatcttgaggaggaatccaacgaaagcggatcaccttttgacccagtctttgaagtcgagcccaagatttccaatgacaaccccgaggagcatgttctgaaggtgattcccgaagatgcatcagagtcggaggagaaactcgaccagaaggaagatggttctaagtacgaaaccatccatcttacggaagaacctaccaagttgatgcataacgcatccgacagcgaggtcgatcaggatgacgtggtggaatggaaagatggagcatccccgtcggaatcggggcccggttctcaacaagtctcggactttgaggataatacttgcgagatgaaacctgggacctggtccgacgaatcgtcgcaaagcgaggatgccagaagctcaaaacctgcggccaagaagaaagcaactatgcaaggagacagagagcaactgaagtggaaaaactcgtcttacggaaaagtcgaggggttctggtcgaaggatcaatcgcagtggaaaaacgcatcggaaaacgacgaacgcctttcgaatccacaaatcgaatggcagaattccaccattgactcggaagatggtgaacagtttgataacatgacggatggtgtggccgagcctatgcatggttccttggcaggggtgaagctgtcgtcacagcaagca

SEQ ID NO: 321472 - DNA, 3306 bp, Artificial Sequence
  derived and/or modified sequence
atgtttcagctacccgtcaacaatctgggatccctccgcaaggcccgcaagactgtgaaaaaaattctgagcgatatcggcctggagtattgtaaagagcatatcgaggacttcaaacaattcgagcctaacgacttttatctgaaaaacactacatgggaggacgttggtctctgggacccgtccttaactaaaaatcaggattatcgcactaagcccttttgctgctcagcatgtcccttttcaagtaagtttttctctgcatacaaaagccacttcagaaacgtgcactcggaagatttcgagaatcggattcttctgaattgtccttattgcaccttcaatgctgataagaagaccctggaaacacatatcaagatctttcacgcccccaacgcctccgctccctccagtagcctgagtacattcaaggataaaaataagaacgatggtcttaagcccaaacaggcggattccgtagagcaggccgtgtactactgtaagaagtgtacttaccgggatcccttatacgaaatcgtacggaagcatatttatagagagcactttcagcatgtggccgcaccttatattgctaaagctggcgaaaaatctctcaacggagccgttccgctgggcagcaacgctcgcgaagaatccagcattcattgtaagcgatgcctgttcatgcctaagagttatgaagctctagttcaacatgtgattgaggatcatgagaggattgggtatcaagtgacagccatgatcggccataccaacgtcgttgtgccaaggtccaagcccctgatgctgatcgcccccaaacctcaggataaaaagtctatggggctgcccccacgaatcggcagtctggcctctggtaacgttagatcactgccctcccagcagatggtgaatcgcttgtctatccccaagccaaatctgaactccacaggagtgaacatgatgtcgtctgttcacttacagcagaacaactatggggttaagagcgtgggacaaggctacagcgtgggccagtccatgagactggggctaggtggcaatgccccggtgagcatcccccagcaaagtcagtcagtcaagcagttactcccatccggcaacggtcgttcgtacggcctaggcagcgagcagcgaagccaggcccctgcgcgatacagtttacagtcagcaaatgcgtcatcgctctcttccggacagttgaagagcccctctctctcgcagtcccaggcatcacgcgtgctgggacaatcgtcctccaaacccgctgccgccgcaacggggcccccccctggcaatacgtcatctactcagaaatggaaaatctgcacaatttgcaacgaactgttccctgagaatgtctacagtgttcatttcgaaaaagaacataaggctgaaaaggtccctgccgtggccaactatataatgaagatccacaactttacatctaagtgtctgtattgtaatcgttatctgcctaccgataccctgctcaaccacatgctgattcacggcctcagttgcccttattgtcgttcgacattcaacgatgtggagaaaatggcggcacacatgcggatggtgcatattgacgaagaaatggggcctaagacagattcaacactcagctttgaccttacccttcagcagggatcccacacaaacatacatctcttggtgacgacttacaacctgcgggacgcccctgccgagagcgtggcatatcacgcacagaataacccccccgtcccccccaaacctcagcccaaggttcaggagaaagccgacatccccgtaaaaagcagtcctcaggcagcggttccttacaaaaaggatgtaggtaaaacactgtgccctctgtgcttctccattctcaaagggcctatttctgacgctctcgctcaccacttgcgtgagaggcaccaggtgattcagacagtccatcctgtcgaaaagaagctcacgtataagtgcatacactgtctcggggtgtacacctcaaacatgacagctagtacgatcaccttgcatttagtacactgccgcggtgtcgggaagacccagaatgggcaagacaaaacaaatgccccttctcgtctgaaccagagcccttccctcgccccagtcaaacgcacctatgagcagatggaattccccctgctcaagaagaggaagctggacgacgactccgacagcccatcattctttgaggaaaagccagaggagccagtcgtgctggcactcgacccaaaaggacatgaagatgatagttacgaggctcggaaaagttttttaacaaagtacttcaacaagcaaccctacccgacccgccgtgagatcgaaaagctcgccgcttctctgtggctgtggaaatcagatatcgcaagccatttctcaaacaagcgcaaaaagtgcgtgagggactgtgagaagtacaaacctggggtgctgttgggcttcaacatgaaggaactaaacaaagtgaagcacgaaatggattttgacgccgagtggctttttgaaaatcacgacgagaaggattctcgcgtgaacgcttctaaaacagccgataaaaagctgaacctcgggaaggaagatgattctagctcagacagcttcgaaaacttagaggaagaatccaacgaaagcggcagtccttttgacccggtgttcgaagtagaacccaaaattagtaacgacaaccccgaggagcacgttctgaaagtgataccggaggacgcatcagagagcgaggagaaacttgaccagaaagaggacggatctaagtacgagaccatccatctgacggaagagccaactaaactcatgcacaatgcatctgattcagaggttgatcaagatgacgtcgtggaatggaaggacggggcaagccccagtgaatcgggcccaggaagccagcaggtcagcgactttgaggataacacatgtgagatgaagcccgggacctggtcggatgaatcaagccagtcggaagatgccaggtcctccaagcctgctgccaagaaaaaggcaaccatgcagggtgatagggagcaactgaaatggaagaactcttcctatggtaaggtcgagggcttctggagcaaagaccagagccagtggaagaacgcctcggagaacgacgaacgcttatcaaacccacagattgaatggcagaactcaaccatcgattcagaggatggagaacagttcgataacatgactgatggcgtcgctgagcccatgcatggatccctggcgggagtcaagctgtcctcacagcaagct

SEQ ID NO: 321473 - DNA, 3306 bp, Artificial Sequence
  derived and/or modified sequence
atgtttcaattgcccgtgaataacctggggtctctccgcaaagcgaggaagaccgttaagaagattttatcggacattggtctggaatattgcaaggagcacatcgaggacttcaaacagtttgagcccaacgacttttacctgaagaacaccacctgggaggacgtgggcctctgggatccctcgctcactaaaaaccaggactacaggactaagccattctgctgttcagcttgtccatttagttcaaagtttttttcagcctacaagtctcacttcagaaatgtgcatagtgaggactttgaaaataggattctgctcaactgcccttattgcactttcaatgctgataagaagacgcttgaaactcatatcaagatctttcacgcacccaacgcaagcgccccaagttccagtttgagcacttttaaagacaagaacaagaatgacggtttgaagcccaagcaagctgattctgtggaacaggctgtctactactgcaagaaatgcacttaccgggacccgttgtatgaaatagtgcgtaaacacatttatcgagagcacttccaacacgtcgctgcgccgtatattgcaaaagcgggagaaaaatctctaaatggtgcagtcccgctgggctcaaacgcgcgggaagaatcttctatccactgtaagcggtgcttattcatgccaaagagttatgaggcgctggtgcagcacgtgatcgaggatcacgagcgaatcgggtaccaggtgaccgccatgatcggacatacaaacgtggtggtgccacgatccaagcccctgatgctgattgccccgaagccacaggacaagaagtcgatgggtctgccacctcgtattggatcactcgcttctggtaatgtccgaagcctgcctagccagcagatggtgaacaggctgtcgattcctaaacctaacttgaatagtacaggagtgaacatgatgagtagcgtgcatctgcaacagaacaactatggcgtaaagagtgtcggacagggatattccgtcggacagagcatgaggctaggactagggggaaatgctcctgtctccattccacagcagtcccagtcagttaaacagctgctgccctcagggaatggcagaagttatggccttggctcagaacagcgatcccaagcgcccgcacggtactccctgcagagtgccaatgcttcctcattgtcatcaggacagcttaagagcccttctctgtcccaaagccaggccagcagagttctgggccagtcctcgtctaagccagcagccgccgcaacaggtccgcccccggggaacacgagctcgacccagaagtggaagatctgtacaatctgcaacgaactgttccccgaaaatgtttatagcgtgcacttcgaaaaagagcacaaggctgagaaagtgcctgccgtcgccaactatataatgaaaatacacaacttcacgtctaagtgcctctactgtaatcggtacttgcccacagacactctgctcaatcacatgctgatccatggtctaagctgcccgtactgccggagcacattcaacgacgtggagaaaatggccgcacatatgcgcatggtgcacatcgacgaggagatgggacccaaaaccgattccaccctgtcatttgacctgactctgcagcaaggatcacacaccaatatacatttactggtaaccacgtacaatttgcgtgatgcacccgcagaatccgtggcataccacgcacagaataatcctcccgtaccgcccaaacctcaaccaaaggtacaggaaaaagctgatattcctgtcaagtcctccccacaggcggctgtgccatacaaaaaggatgtcggaaaaaccctctgtccactgtgcttctctatcctcaagggcccaatctccgatgcactcgctcaccaccttagagagcggcaccaggtaatccagactgtgcacccagtagaaaaaaagctgacctacaagtgtatccactgcctgggggtctacaccagcaacatgacagcttctaccattacgttacacctggtacactgccgaggtgtaggcaagacccagaacgggcaggataagaccaacgctccttccagactgaaccagtccccttctttagcccccgtgaagcgtacctacgaacagatggagtttccgctactaaagaaaaggaagttggacgacgactctgactccccatcgttcttcgaggaaaagccagaggaacccgtggtgctggccctagaccccaaaggccatgaggatgatagctacgaggcgcgaaaaagcttcctgactaagtactttaataaacaaccctatccgactagacgggagattgaaaagctggcggctagcctgtggctgtggaaaagtgatattgcatcccattttagtaacaaaaggaaaaagtgtgttcgagactgcgaaaagtataagcccggggtgttattggggttcaatatgaaggagctgaacaaggtcaagcacgaaatggattttgatgctgaatggttgttcgagaaccacgacgaaaaagattcccgggtcaacgcctcgaaaacggccgacaagaagctaaatctggggaaggaggacgatagttcatccgattcctttgagaatctggaagaggagagtaatgagtcaggaagcccttttgacccagtctttgaggtggaacccaaaatctccaatgataaccccgaagagcacgtccttaaggtcatccccgaggacgcctccgaatcggaagaaaaacttgaccagaaggaggacggctctaagtatgagactattcacctgacggaggagcccacaaagttaatgcataacgcaagcgattcggaggtggaccaggacgatgtggtggaatggaaggatggagcatctcccagtgagtcgggacccggaagtcagcaagttagcgattttgaagacaacacctgtgagatgaagcctggtacatggagcgacgaaagttctcagagtgaggatgcaaggtctagtaaacctgcggcaaaaaaaaaagctacaatgcagggcgaccgggaacagctgaaatggaagaacagctcctacggcaaagtcgaggggttctggagcaaagatcaatcacaatggaagaacgcgagcgaaaatgatgagcgcctgagcaacccacaaatcgagtggcagaacagcaccattgactctgaggacggtgaacaatttgataacatgacagatggggtggccgaaccgatgcacggaagcctcgcgggcgtcaagctgtcttcgcagcaggct

SEQ ID NO: 321474 - DNA, 3306 bp, Artificial Sequence
  derived and/or modified sequence
atgttccagctacccgtcaacaatctgggctccctgcggaaggcaagaaagacagtcaaaaaaatcctgagcgacatcggactggagtattgtaaggagcacatcgaggatttcaagcaattcgagcccaacgacttttacctgaaaaatacgacttgggaggacgttggtctgtgggacccatctctaacgaaaaatcaggactaccgtacaaaaccattttgttgctccgcttgcccctttagctcaaagttcttttctgcttacaagtcccactttagaaatgtgcacagcgaagatttcgagaataggatcctgctcaattgtccatactgtactttcaacgcagacaaaaaaaccctggaaacgcatattaagatattccatgcacccaacgcgagcgccccatccagctcactgagtacttttaaagataagaacaaaaacgatggactgaaacctaaacaggcggactccgttgagcaggcagtgtactactgtaagaagtgcacttaccgcgatccactgtatgagatagtccgcaaacacatctatcgcgaacatttccagcatgtggctgcgccatatatcgcaaaagcaggagagaagagcctgaatggtgctgtgccactggggtccaacgccagagaggagagttctattcactgcaaacggtgtctctttatgcccaagagctacgaggccctcgttcaacacgttatcgaggatcatgaaagaatcggctaccaggtgaccgctatgatcgggcacaccaatgtagtagtgcctagaagcaagccactgatgttgatcgctcctaagccacaggacaagaaaagcatgggcctacccccccgcatcggtagcttagccagcgggaacgtgagaagcctgccctcccagcagatggtcaacaggctctcaattcccaaacctaaccttaacagtacgggggtaaatatgatgagctccgtccatctacagcagaacaattacggcgtgaaatcagtgggccagggctactcggtgggccagagcatgagactcggcttaggggggaatgctccagtctcaataccacagcagtcccagtccgtcaagcagctgctgccctccgggaatggacggagttacggcctcggatccgagcaacggtcacaagccccggctcgatacagcctgcaatctgcaaacgccagcagtctaagcagcgggcagctgaagtctccatctttgtcgcaatcacaggcatcaagagtgctgggccagagcagctctaagcccgccgcagccgcgacagggcctcctccaggaaacacctcttccacacagaaatggaagatttgtacaatctgtaacgagctgtttcccgaaaatgtatactctgtccacttcgagaaggagcacaaggcagaaaaggttccggctgtcgctaactacattatgaagattcacaacttcacttccaagtgtctctactgtaacaggtaccttcccacagacactctgcttaaccacatgctcattcacggactgtcctgcccttattgtaggagtacattcaatgatgttgagaaaatggcagctcacatgcggatggttcatatcgacgaggaaatgggaccgaaaacggattcaacgctctccttcgacctgacactccaacaaggtagtcacacgaatattcatctcctcgtgaccacgtataatctccgcgacgctccagccgaaagcgtggcctaccatgcccagaacaatcccccagtgccaccaaaacctcagccaaaggtccaggagaaagcggatattcccgtgaagtccagcccacaggccgctgtgccctacaagaaagatgttgggaagaccttatgtcctctttgtttcagtatattaaagggacctatttcagacgctctagcccaccacctgagagagcggcaccaagttatccagactgttcatcccgtggaaaaaaaactgacctacaaatgcatccattgtctgggcgtctatacctccaatatgacggcgtcaacgataacactgcatctggtccactgccgaggagtagggaaaacccagaatggacaggataagactaacgctccctcacgcctcaaccagtccccgtcgctggccccggtgaagcgaacctatgagcaaatggaatttccactcctaaagaagcggaagctcgacgatgactcagatagcccctccttcttcgaggagaaacctgaagaacccgtggtactcgctctggacccaaaaggccatgaagacgactcttacgaggccaggaagtccttccttaccaaatacttcaataagcaaccatacccgacccggcgggagatcgaaaaactggcagcatcactgtggctctggaaaagcgacattgcctcccacttcagcaacaagagaaaaaagtgcgtgcgtgactgcgagaagtacaagcctggtgtcttgctgggattcaacatgaaggaactgaataaagtcaagcacgagatggactttgacgcagagtggctgttcgaaaaccacgacgagaaggacagtagggtcaatgcgagcaagaccgccgacaagaagctgaatttgggaaaggaagatgattcctcgtccgactcttttgaaaacctggaagaagaaagtaatgagtccggctctcctttcgaccccgtgtttgaggtcgagcccaagatatccaacgacaaccccgaagagcatgtgctcaaggttatacccgaggacgcctctgagtccgaagaaaagttagaccaaaaggaggatggatctaaatatgaaactatccatctcacagaagaaccaacaaagttgatgcacaatgcctcagactccgaggtggaccaggacgacgtcgttgagtggaaggacggagctagtccaagcgaaagcgggccagggagccagcaggtatccgatttcgaagacaacacctgcgagatgaaaccgggtacctggagtgacgagagttcgcagtctgaagacgcacgaagttccaagcctgcagcaaaaaagaaggccactatgcagggagaccgcgagcagctgaaatggaagaacagtagttatggtaaagtggaaggtttttggtccaaagaccagtctcagtggaagaatgcctccgaaaatgacgaacggctgtccaatccgcagatcgagtggcagaattctactattgatagtgaagatggggaacagttcgataatatgaccgatggcgttgctgaacctatgcacggcagcttggctggcgtgaagctgagttctcagcaggca

SEQ ID NO: 321475 - DNA, 3306 bp, Artificial Sequence
  derived and/or modified sequence
atgttccaactcccagtgaacaatctgggatcactgagaaaggcacgtaagactgtgaagaagatcctgagcgatatcggacttgagtactgcaaggaacatattgaagatttcaaacaatttgagcctaacgacttttacctgaagaacactacgtgggaggacgtgggcctgtgggacccttcactgaccaagaaccaggattaccggaccaagcctttctgctgctcggcttgtccattctcctcgaagttcttctcggcttacaagtcccacttccggaatgtgcattccgaagatttcgaaaaccgcatcctcctgaactgcccgtactgcactttcaacgcggacaagaaaacgcttgaaacccatatcaagatcttccacgcgccgaacgcatcggcgccgtcgtcgtctctgtcaaccttcaaggataagaataagaacgatggcctcaagccaaagcaggcggattccgtcgagcaggccgtctactactgcaagaagtgtacttacagggacccgctctacgagattgttcggaaacacatctacagagagcactttcagcacgtggccgctccatacattgcgaaagccggagagaagtccctgaatggagccgttcccctggggtcaaacgccagggaagaatcgtccatacattgtaagaggtgcctgtttatgcccaaaagctacgaggccctggtgcagcacgtaattgaggaccatgaacggatcggataccaagtgactgctatgatcggacacacgaatgtggtggtgccgcgctccaaacctttgatgcttatcgctcctaagccgcaagacaagaaatcaatgggcttgccaccgcgtatcgggagcctcgcctccggcaacgtccgctcgctcccatcgcagcaaatggtgaaccgcctgtccattccaaagcctaaccttaacagcactggggtgaatatgatgagctcggtccacctccagcagaacaattacggagtgaagagcgtcggacaaggatactcagtaggacagtcgatgcggctgggactcggaggaaatgcaccggtatctatcccgcaacagtcccagtctgtcaagcaacttctcccgagcggcaatggtcgcagctatggactcggttccgagcagcgatcacaagccccggcccggtactcacttcagtccgccaatgcgtcgtcgctgtcgtccggccagctgaaaagcccatcgctgtcccagagccaggcgtcgcgagtcctgggccagtcctcttcgaagcctgcggcggccgcaacgggtccaccaccagggaacacttccagcacgcaaaagtggaagatctgcaccatttgtaatgaactcttcccggaaaatgtgtatagcgtccacttcgaaaaagaacataaagcagaaaaggtgccggcggtggctaactacatcatgaagatccacaacttcacctccaagtgtctgtactgcaaccgctacctgccgaccgataccctgctcaaccatatgctcatccacgggctttcctgcccctactgcagatccacttttaacgacgtggagaagatggcggctcatatgagaatggtccacatcgacgaggagatgggtccaaagaccgattctaccctgtccttcgatcttaccttgcaacaaggatcacacactaatatccacttgctggtgaccacctacaacctccgcgatgcaccggcagaatcggtggcgtaccacgcccagaataacccgcctgtccctccgaagcctcagcctaaggtgcaggaaaaggcggacatcccggtaaagagctcgcctcaggcagcagttccgtataagaaggatgtgggcaagaccctgtgcccactgtgcttctccattctcaaaggaccaatctctgatgccctcgcacaccatcttagagagagacatcaggtgatccagaccgtgcaccccgtggagaaaaagctcacctacaagtgtatccattgccttggtgtgtacacctcaaacatgacggcttccactatcaccctccatttggtgcactgtcggggcgtcggtaagacccagaacggccaagacaaaactaacgcaccatccagactgaatcaaagcccgtccctggcgccggtcaaaaggacctacgaacagatggaatttccgctgctgaagaagcgcaagctggacgatgattcggatagccccagcttctttgaggaaaagccggaggaaccagtcgttctggccttggacccgaagggtcacgaagatgactcctacgaggcccggaaatcattcctcacgaaatacttcaataagcagccgtatccgactcgccgtgaaatcgaaaaactcgctgcaagcctgtggctgtggaagagcgatatcgccagccatttttcaaacaaacgcaaaaagtgcgtgcgcgactgcgagaaatacaagccaggagtgctcctgggttttaacatgaaagaattgaacaaagtcaagcacgagatggatttcgatgccgaatggctgttcgagaaccacgacgagaaagactcccgagtgaatgcttccaagaccgccgacaagaaactcaatcttggaaaagaagatgactcatcaagcgattcgttcgaaaaccttgaagaagaaagcaacgaaagcgggtccccctttgacccggtctttgaggttgaaccgaagatcagcaatgacaacccagaagagcatgtgctgaaggtgatcccggaggacgcgtcggagtcagaggaaaagctcgatcaaaaagaggacggatcgaagtacgaaactatccatcttaccgaggagccgactaaactgatgcataacgcgtccgactcggaggtggatcaggacgatgtggtagagtggaaggacggagccagcccttccgaaagtgggccagggtcgcagcaggtgtcggactttgaagataatacttgcgagatgaagccgggaacctggtcggacgaatcgtcccagtccgaggacgcccgcagctcaaaaccggctgccaagaaaaaagcaactatgcaaggagatagggaacagctgaaatggaagaactcgtcatacggaaaggtcgaaggcttctggtctaaggaccaatcacaatggaagaacgccagcgagaatgacgaacggctgagcaatccgcagatcgagtggcagaattcgactatcgactcggaggacggggaacaattcgacaacatgactgacggagtcgccgagccgatgcacggttcccttgccggcgtcaaactgtcgtcccagcaggcc

SEQ ID NO: 321476 - DNA, 3306 bp, Artificial Sequence
  derived and/or modified sequence
atgtttcaattgccggtgaacaacttgggttccctcagaaaggcacgaaaaacggtgaagaagatcctctcagacatcggtttggagtactgcaaagaacatatcgaggacttcaagcaattcgaaccaaatgatttctacctcaaaaacacgacttgggaagatgtgggactctgggatccgtcactgacgaaaaaccaggactacagaaccaagccgttttgttgcagcgcgtgtcctttctccagcaagtttttcagcgcatacaagtcccactttcgcaacgtgcattctgaggactttgaaaaccgtattttgctcaactgcccatactgtacttttaacgcggataagaaaacccttgaaactcacataaagattttccacgcacctaatgcaagcgcaccatcatcgagcctcagcacctttaaggataagaacaagaacgatggacttaaaccaaagcaggccgatagcgtcgaacaggccgtctactactgtaaaaagtgtacctaccgagatcctctctacgagattgtgcgcaagcacatttaccgcgagcattttcaacatgtcgcggcaccctacattgcaaaggccggagaaaagtctctgaacggggcagtccctctgggctcgaacgcaagggaagaatcttcgattcactgtaagagatgtctctttatgccgaaatcctacgaagcactggtgcagcatgtgatcgaagatcacgagcggattgggtaccaggtgaccgctatgatcggccatactaatgtggtcgtcccccgcagtaaacctctgatgctgatagccccaaagccgcaagataagaagagcatgggactgcctccaaggattggttcccttgcgagcggaaatgtcagaagcctgccctcccagcaaatggtgaacagattgtccatcccgaaaccaaatctgaacagcactggggtcaacatgatgagctccgtacatcttcagcaaaacaattacggcgtgaagtcagtgggacaaggctactctgtggggcagtccatgcgcctgggacttggcggaaatgcaccggtgagtattcctcaacaatcacaatcggtcaagcagcttctccccagcggaaatggccgttcctacggacttggctcagagcaaagatcacaagcccctgcaagatacagcctgcaatcggctaatgcatcgtctctgtcctcagggcagctgaagagcccttcgctgagccagtcacaagcatcgcgggtgctcggtcagtcatcgagcaagcctgcagctgctgcaactggtcccccacctggcaacacttcctccactcagaaatggaagatttgcaccatctgtaatgaactttttcctgaaaacgtgtactccgttcatttcgaaaaggagcacaaggccgagaaggttcctgcggtcgcaaattacataatgaaaattcacaactttacttcgaaatgcctgtattgtaacaggtacctgccgaccgataccctcctcaaccatatgctcatacatggcctgtcatgtccttattgtaggtcaacctttaacgatgtggaaaagatggcggcacacatgaggatggtgcacatcgatgaagaaatgggacccaagacggactccactctgtcatttgacctcaccctgcaacaaggcagccacactaacattcacctgttggtgaccacttataaccttcgtgacgcacctgccgaatcagtcgcctaccatgcacagaataatccacccgttccacctaagcctcagccaaaagtgcaagagaaggcggatattccggttaagtcgtcccctcaggccgcagtgccatataagaaggacgtgggtaaaaccttgtgcccgctttgcttctcgatcctcaaaggaccaatctcggacgctttggcccatcatttgagagagcgacaccaggtgatacagaccgtacacccagtggaaaagaagctcacctataagtgcatacattgtctgggcgtctacacctccaacatgaccgcttcgaccattactcttcaccttgtccattgccggggagttggaaagactcaaaacggtcaggataagactaatgcccctagcagactgaatcagtccccttccctcgcccctgtgaaacgcacctacgagcagatggagtttcccctgcttaagaaacggaagctggatgacgattccgatagcccgtccttttttgaagaaaagcctgaggaaccagtggtgcttgcacttgatcccaagggacatgaggatgattcttacgaagcgagaaagagcttcctgaccaagtacttcaataagcagccataccctactagacgggaaatagaaaaactcgcagcaagcctctggctgtggaaaagcgatattgcatcgcacttcagcaacaaacgtaagaagtgtgttcgggattgtgagaagtataaaccaggagtcctcttgggctttaacatgaaagagctgaataaggtgaagcatgaaatggactttgacgcagaatggctttttgaaaatcacgatgagaaggactctagggtcaatgcatcgaaaactgcagacaagaagttgaatctcggtaaagaagatgactcgtcgtccgactccttcgaaaacctggaagaggaatccaacgaatcggggagcccctttgacccggtgttcgaagtggaaccgaagatctctaacgataaccctgaagagcatgtgcttaaagtcattccagaggatgcctccgagagcgaggaaaaacttgatcaaaaggaagatggctccaagtacgaaactattcaccttaccgaggaacctacgaagctcatgcataacgcatccgattcagaagttgatcaggatgatgtggtggaatggaaagacggtgcttcaccaagtgaatccgggccaggttcccaacaagtgtccgactttgaggacaacacctgtgagatgaagcctggaacttggtccgacgagtcgtcacagtcggaggatgcaaggtcgtctaagccggccgcaaagaagaaggcaaccatgcagggtgatagagaacaacttaaatggaagaactcaagctacggtaaggtggaagggttctggagcaaggatcaaagccaatggaagaacgcatccgaaaatgatgagagactgtcaaaccctcagattgagtggcaaaactccacgattgactccgaagatggcgagcaatttgataacatgactgatggtgtggccgaacctatgcatggatcattggcaggagtgaaacttagttcacaacaagcg

SEQ ID NO: 321477 - DNA, 3306 bp, Artificial Sequence
  derived and/or modified sequence
atgttccagctgcctgtgaacaacctgggttccctgagaaaggcgagaaaaaccgtgaagaaaatactttcagatattggcctggaatactgtaaggaacacatagaggacttcaagcaatttgagcctaacgacttttacctgaagaatactacctgggaagatgtgggactctgggacccaagcctgaccaagaatcaggattacagaaccaagccattttgttgttcggcatgtcctttctcctccaagtttttcagtgcctacaagagccattttcggaacgtgcactccgaggacttcgaaaatcgaatccttctcaattgtccgtactgcacttttaacgcggacaaaaagacgttggagactcacatcaagatattccatgccccaaacgcatcggccccgtcgtcctccttgtccactttcaaggataagaacaaaaacgacggactgaagcctaagcaggcagactcggtcgaacaggcggtgtactactgtaagaaatgcacttaccgggatcctctgtacgagatcgtgcgcaagcacatttacagagaacatttccaacatgtggcggcaccctacattgcgaaggcaggggaaaagagccttaatggagccgttccgcttggtagcaacgcacgcgaagagtcgtcaattcactgcaaacgctgtctgttcatgcctaaatcatacgaggcactggtgcaacatgtcattgaagatcatgaaagaatcggttaccaagtcaccgcaatgatcggtcatactaacgtggtggtccctcgctcaaaacctctgatgctgatcgcgcctaagccacaagataagaagtcaatgggactgccccctaggattgggagccttgcatccggaaatgtcagatcacttcctagccaacaaatggtgaaccgtctttcaatccctaagccaaaccttaactccactggagtgaacatgatgtcgtccgtccaccttcagcagaataactacggggtcaagagcgtgggtcagggatactccgtgggtcagtccatgcgcctggggctcggaggtaacgctcccgtgagcattcctcaacaatcacaaagtgtcaaacaactgcttccctcaggaaatggaagatcgtacgggcttggtagcgaacaaagatcccaggccccagcgaggtactcccttcagtccgcgaacgcatcctcactgtcgtcggggcaactgaaaagcccttcgctgagccaatcgcaagccagccgggttctgggtcaatcgtcgagcaagcctgcagcagcggcaactggaccacctccagggaatactagcagcactcaaaagtggaagatctgtaccatatgtaatgaactgttcccagagaacgtgtattcggttcattttgaaaaggaacacaaggcggagaaggtgccggccgtcgcgaattacataatgaaaatccacaatttcacctccaaatgcctctactgcaacaggtacctgccgactgacacgctgctgaaccatatgcttatacacggtctgtcatgcccttactgtagaagcacctttaatgacgtggagaagatggcagctcacatgcgcatggtgcatattgacgaagagatgggacctaagactgactcgactctctcattcgatctcacccttcaacagggatcgcacaccaacatacacctgttggtgaccacctacaacctccgcgatgcccccgccgagagcgtggcataccatgcacagaataacccccctgtccctccaaagccgcaacctaaggtccaagaaaaggccgatattccagtgaaaagctcgcctcaagccgcagtgccgtataagaaggatgtgggtaagaccctctgtccgctttgtttttcaatcctgaaaggacctatatcggatgcccttgcccatcatctgcgcgaacggcatcaggtgatccaaaccgtccatcctgtggaaaagaaactgacctacaagtgtatccattgtcttggtgtttacacgtccaatatgacggcaagcaccattaccttgcatttggtgcactgtagaggggtgggtaagacgcaaaacggtcaggataagaccaacgcacctagcagactgaatcaatcgccctcgctcgcaccagtgaagcgaacctacgaacaaatggagtttcccctgctgaagaagaggaagctggatgatgactctgattcccccagctttttcgaagagaagcccgaagaaccagtcgttctcgcccttgatcctaagggccatgaggatgactcatacgaagcacggaagagctttctcaccaagtacttcaacaagcaaccataccctactagacgcgaaattgagaagctcgcagcaagcctgtggctttggaaaagcgacatagcctcccatttttcaaataagaggaagaaatgcgttagagattgcgaaaagtacaagcctggagtgcttctcggattcaacatgaaggaactcaacaaagtcaaacacgaaatggattttgatgctgaatggttgttcgaaaatcatgatgaaaaggattcgcgcgtcaacgccagcaagactgcagataagaaactcaatttgggcaaagaggacgacagctcgagcgattcatttgaaaaccttgaggaagagtcaaacgaaagcggatcccctttcgacccggtgttcgaagtcgagcccaagatctcgaacgacaatcctgaggaacatgtcttgaaggtcatacctgaggatgcgtccgaatcggaagaaaaacttgaccagaaagaagatggttcaaagtacgagactatccatcttactgaggaacccaccaaactgatgcataacgcatccgattcggaagtggatcaagatgatgtggtggagtggaaagatggggcctcacccagtgagtcaggccctggatcccaacaagtgtccgattttgaagataatacttgtgagatgaagcccggcacctggtccgatgaatcttcccaatccgaagatgcacgctcatcgaaacccgctgcaaaaaagaaggcgacgatgcagggagatcgggaacagctgaagtggaaaaactcatcgtacggtaaagtcgagggcttttggtctaaggaccagtcgcagtggaagaacgcaagtgaaaacgacgagcggctctccaacccccaaattgaatggcaaaattcgaccatcgattcagaggatggagaacagttcgataacatgacggatggcgtcgcagaaccaatgcacggctcacttgccggcgtcaaactcagctcacaacaagcc

SEQ ID NO: 321478 - DNA, 3306 bp, Artificial Sequence
  derived and/or modified sequence
atgtttcagttaccagtaaacaatctgggatccctccggaaggcccgtaagactgtaaagaagatcctatcagacataggactggagtactgcaaagagcacattgaagattttaaacagttcgaacctaacgatttctaccttaaaaataccacatgggaggatgtaggactttgggacccttccctaactaagaaccaggattataggactaagcccttctgctgctctgcgtgtccattttcgtccaagtttttcagtgcctacaagtcccactttaggaacgtgcatagtgaggattttgagaatcgaatactgctgaattgtccctattgtaccttcaacgcagacaaaaaaacactagaaactcacatcaaaatctttcatgcaccaaacgcctctgcgccctcttcatccttgagcacttttaaagacaaaaataagaacgatggtctgaagccaaagcaagcggatagcgtcgagcaggcggtctattactgtaagaagtgcacctaccgggatccgttatacgagattgtgcgcaagcatatctatcgagagcatttccaacatgtggctgccccttacatcgcgaaggctggcgaaaaatcactgaacggcgccgttcccctcgggagtaacgccagggaagaatcatccatccactgcaaaaggtgcctgttcatgcccaagtcatatgaagctctagtacagcacgtgatcgaggaccacgagcgcatcggctatcaggtgactgcaatgatcgggcacactaacgtggtcgtgcctcgctctaaaccgctgatgttgattgcaccgaagcctcaggataagaagagtatggggttgccccctcggatcggatcacttgcgtcaggcaacgtcaggtccctcccatcccagcagatggttaatcgcctgtccattcccaagcccaatctgaattccactggagtgaacatgatgtcgagcgtgcatctacagcagaataattacggggtgaaaagcgtgggacaggggtacagtgtaggtcagtccatgagattgggcctgggggggaacgctcccgtgtctatcccgcaacagagtcagtcggtcaagcagctgctcccttctgggaatggccgctcgtacgggctggggagtgagcagcgatcacaggcgcccgctcggtatagcctgcagtcagcaaacgcatcatctctctctagcggccagctgaaatcgccctcgctctcacaaagtcaggctagccgcgtattgggacaatcctccagtaagcctgcggctgctgctacaggccccccaccagggaacacctcgtcgacacagaaatggaagatatgtaccatctgcaacgagctcttcccagagaatgtatacagcgtgcattttgagaaagagcacaaggccgagaaagttccggcggtggccaattacatcatgaagatccacaatttcacttcaaaatgtctgtattgcaaccgctatctcccaaccgacaccttactaaatcacatgctgattcatggattgtcctgtccatattgtcgttctacgttcaacgatgttgagaaaatggcggcccacatgagaatggttcatatcgatgaagagatgggaccaaagacagactccacactctccttcgacctgacgctgcaacagggcagtcacacaaatatccatctgctggtgaccacctacaatctgagggacgctcccgccgaatccgtagcttatcacgcccaaaacaatccccctgtcccgcccaagccgcagccaaaggtgcaagagaaggcagatatccccgttaaatcctctccccaagcagctgtcccatataaaaaagacgtgggcaagaccttgtgtcctctgtgcttctccatccttaaaggacccatcagtgatgccctggcgcaccatctgagggagcgacatcaagtgatccagacagtacatccagtagaaaaaaagttgacctacaaatgcatccattgtctcggtgtgtatactagcaatatgacagcctcaactattaccctccatctcgttcactgcagaggtgtgggaaagacccaaaatggtcaggataagaccaacgctccctccaggttgaaccaatctcccagcctcgcccctgtaaaacgcacttacgagcaaatggagtttccgctcctcaagaagagaaagctcgacgatgactctgattccccctcgttctttgaggaaaagccagaggaacctgttgttcttgccctggaccccaaggggcacgaggatgacagctatgaggctcggaagtcgttccttacaaagtacttcaacaagcagccgtatccaacgcggagagagattgagaaattggccgcctctttatggctctggaaatctgacatcgccagtcatttctcaaacaaacggaaaaaatgcgtacgagattgcgaaaaatacaagccaggcgtgctcctgggtttcaacatgaaggaactcaacaaggtcaaacatgaaatggacttcgatgccgagtggttattcgaaaaccatgacgagaaggactcacgcgtgaacgcttccaaaaccgccgataagaagctgaacttggggaaggaggatgactcctcttctgattcatttgagaatctagaagaagaaagtaatgaatccggctccccgtttgaccccgtatttgaagtggaacccaaaatcagcaacgacaatcccgaagaacacgttctgaaggttatccctgaggacgctagcgagagtgaagagaaactggatcagaaagaggacggttcaaagtacgaaacaatccaccttaccgaagaacccaccaagcttatgcacaacgctagcgattccgaggtggaccaagatgacgttgttgagtggaaggatggggccagccccagcgaaagtggacctggctcacagcaggtgagcgacttcgaagacaacacgtgtgagatgaagcccggaacttggagcgatgagtcttcccagagcgaggatgctaggtcttcgaaacctgccgcgaaaaaaaaggccacaatgcaaggtgatcgagagcagctcaagtggaaaaattcttcatacgggaaagtggagggcttctggagtaaggaccaatcccagtggaagaacgcctcagaaaacgacgagaggctttctaacccccagatcgagtggcagaattccaccatcgactctgaggatggcgagcaattcgataacatgactgacggggttgccgaaccaatgcatgggagcctagccggcgttaaactctccagccagcaagcc

SEQ ID NO: 321479 - DNA, 3306 bp, Artificial Sequence
  derived and/or modified sequence
atgtttcagctgccagtaaataacctcggatctcttcgcaaggctaggaaaacagtgaagaaaatcctttcagacatcgggctcgaatattgtaaagaacacatcgaagacttcaaacagtttgaacccaacgatttctatctcaagaatacaacttgggaagatgtggggctgtgggatccatccttaactaaaaaccaggattatcgcactaaaccattctgctgttcagcttgccccttctcttcaaagtttttctctgcctataaatctcattttcggaatgtacactctgaagatttcgaaaatagaattttactaaactgtccatattgtacatttaacgccgataaaaaaacactggaaactcatataaaaatcttccacgcgcccaatgcctcagcacccagtagttcactgtctactttcaaagataaaaataagaatgatggattaaaacctaaacaggctgattcggtagaacaggccgtgtactactgcaaaaagtgcacatatcgggatcctctctatgagatcgtgagaaaacacatttatagggagcattttcaacatgtggcagcaccatatatagccaaagctggggaaaagtctctaaacggggctgtacccttgggaagtaatgcacgggaagagagttctatccattgtaaaagatgtttgtttatgcccaaatcatatgaagcgcttgtgcagcatgtaatagaggatcatgaaagaatcggataccaggttactgctatgatcgggcacacaaatgtggtggttccccggtctaaaccattgatgctgatagctcctaaaccccaggataaaaagtccatgggactgccaccaaggattggaagtctagctagtggaaacgtcaggtctcttccttctcagcagatggtgaaccgactgtctatccccaaacccaatctgaacagtacaggggttaatatgatgtcctccgtgcacctgcagcagaacaattatggggttaaatccgtgggacagggatatagtgtcgggcagtctatgcgattaggattaggggggaatgcgcccgtatccatcccccagcagtcccaatctgttaaacagctcctcccttcagggaacggacgttcctacgggctgggatccgaacagcgctcacaggcacccgctcggtattccctccagtcggccaatgcctcaagtctttctagtgggcagcttaagtctccctcgctctctcagtcacaggccagtagagttctagggcagtcctctagtaaacctgcggcagcagccacagggccccccccagggaacacaagttcgactcaaaaatggaaaatttgcactatatgcaacgaactctttcctgagaacgtttattctgtgcattttgaaaaagaacacaaagccgagaaagtcccagctgtggctaactacatcatgaaaatacacaactttacttctaaatgtctatactgtaaccggtatctccccacagatactctcctgaatcacatgctcattcacggactttcatgcccttattgtagatcaactttcaacgacgtagaaaaaatggccgcccatatgagaatggttcatatcgatgaagaaatgggacccaaaactgactctactctgtcttttgatctgactctccagcaaggatcccacacaaacatccatctcctggttacaacatataacctacgcgacgccccagcagagtctgtggcataccatgcccagaacaacccccccgtccctcccaaaccccagcctaaagtgcaggaaaaagctgatatccccgtgaaatcttctccccaagcagcagtgccttataaaaaagatgtaggaaaaactttatgtcccctctgtttctctatcctgaaagggcccatttctgacgccctcgcccaccatctaagggaacgccatcaggtgatacagactgtgcaccctgtagaaaaaaagctcacatataagtgtatacattgcctcggagtgtacacatccaatatgacagcatcaactattactttgcatctggtgcattgccgtggggtaggaaaaacacagaacgggcaagataaaactaacgctcctagtaggctgaaccagagtccctctctggctccagtgaaacgcacatatgaacagatggaatttccgctgctcaagaaaaggaaactagatgatgattcagactccccttctttttttgaagaaaagccagaagagcccgtggtgcttgctctcgatcctaaagggcatgaagatgattcctatgaagcccggaaatccttcctcacaaaatactttaacaaacagccatatcctactcggcgcgaaattgaaaaactggccgccagtctgtggctgtggaagagtgacatcgcctctcacttcagtaacaaacgaaagaagtgtgtccgggattgcgaaaaatataaacccggggtcctcttgggatttaatatgaaagaactcaacaaagtcaagcatgagatggacttcgatgctgaatggctcttcgaaaatcatgatgaaaaagattcccgcgtgaacgccagtaaaacagccgataaaaaattaaacctgggaaaggaggacgactctagttctgattccttcgagaatctggaagaagagagtaatgagtcagggtccccctttgatcctgtgtttgaagtcgagccaaaaatctccaacgataatcctgaagaacacgtgctaaaagtcatccctgaagatgcttctgaatctgaagaaaaactcgatcagaaagaagacgggtctaaatacgaaactattcatctgacagaagaacctacaaaactcatgcataatgcatctgatagtgaagttgatcaagatgatgtggtggagtggaaggatggagcctctccctccgaatctggaccagggtctcagcaggtctcagattttgaggataacacatgcgaaatgaaaccagggacatggtccgatgaatcttctcaatcagaggatgctaggtcatccaagccagctgcaaaaaaaaaagctactatgcagggagatagagagcaactgaaatggaaaaattcttcttatggaaaagtggagggattctggagtaaagatcagtctcagtggaaaaatgctagtgagaatgatgaaagactatctaatcctcagatagagtggcagaactctactattgattcagaagatggggaacagtttgataacatgacagatggggtcgccgagcccatgcatgggtctttggccggggtgaaactctcttcccagcaggct

SEQ ID NO: 321480 - DNA, 3306 bp, Artificial Sequence
  derived and/or modified sequence
atgtttcagctacctgttaacaatttaggttcactcagaaaggccagaaagaccgttaagaaaatcctatctgatattggtctggagtactgcaaggagcatatagaagactttaagcagttcgagccaaatgacttctatttgaagaatacaacgtgggaggatgtgggactgtgggaccccagcctcaccaagaatcaggattacagaacaaaacccttctgttgctccgcatgtcccttttcttctaagttcttcagcgcttataaaagtcacttccgcaatgtccattcggaggactttgagaaccgcatccttctcaattgtccctattgcactttcaacgccgataaaaagacacttgaaacacacatcaagatttttcacgcccccaatgcatcagctccgagttcatctcttagtacattcaaggataagaataagaatgacggacttaaacctaagcaggccgactctgtcgagcaagccgtctactattgtaagaagtgcacttaccgcgacccgttgtacgaaatcgtccggaagcacatctaccgcgagcattttcagcatgtcgcggcaccatatatagcgaaggcaggcgaaaagtcgctaaatggcgctgtccctctcgggtccaacgcccgagaagaaagctccattcattgcaaacggtgcctgttcatgccaaagagctatgaggcccttgtgcagcacgtgattgaggaccacgaacggatcggataccaggtgacagccatgattgggcacactaacgtcgtggtgcctcgctctaaaccactcatgttaattgcacccaagcctcaggacaagaaatctatgggtctccctccccgcatcggatcgcttgcctcaggcaatgtacgctcccttccttcacagcaaatggtcaatagactgtctattcctaagcccaatctgaactctaccggagtgaatatgatgagctccgtccacctgcagcagaacaactatggcgtgaaatcagtgggccaaggctatagtgttggccagtcaatgcgactcggattaggaggcaacgctcccgtaagtatcccccaacagtcccagtctgttaagcagctgctgccaagcggaaacggacggagttacggcctcggtagtgagcagaggtcccaggcccctgctcgatactccctgcaaagcgcaaatgcatcaagcctgagtagtggacagctaaagtcaccttctctatcccagagtcaggcgtcccgcgtgctgggccagagtagtagtaaacccgccgccgctgccactggtcctcctcccggcaatacctcttcaacgcaaaagtggaagatctgcaccatctgcaatgagctgttccccgagaatgtgtactccgtgcactttgagaaggagcataaggcggagaaagtgccagcggtagccaattatataatgaagatacacaattttactagtaaatgcctttactgtaatcgttacttgccaaccgatacattgctcaatcacatgctgattcacggcctctcctgcccctattgccggtcgacttttaacgatgtggagaagatggcagcacacatgaggatggttcacattgacgaggagatgggcccaaagaccgacagtaccctgagctttgatctgactttgcagcagggttcgcacactaacatccacctgctcgtcacaacgtataatctgcgagatgccccagccgaatccgtggcgtaccatgctcaaaataatccacccgtgccaccgaagccacagccgaaagtccaggaaaaggctgatattccagtgaaatcttctcctcaggcagccgttccctacaaaaaagatgtgggtaagaccctgtgtcccttgtgtttctcgattttgaaaggacccatatcagatgcacttgcccaccacttgcgtgaaagacaccaggtcatccagactgttcatccagtggagaaaaagctgacttacaagtgcatccattgtcttggcgtgtatacaagcaacatgaccgcctctaccatcaccctccacttagtgcactgccggggcgtggggaagacacaaaacggccaagacaaaacgaatgcaccttccaggctgaaccagtcgccctcgctagcacctgtgaagcggacctatgaacagatggagtttcctctcctgaaaaagagaaaacttgatgacgactccgattcaccatccttcttcgaggagaagccagaggaacctgttgtgttggcgctcgatccaaagggccatgaagatgactcctacgaagccagaaagtcgtttctcaccaagtattttaataagcagccgtaccccacaagaagagaaattgaaaaacttgcagcctctctgtggctctggaaaagtgacattgcgagccatttttctaataaacgcaagaaatgtgtgcgtgactgtgaaaagtataaaccaggggttctgcttggattcaacatgaaggaactgaacaaagttaagcacgagatggattttgacgccgagtggcttttcgaaaaccacgatgagaaggattccagagtgaatgcctcaaaaacagccgacaagaaactgaacctgggaaaggaggacgatagtagtagcgactcattcgaaaaccttgaggaggagtccaacgagtcgggcagccctttcgacccagtgtttgaagtcgaacctaaaatctccaatgataaccctgaagagcacgtgctgaaggtgatccccgaggacgcttctgagtccgaagaaaagttagaccagaaggaagacggtagcaaatatgaaactatccatctgaccgaagagcccacaaagctgatgcacaacgctagcgactccgaagtggatcaggacgatgtagttgagtggaaagatggtgcgtcgccgagcgagtctggacccggctctcagcaagtttccgacttcgaggacaatacttgcgagatgaaaccaggtacatggagcgatgaatcctcacagagcgaggacgcccgttctagtaagcccgcagccaaaaaaaaggctacgatgcagggcgatcgggagcagttgaagtggaaaaactcttcctacggaaaagtggagggattctggtcaaaagatcagagtcagtggaaaaacgcctctgagaatgatgaaagattatccaacccccagatcgaatggcaaaattctaccatcgacagcgaagacggcgagcagttcgacaatatgaccgacggggttgctgagccaatgcatggcagcctggcaggggtgaaacttagcagccagcaggct

SEQ ID NO: 321481 - DNA, 3306 bp, Artificial Sequence
  derived and/or modified sequence
atgttccagttgcccgttaataatctgggttcacttagaaaagctaggaagacagtgaaaaagattttgtcagacatcggcctcgaatactgcaaggagcacatcgaggacttcaagcaatttgaacctaacgacttttacttgaagaacactacctgggaggatgtcggtctgtgggaccccagcttgacaaagaatcaagactacagaactaagcctttttgctgctctgcatgtcccttctcttctaagtttttttcagcatacaagtctcactttagaaatgtgcattcagaggactttgagaaccgtattctgctgaattgcccctattgtaccttcaatgccgacaagaaaaccctcgagacccatatcaaaatctttcacgccccaaacgcttctgctccatcttcctccctgagtaccttcaaggataaaaataaaaacgacggacttaaacccaagcaggccgacagcgtcgaacaagctgtgtattactgcaaaaagtgtacatatcgtgatcccctttacgaaattgtgaggaagcatatttacagggagcatttccagcacgtagccgccccatacattgcaaaggctggcgagaaaagtctcaacggcgctgtaccactgggatctaacgcacgtgaggaatcttcaatccattgcaaacgctgtctttttatgcctaaaagctacgaggctctcgtgcagcacgtgattgaggaccacgaaaggattggttaccaagtcaccgccatgatcggccatacaaatgtggtcgttcctaggagtaaacccctcatgctgatcgcacccaaaccacaagataagaagtccatgggcctgcccccccgcatcggttccctggcctcaggcaacgtccgttcccttccctcacagcagatggtgaacaggctcagcatccccaagcctaaccttaactctactggcgtgaatatgatgtcatcagtccatctccagcagaacaattacggtgtcaaatctgtgggccagggttactccgttggccagtctatgaggctgggcctgggaggcaacgcccccgtcagtattcctcaacagtcccaatctgtcaagcagctcttgccttccggaaacggtcgctcttacggcctgggctccgagcaacgctcacaggctccagcacgttattccctgcaatcagcaaatgcctcttctctttccagtggtcagctgaaaagtccttccctctcccaatcccaagcctccagggtactcggtcaaagctccagtaagccagctgcagccgctaccggtcccccaccaggtaacacctctagtacccagaagtggaagatctgtacaatctgtaacgaactcttccccgagaacgtctattccgttcacttcgaaaaggaacataaagctgagaaggttccagccgtggctaactatattatgaaaatccataacttcacctctaaatgtttgtactgcaaccgctatcttccaactgatactttgctgaaccatatgctgatccacggactttcttgtccatactgtcgtagcactttcaacgacgttgaaaaaatggccgcccatatgcgcatggtgcatattgatgaggagatgggccccaaaacagactcaaccttgagcttcgacctgaccctgcagcagggctctcataccaacatccaccttctcgtgactacctacaatctcagagatgcacctgccgaatctgtggcctaccacgcacaaaacaaccctcctgtccctcctaagccacagcctaaggttcaggagaaggcagatatcccagtaaagagttctccccaggccgccgtgccatataagaaggacgtgggtaagaccctttgccccctctgctttagcatcttgaaaggacccatttccgatgcacttgctcaccacctcagggagcgccaccaagtaatccagactgttcaccccgttgaaaaaaaactcacctataagtgcattcactgcctgggagtctatacctccaacatgacagcctccaccatcacactgcacctggttcattgcaggggtgtgggaaagacacagaatggccaggacaagaccaacgcaccaagtagactgaaccagtccccaagcctggcccccgtcaaacgcacctacgaacagatggagttcccactgctgaagaagaggaagctggacgacgattccgattcccccagtttctttgaggagaagccagaggaacccgtggtgctggccctcgatcctaaaggtcacgaagacgactcatacgaagctaggaagtcttttctcaccaagtactttaacaagcaaccataccccactagacgcgagattgaaaaattggccgcttctttgtggctttggaagtcagatatcgcttcccacttctcaaacaaaaggaagaagtgtgtgagagattgtgagaagtacaagcccggagtgctgctgggattcaatatgaaagaacttaacaaggtcaagcacgaaatggatttcgatgccgagtggctgtttgaaaatcacgacgaaaaggattcaagagttaatgcatctaaaacagctgacaagaagctgaacctcggcaaggaagacgattccagtagtgactcctttgaaaatctcgaggaggaatctaacgagtctggctctcccttcgacccagtgtttgaggtggaacctaaaatcagcaacgataacccagaagaacatgtgttgaaggtgatccccgaagatgcatctgaatcagaggaaaagttggaccagaaggaggatggttcaaaatatgaaactattcatctgaccgaagagccaacaaaattgatgcacaacgcttccgattcagaggtggaccaggacgacgtagttgaatggaaagacggtgcatctccttcagagtccggaccaggaagtcagcaggtgtccgacttcgaggacaacacttgcgagatgaagcccggtacctggtcagatgaatctagccagagtgaggatgcacgtagttctaagcctgccgctaagaagaaagccacaatgcaaggcgacagggaacagctgaagtggaagaactccagctacggaaaggtcgaaggtttctggtcaaaggatcaatctcagtggaagaacgcctctgagaacgacgaaagactcagtaacccacaaatcgaatggcagaattccacaatcgacagcgaggatggcgagcaatttgataatatgaccgatggagtggcagagccaatgcacggctctctggccggtgtcaaactctcatcccagcaggct

SEQ ID NO: 321482 - DNA, 3306 bp, Artificial Sequence
  derived and/or modified sequence
atgttccagctgccggtgaacaacctgggatcactgagaaaggcaagaaaaaccgtcaagaagattctttcggacattggcctggagtactgcaaagagcatatcgaggactttaaacagttcgagccgaacgacttctacttgaagaatactacttgggaggatgttggactgtgggacccctcactgaccaagaaccaggattaccgcacgaagccgttttgctgctctgcgtgcccgttctcaagcaagttcttttcggcctacaagagccacttccgcaacgttcactcagaggacttcgagaataggatcctcctgaactgcccgtactgcaccttcaatgcagacaaaaagactctggagactcatatcaagatttttcacgctccgaacgcctctgcaccttcatcctcattgagcacttttaaggataagaataagaatgatggactcaagccgaaacaggcagactcggtggaacaggcagtgtattactgcaagaaatgtacctaccgcgatccactctacgaaatcgtcagaaagcacatctaccgggaacattttcaacacgtcgccgccccatatatcgccaaagcaggggagaagtccctgaacggagccgtgcctctgggctccaatgcgcgcgaggaatcctccatccactgtaagcgctgcctgttcatgccgaaaagctacgaagcgctggtccaacacgtcatcgaggaccatgagcggattggttaccaggtgactgcgatgatcggtcataccaacgtggtcgtgccgcggagcaaaccactgatgctgatcgcaccgaagcctcaggataagaagagcatggggttgccaccccggatcgggagccttgcatcaggaaacgtgcggtccctgccgtcccagcagatggttaatcgcctgagcattccaaaacccaacctcaatagcactggtgtgaatatgatgtcgtcggtgcacttgcagcagaacaactacggagtgaaaagcgtcggtcagggctactcggtgggacaatccatgagactcggcctgggaggtaatgctccggtgtccatcccacagcaatcacagtccgtcaaacaactgctgccatcgggcaatggtagatcatacggactcggcagcgaacaacgctcgcaggcacctgctcggtacagcctgcaatccgctaacgcgtcatcactcagttcaggacagctcaagtcgcctagcctgtcccaatcgcaggcctcccgggtcctcggccagtcctcctcgaaaccagccgcagctgctaccggaccaccaccggggaacacctcgtcgacccagaagtggaagatctgtaccatctgcaacgagttgttcccggaaaatgtgtactcagtgcattttgagaaagaacataaagccgaaaaagtgccggcagtcgccaattacataatgaaaattcacaacttcactagcaaatgtttgtactgtaatcggtacctgccaacggacacccttctcaatcacatgctgatccacgggctgtcctgcccttactgccggtcaaccttcaatgacgtggagaagatggccgcgcacatgcgaatggtccacatcgacgaggagatgggcccaaaaaccgattcgaccctgtccttcgacctcaccctgcagcaaggctcgcataccaacatccacctgctcgtcaccacctacaacctgcgggatgcaccggcggaatcagtcgcgtatcacgcacaaaacaacccgccggtgccgcctaaaccgcagccgaaggtgcaggaaaaggccgatatcccagtgaagagctcgccccaggccgcagtgccttacaaaaaggacgtgggaaagaccctctgcccgttgtgcttctctatcctgaagggtccaatctcggatgccctcgcccaccacctgagagagcggcatcaggtgatccagacggtgcatccggttgaaaagaagctcacctacaaatgcattcactgtctcggcgtgtacacctcaaatatgaccgcgtccaccatcaccctccacctggttcactgccgcggtgtcggaaagacccagaatggccaagacaaaactaacgctccgagtagactcaaccagtccccatcattggcccctgtgaagcgcacctacgaacagatggagttcccgctcctcaagaagagaaagctggacgatgattcggacagcccttccttcttcgaagagaagccggaagagcctgtggtgttggcactcgacccgaagggacacgaggacgattcctacgaagcacgcaagtcgttccttacgaagtactttaacaagcaaccgtacccgacccgacgcgaaatcgagaagttggcagcctccctctggctgtggaagtccgatatcgcctcacacttctccaacaagcgcaagaagtgcgtgagggattgtgaaaagtataagccgggagtgctgttgggcttcaatatgaaggagctcaacaaagtgaagcacgaaatggatttcgacgccgagtggctgttcgagaatcacgacgaaaaggacagcagggtcaacgcatccaagaccgcagacaagaagctgaatctgggtaaggaagatgactcgtcctcggactccttcgaaaacctggaggaggagtcaaatgagtccggaagcccgttcgacccagtttttgaagtcgagccgaagatctccaacgataacccagaagaacacgtcctcaaggtgatccctgaagatgcatcagagagcgaagaaaaactcgatcaaaaagaggacggaagcaagtacgaaaccatccatcttactgaagagccaactaaattgatgcacaatgctagcgatagcgaagtcgatcaggacgacgtcgtggagtggaaggatggagcctccccgtctgaatcgggaccgggttcccagcaggtatcagatttcgaggacaacacctgcgagatgaagccaggaacttggtcggacgaatcgtcgcagagcgaggacgcacgctcctcgaagccggccgcgaagaaaaaggccacgatgcaaggagatcgcgagcagttgaaatggaagaacagcagctatggcaaggtcgagggattctggtctaaggaccagagccagtggaagaacgcatcggaaaacgacgagcggctcagcaatccacagatcgaatggcagaactccaccatcgactctgaagatggcgaacagttcgacaacatgactgatggtgtcgctgaacctatgcacgggtcgctggcaggagtgaaactgtcatcacaacaagcc

SEQ ID NO: 321483 - DNA, 3306 bp, Artificial Sequence
  derived and/or modified sequence
atgttccaactgcctgtgaacaaccttgggagccttagaaaagcccgaaagactgtgaagaagattctgtcagatataggcctggaatactgcaaggaacatattgaggactttaagcagtttgaaccgaacgatttctacctgaagaataccacctgggaagatgtcggtctgtgggacccttcgttgacgaaaaaccaagactaccgaaccaagcccttctgttgcagcgcctgcccatttagctccaagtttttctcggcatacaaatcacattttaggaatgtgcattccgaagattttgaaaacagaatcctgctgaattgtccgtactgcacctttaacgccgacaagaaaactctggaaacccacattaagatatttcacgcacctaacgcatcggcaccttcatcctccctgtccacctttaaggataagaacaaaaacgacggccttaagccaaagcaggcagatagcgttgagcaggctgtgtactactgtaaaaagtgtacttacagagatccactgtacgaaatcgtaagaaagcacatttaccgtgaacattttcagcatgtggctgcaccttacatcgcaaaggccggtgaaaagtcgcttaacggagcggtgccactgggtagtaatgcccgcgaagagtcgtcaattcattgtaagaggtgtctgttcatgcctaagtcctacgaggcactggtgcagcacgtcattgaggaccatgaaagaattggttatcaagtgactgcaatgattggtcatactaatgtcgtggtgccacgcagcaaaccgctgatgcttattgcccccaaaccacaagataagaagtcgatgggcctgccacctcgaatagggagccttgcatcaggtaacgtgaggtcgctcccatcccagcaaatggtcaatcgtctgagtattcccaagcctaaccttaacagcactggggtgaacatgatgtcgagcgtgcacctccaacagaataactatggtgtcaagtcagtggggcagggctactcggtcggacagtctatgcggcttggattgggcggaaacgcacctgtgtccattcctcagcaatcacaaagcgtgaaacaactgctgccctctggaaatggccggtcctatggtctgggttccgaacaacgttcccaggctcccgctcggtactcgcttcaatccgcgaacgcatcctcgctgtcgagcggtcagcttaagtcgccttccttgtcgcaatcacaagcatcaagagtgctgggacagtcgtcgagcaaacctgcagcggccgccacgggacccccgcctgggaatacgtctagcactcaaaagtggaagatctgtactatatgcaatgaattgtttccagaaaatgtctactcggtgcatttcgaaaaggagcataaggcggagaaagtgccagccgtagcgaattacataatgaagattcataactttactagcaagtgcctgtactgcaacagataccttccaactgatacgctcctgaaccatatgctgatccacggcctttcttgtccttactgtcgctccaccttcaatgacgtggagaagatggcagctcacatgcgcatggtccatatcgatgaggagatggggccaaagaccgactcgaccctcagctttgacctgacccttcaacaaggttcccacactaacattcatctcttggtcactacctacaaccttcgtgatgcacccgcagagagcgtcgcataccatgcacagaacaatcctccggtgccacctaagccacaaccaaaggtgcaagaaaaggcggacatccctgtgaaaagcagccctcaggcggcagtgccttataagaaagatgtcggaaagactctttgcccactttgtttcagcatactgaaaggaccaatatccgacgccctggcacatcatctccgagagcgacaccaggtgatccaaaccgttcatcctgtcgagaaaaagctcacctacaaatgtattcattgtttgggagtatacaccagcaatatgaccgcatctactatcactctgcacctcgtgcactgtaggggcgtcggaaagacgcagaacggtcaggataaaactaacgccccgagcaggctcaatcaatcaccttcgcttgcaccagtgaagagaacctacgaacagatggaatttccgcttctgaaaaagcgcaagttggatgatgactccgattccccttccttttttgaggagaagccggaagaaccagtggtgctggcgctcgaccctaaaggacacgaggacgactcatacgaagcgaggaagtctttcctgactaaatacttcaacaagcagccataccctaccagaagagaaattgaaaaactcgcagcatcgctctggttgtggaaatcggatatcgcgtcgcacttttccaacaagaggaaaaagtgtgtcagagattgtgaaaagtacaaacccggtgtgctcctcggattcaacatgaaagagcttaacaaggtcaagcatgaaatggactttgacgctgaatggctttttgaaaaccacgacgagaaggattccagagtcaatgcttcgaaaaccgctgacaagaagctgaacctcggtaaagaagatgattcgtcatcagatagcttcgagaatctcgaggaagagtcgaatgagtcgggttccccattcgatccggtattcgaagtggaacccaagatctccaatgataacccggaggaacatgtgcttaaggtgataccagaggatgcctcggagagcgaagagaaactggaccaaaaagaggacggatcgaagtacgaaaccatacatcttactgaggaaccaaccaaactcatgcataacgcatcagacagcgaagtcgatcaggatgacgtggtggaatggaaggacggagcgtcgccttcagaatcgggccctggatcgcaacaagtgtctgactttgaagataacacttgcgaaatgaagcctggaacttggtcggatgaatcgtcccaatcagaggatgcacggtcgagcaagccagcagccaagaaaaaggctaccatgcagggagatcgggagcagcttaaatggaagaactcgtcgtatggtaaggtggaaggcttttggtcgaaggatcagtcccagtggaagaatgcatcggaaaacgatgaacgtttgagcaatccacagattgaatggcaaaacagcacgatcgatagcgaagatggagaacagtttgataacatgaccgatggggtggccgaacccatgcacggatcgctggcgggagttaagctgtcatctcaacaagcc

SEQ ID NO: 321484 - DNA, 3306 bp, Artificial Sequence
  derived and/or modified sequence
atgttccagctgccggtcaacaacctggggtcactgcgcaaggcccggaaaactgtgaagaagatcctctcagacatcgggctggagtactgcaaggaacatatcgaggacttcaagcaattcgagccgaacgacttctacctgaagaacactacctgggaggacgtcggactttgggaccctagcctcaccaagaaccaagactaccggacgaaaccgttctgttgctccgcgtgcccattttcgtctaaattcttcagcgcatacaagtcgcactttcggaacgtgcactcagaagatttcgagaataggatcctgctgaattgtccttactgtacttttaacgcggacaaaaagactctggagactcacatcaagatcttccatgcccccaacgcgtcggcgccgtcatcgtcgctgagtacgtttaaggataagaacaagaacgacggactcaagcctaagcaggcggattcagtcgaacaagcagtgtattactgcaagaagtgcacttaccgggacccgctgtacgagatcgtgaggaagcatatctaccgggaacatttccagcacgtggccgccccttatatcgctaaggccggtgagaagtcgctgaacggtgctgtcccgctcggatcgaatgcgcgggaggaatcgtctatccactgtaaacgctgcctcttcatgccgaagagctacgaggcactggtgcagcacgtcatcgaggaccatgaacggatcggatatcaggttactgcaatgatcggacacactaacgtggtcgtgccgcgctccaagccgcttatgcttatcgcgccgaaaccgcaagataagaaatcgatgggactgccaccgcggatcgggtccttggcttcgggaaacgtgagatccttgccttcccagcaaatggtgaatcgcctttccatccctaaaccgaacctcaacagcactggagtcaacatgatgtcatcagtccacctccagcaaaacaattacggcgtcaagtccgtgggacaaggatattcggtcggacagagcatgagactcgggctgggagggaacgcgcctgtgtccatccctcaacagagccagagcgtgaaacagcttctcccgagcggaaacggacgctcgtacggattgggctccgaacagaggtcccaagcaccggcacggtattcgctgcaaagcgcaaatgcttcgtcattgtcctccgggcagctgaaatcgccaagcctctctcagagccaggccagcagagtgctgggccagtcctcgtcgaagcctgccgcagcggctactggcccgcctccgggaaacacctcgtcgacgcaaaagtggaagatctgcacgatctgcaatgagctctttccagaaaatgtgtactcagtgcactttgaaaaggagcataaagcggagaaggtgccggccgtcgccaactacatcatgaaaatccacaatttcacgtcaaaatgcctgtactgcaatcggtacctgccgaccgacaccctgctgaaccatatgctgatccacggcctgagctgcccatactgccggtccaccttcaacgacgtggaaaagatggcagctcacatgcgcatggtgcacattgacgaagagatgggtccaaagaccgactcaacgctgtcctttgatctcaccctccagcaggggtcgcacaccaatattcatcttctcgtcacgacttacaacctgcgcgacgcgcctgcggaatccgtcgcctaccatgcacagaacaatccccccgtgcctccaaagccccaaccgaaggtccaggaaaaggcggacattccggtgaagtcctcaccacaggctgcggtgccttacaagaaggatgtgggaaaaactctttgccccctgtgtttctccatcctgaaaggcccaatctccgacgccctggcgcatcatctgagagagcgccatcaggtcatccagaccgtgcatcccgtcgagaaaaagctgacttacaagtgcatacattgccttggcgtgtacacctctaatatgactgcgtcgactattacgctccacctggtgcattgccgcggcgtgggcaaaactcagaatggccaagataagacgaacgccccgagccgcctgaaccaatccccttccctggcgcctgtgaagcggacctacgagcaaatggaattcccgctgctgaagaagagaaagctcgatgacgattcggactccccgtcgtttttcgaggaaaagcctgaagaacctgtggtcctcgcgctggatccgaaggggcacgaggacgattcctacgaggcacgcaagtcgtttctcaccaaatacttcaataagcagccatatccgacccgccgcgaaattgagaaactcgcagcgtcactgtggctgtggaaatccgacatcgcttcgcacttctcgaataaacggaaaaagtgcgtgagagactgcgaaaagtacaagccgggagtgctgctgggctttaacatgaaagaactcaacaaagtgaagcacgagatggacttcgatgcggaatggctgtttgaaaaccacgatgagaaagattcaagagtgaacgccagcaagaccgctgacaagaagctcaacttgggtaaggaggacgactcctcttcggactctttcgaaaacctggaagaagaatcgaatgagagcggaagccctttcgacccggtgttcgaagtggaacccaagatttcgaacgacaaccccgaagaacacgtgctgaaggtcatccccgaggacgcatccgagtcggaggagaagctggaccagaaagaggatggatcgaagtatgaaaccatccatctgactgaggaaccgaccaaactcatgcataatgcgtcagactcagaagtcgaccaggacgatgtggtcgaatggaaggacggcgcgtcgccgagtgaatcggggccgggctcccagcaggtgtcagacttcgaggacaacacctgcgagatgaaacccgggacctggtcggacgagtcctcgcagtcggaagatgccagatcatccaagccggccgccaaaaagaaagccacgatgcaaggtgaccgcgaacagcttaaatggaaaaactcgagctacggaaaggtggaaggattttggtccaaggatcagtcacagtggaagaatgcttcagaaaatgatgagcggctgtccaatccacaaatcgagtggcagaacagcaccatcgattcagaggacggagaacagttcgacaatatgaccgacggggtcgctgaaccgatgcatggatccctcgccggggtcaagctgagctcacagcaagcc

SEQ ID NO: 321485 - DNA, 3306 bp, Artificial Sequence
  derived and/or modified sequence
atgttccagctgccagttaataacctaggatccctacgaaaagcaagaaagactgtgaaaaaaattctttccgatataggactcgaatactgcaaggagcacatagaagattttaagcaatttgaacccaacgacttctatttgaaaaataccacgtgggaagatgttggcctctgggacccatctctgacaaagaaccaggactataggacaaaaccgttctgttgctccgcttgcccgtttagcagtaaatttttttctgcgtataagagccatttcaggaatgtgcactccgaagattttgaaaacagaatcctgttgaactgtccctattgtaccttcaatgccgataagaaaacgctggagactcacattaaaattttccatgcaccgaatgcctcagctccttctagctccctgtccactttcaaggataagaacaagaacgacggccttaagccgaaacaagcagactccgtggaacaggcagtatactactgtaaaaaatgcacttacagggacccactttatgagatcgtaaggaaacatatctacagagagcactttcaacacgtagccgctccatacatcgctaaggccggagaaaagagtctgaatggcgccgtgccgcttgggagcaacgcaagggaagagtcatctattcattgtaaaagatgccttttcatgccaaagtcctatgaggctttggtccagcatgtgatcgaggaccacgagaggatcggataccaggtaacggccatgatcggacacacaaatgtggtggtgcctcgatccaagcctttaatgctgatcgcgccaaaaccgcaggacaagaaaagtatgggcctccccccaaggataggttctcttgcgtcaggaaatgtccggagcctgcctagccagcagatggtgaacagactgagcatcccgaaacctaacctgaactcaactggtgtgaacatgatgtcgtcagtgcacctacagcagaataactatggggtcaaaagcgtggggcagggctattccgtaggccagagcatgcgactcggcttagggggaaacgccccagtgagcattccacagcagtctcagtccgtcaaacaactgttaccttccgggaacgggcgaagctatggactcggctccgagcaacgatcacaggcgccagctagatattcactacaatcggctaacgcctcaagtttgtcctctggtcagttgaagtccccttcgctgtcccagagccaagcctccagggtgttaggccagagctctagcaaaccagctgcagctgcaaccggccctccccccggaaatacctcctccacccagaagtggaaaatttgtacgatctgtaatgaacttttccctgagaacgtatattcagtgcatttcgaaaaggaacataaggccgaaaaggttccagcagtcgctaactacatcatgaaaatccacaacttcacctccaaatgtctgtattgtaatcgatatctgcctacggacactctcttaaatcatatgttaatccatggtctgtcctgcccttattgccgaagcaccttcaacgacgtggaaaagatggcggcacacatgaggatggttcatattgacgaagaaatgggtccaaaaaccgattccactctgagtttcgacctcacacttcagcagggatcacacactaacatccacctgctagttacgacgtacaatttgcgagacgcccctgccgaaagtgtagcctaccacgcccagaacaatccacccgttcccccaaagccacagcctaaagtgcaggaaaaggccgatattccggtgaaatcctccccgcaagccgccgtgccttataagaaagacgtcggtaaaaccctgtgccccttgtgtttctctatccttaaagggcctatcagtgatgctttggcccatcatctgagggaaagacatcaggtaatccagaccgttcacccggtggaaaagaaactgacctacaagtgcatccactgtctgggtgtgtataccagcaatatgacagcctcaacaataaccttgcatctggtccactgcagaggcgtgggcaaaacacagaatggacaggataagacaaacgcaccgagccggctgaaccaatccccctctctcgctccagttaaaagaacatacgagcagatggagttcccgctcttgaaaaagcgtaaactggacgacgatagtgactccccatcattcttcgaagaaaaacctgaggaacctgtggtattagctctcgatccaaaggggcacgaggatgacagttatgaggcaaggaaatccttcctgactaaatattttaacaagcagccctacccaacccgtcgtgaaatcgaaaaattagccgcaagtctgtggctttggaagagtgacattgcctctcacttctccaacaagagaaaaaagtgtgtcagggactgtgagaaatataaacctggagttctgttgggcttcaacatgaaagaactaaacaaagtgaagcacgaaatggatttcgatgccgagtggctctttgagaaccacgatgaaaaggattctcgggtgaatgcatccaaaaccgccgacaaaaaactgaacctggggaaggaagacgactctagctccgattcttttgagaaccttgaagaagaatctaacgaaagtggctccccctttgatcccgtgttcgaagtggagccaaaaattagcaatgacaaccccgaagaacatgtgctaaaggtaattcctgaagacgcttccgaaagcgaagaaaaactcgatcaaaaggaggacggttcaaagtatgaaacgatccacctcaccgaagagccaacaaagttgatgcacaacgcttccgatagtgaggtggaccaagacgatgtggttgaatggaaggatggggctagcccaagtgaatccggcccgggttcacagcaggtgtccgatttcgaagacaatacatgtgagatgaagcccggcacctggtccgatgaatcttcccagtccgaagacgctcggtcctcaaagccagctgcgaagaagaaagccacaatgcagggggatcgagagcagcttaagtggaagaactcatcctatgggaaagtggaaggtttttggtcgaaagatcagagtcagtggaaaaacgccagcgagaatgacgaaaggctgtccaatccccagattgagtggcaaaatagcaccatcgatagtgaagacggggagcaattcgataacatgaccgacggcgttgccgagccaatgcacggctccctggcaggggtgaagctttcctctcaacaggcc

SEQ ID NO: 321486 - DNA, 3306 bp, Artificial Sequence
  derived and/or modified sequence
atgttccagcttccggtgaacaacttgggttctctccgaaaggcgcgcaaaactgtcaagaaaatcctgtccgacatcggccttgaatactgcaaagaacacatcgaggacttcaagcagttcgaaccgaatgacttttacctgaagaacaccacgtgggaagatgtcggactttgggacccttcgctcaccaagaaccaggattaccggactaagcccttctgctgctccgcgtgtcccttcagcagcaagttcttttcggcatacaaatcgcatttccgaaatgtgcattcggaagatttcgagaatcgcatccttctcaactgcccgtactgcaccttcaacgccgacaagaaaaccctcgagactcatatcaaaatctttcatgcgcccaacgcatcggccccgtcctcgtcgctctcaaccttcaaggataagaataagaacgacggactgaaaccgaagcaggcggactcggtggagcaggcagtgtactactgcaaaaagtgcacttaccgtgacccgctctacgagatcgtgaggaagcatatctacagagaacacttccagcatgtggccgcaccgtacatcgccaaggcaggagagaagtcactgaatggcgcagtgccattggggtcgaatgctcgagaagaatccagcatccactgcaaacggtgcctcttcatgcccaagtcctacgaggccctggtccagcatgtgatcgaagatcatgaacgcatcggctaccaggtcactgctatgatcggacatactaacgtcgtggttccgcggtcaaagcccctcatgctcattgcccctaagccgcaagacaaaaagtcgatgggacttccgccccgcatcggaagtctggcttctggcaatgtgcggtccctgccgagccagcagatggtcaataggctctccatcccgaagccgaaccttaactcaacgggtgtgaacatgatgagttcggtgcacctgcagcaaaacaattacggcgtcaagtcagtgggacaagggtacagcgtcgggcaatcgatgcgcctcggactgggcggtaacgcaccggtgagcatcccacaacaatcgcagtccgtgaagcagctccttccctcgggcaacgggcgctcctacggactgggaagcgaacagcggtcgcaggcccctgccagatattcgctgcagagcgctaacgcgtcatcactcagctcgggacaactgaagtcaccaagcctgtcccagtcccaggcctcgcgcgtcctgggccaatccagctctaaaccggcggcagcagccaccggaccaccgcctggaaacaccagctcgacccagaagtggaagatctgcaccatctgcaacgagctgtttccagagaacgtctacagcgtccacttcgagaaggaacacaaagccgagaaggtccctgcggtggcgaattacatcatgaagatccacaacttcacctcaaaatgtctctactgcaaccgctaccttccgactgatactctcctgaaccatatgctcatccacggtctttcgtgtccgtactgtcgcagcacctttaacgatgtggaaaagatggccgcccacatgcggatggtgcatatcgatgaagaaatgggcccaaagactgatagcacgctcagctttgatttgaccctccagcaaggatcacacaccaatatccacctgttggtgactacctacaatctgcgcgacgcgcctgcagaatcggtggcataccacgcgcagaataatccaccggtgcctccgaaaccacagcccaaggtgcaggaaaaggccgatatcccagtgaagagctcgccacaggcagcggtgccttacaagaaggatgtgggaaagactttgtgtcccctgtgcttctcgatccttaaaggtccaatcagcgacgccttggcacaccacctgcgggaacgccaccaagtgattcagactgtgcaccccgtggagaaaaaactgacctacaagtgcattcattgcctgggcgtgtacacctcaaacatgacggccagcaccatcaccctgcatctcgtgcattgcaggggcgtcggaaaaacccagaatggacaggataagactaatgcaccgtcccggttgaatcaatcaccatcgcttgctccagtgaagcggacctacgagcagatggaatttcctctgctgaagaagcggaagctggatgatgatagcgactctcctagcttcttcgaggagaaaccggaagaacccgtcgtgctggccctcgatccaaagggtcatgaagatgactcctacgaagcccgcaagtcctttctgaccaagtatttcaacaagcaaccatacccgacgcgccgggagatcgagaagctggctgccagcctctggttgtggaaatccgatatcgcctcccacttctcaaataagagaaaaaagtgcgtgagggactgcgagaagtacaagcctggtgtccttctcggattcaatatgaaggaactcaataaggtgaagcacgagatggatttcgacgctgagtggctgttcgaaaatcacgatgagaaagactcgcgggtgaacgcctccaagaccgcggacaagaagctcaacctcggaaaagaggacgactcgagctccgacagcttcgaaaacctcgaagaggagtccaacgagtcgggttctcctttcgaccctgtttttgaagtcgaaccgaaaatctcaaacgataatccagaggaacacgtgctcaaggtcatcccggaggacgcatcggaaagcgaggaaaagctggaccaaaaggaggacggctcaaagtacgaaaccatccatctgaccgaagagccgactaagctcatgcataatgcttccgactcagaggtcgaccaagacgacgtggtggagtggaaagatggagcctccccctcggaatctggacctggctcgcagcaggtgtcggatttcgaggacaacacctgtgagatgaagcccggcacctggtcggacgaaagcagccagtcggaagatgcccggagctccaagcccgccgcaaaaaagaaagcgactatgcaaggagatcgagagcaactgaagtggaagaactcgagctacgggaaggtggaagggttttggtctaaagaccagtcgcagtggaagaatgcctcagagaacgacgaacggctgtccaacccgcaaatcgagtggcaaaattcgactatcgatagcgaagatggggaacaattcgacaacatgactgacggagtggccgaaccaatgcatggttccctggcgggagtgaagctgtcgtcccagcaagcc

SEQ ID NO: 321487 - DNA, 3306 bp, Artificial Sequence
  derived and/or modified sequence
atgttccaacttccagtgaataacttgggatcgctcaggaaagcccgaaaaaccgtgaagaagattcttagcgatatcggactcgagtactgtaaggagcatatcgaagatttcaaacagtttgaacccaatgatttctatctcaagaatactacttgggaagatgtgggtctttgggatccatcccttaccaaaaaccaggattatcgcactaagcctttttgctgcagcgcatgtccattctcatctaagtttttctcggcctacaagagccattttaggaacgtgcattccgaagatttcgaaaaccgcatcctgctgaattgcccatattgtacctttaacgctgacaaaaagactctggaaacccacattaagatttttcacgccccaaacgcaagcgccccttcaagctcactctccacttttaaggacaagaataagaatgacggattgaagccaaagcaggcagattcggtggaacaagccgtgtactactgcaaaaagtgtacctaccgggatccactgtacgaaatcgtgagaaagcatatctaccgggaacattttcagcatgttgcagccccctacattgcaaaggcaggtgagaagtcgctgaacggtgcagtccctctgggctcgaacgcaagagaggaatccagcatccattgtaagcgctgtttgtttatgccaaagtcctatgaggcacttgtccaacatgtcatcgaagatcatgaaaggataggataccaagtgacggcaatgatagggcataccaacgtggtggtaccccggagcaaaccccttatgctgattgcaccaaagccacaagacaagaaatcgatggggcttcctcccaggattggctcacttgcctcgggtaacgtgcgatcgctgcccagccaacaaatggttaaccgtcttagcatccccaagcctaatcttaattcaaccggagtcaacatgatgtcgtcagtacatcttcaacagaacaattatggggtaaagagcgtcggccaaggctatagtgtcggtcagtcgatgagacttggtcttggtggaaacgcacctgtgtcgatcccccagcagagccaatcggtgaaacagcttctgccttcgggtaatggaagatcttacggacttggttcggagcagcggagccaggctccggcacggtactccctccaatccgccaacgcatcaagcctctcctccggacaacttaaatccccctcgctctctcagtcgcaggcttcgcgtgtgctggggcaatcttcatccaaacctgccgcagcagcaactggtcccccgcccggtaacacgtcaagcactcagaagtggaagatctgcactatttgcaacgaactgtttccagaaaacgtgtactcggtccattttgaaaaggaacataaggcggagaaggtgccagcagtcgctaactacattatgaagatccataacttcacgtccaaatgcctgtactgtaataggtatcttccaactgataccctgctgaatcacatgctgatccacgggctcagctgtccatactgtcggtcgacttttaacgatgtggagaaaatggccgcacatatgagaatggtgcatatcgatgaggaaatgggtccaaagaccgattccaccctttcgtttgatctgactcttcagcaggggtcacatacgaacattcacctgcttgtgactacctacaacttgagggatgctcctgccgaatccgtggcataccatgcacagaacaatcctcccgttccaccgaagccacagccaaaggttcaagagaaggccgacatacccgtcaaatcttccccccaagccgccgtcccatacaagaaagacgtcggtaagaccctttgcccgctttgtttttccattctgaagggacctatttcggacgcactggcacaccaccttcgcgagcggcatcaggtgatacagactgtgcatcccgtcgagaagaaactgacgtacaaatgtattcattgtttgggagtctacactagcaacatgaccgcatcaaccattaccctccacctcgtccattgtcggggagtgggtaaaacccaaaacggacaggacaagactaatgccccttcgcgcttgaaccaatcgcctagcctggcacctgtcaagagaacctatgagcaaatggaatttccactgcttaagaagagaaagctggatgacgactccgactcaccatccttctttgaagaaaagccagaggaacccgtggtgcttgcactggatccgaagggacatgaagatgatagctacgaggcacgcaagagctttctgaccaagtacttcaataagcaaccatacccaactagacgggaaattgagaaacttgcagcatcactgtggctttggaagtcagatatcgcgtcccatttctcaaacaagagaaagaagtgcgtgagagactgtgagaagtacaagcctggcgtcctccttggtttcaatatgaaagaacttaacaaagtgaaacatgagatggatttcgacgccgaatggctgttcgaaaaccacgacgagaaggatagcagagtgaatgcatcgaaaactgctgataagaagctcaaccttggaaaggaagatgattcctcatccgattcgtttgagaatctcgaagaggaatcgaacgaatcgggctccccgttcgatcctgtgtttgaagtggaaccaaagatctccaacgacaatccggaggaacatgtcctcaaagtcattccagaggatgcctcagaaagcgaagagaaacttgaccagaaagaggatggatccaagtacgaaaccattcacctgaccgaggaacctactaaacttatgcataacgcaagcgactcggaagtggaccaggacgatgtggtggagtggaaagatggagcatcgccttccgagtcgggaccgggcagccaacaagtgtccgattttgaagataatacttgcgaaatgaaacctggaacctggtctgatgaatcctcccaaagcgaagatgcccgctcctccaagccggcagccaagaaaaaggccactatgcaaggggaccgagaacaacttaagtggaaaaactcatcctacggtaaggtggaagggttctggtcgaaggatcaatcgcagtggaagaacgcctcggaaaacgatgagcgactgtccaatcctcaaatcgagtggcaaaattcgaccattgactcggaggatggcgaacagttcgataacatgaccgacggggtcgccgaaccaatgcatgggtccctggcaggagtgaaactttcgtcacaacaagct

SEQ ID NO: 321488 - DNA, 3306 bp, Artificial Sequence
  derived and/or modified sequence
atgtttcagctgccagtcaacaacttggggtctctaagaaaagcacgaaagaccgtcaagaagatcttgtctgacattggactagagtactgcaaagaacacatagaggacttcaagcagttcgaacctaacgacttttacctcaagaataccacgtgggaggacgtcggtctctgggatccatcgctcacaaagaatcaggactaccgcacaaagccgttctgctgctctgcatgtccattttcatctaagttcttttctgcttataagagccactttcgcaacgtccatagtgaggattttgaaaaccggatcttgctaaattgtccatactgtacctttaatgccgataagaagaccctcgagacacacattaaaattttccacgctcccaatgcctccgcaccatcttcatccctctccaccttcaaagacaagaacaagaatgacggcctgaagccaaaacaggccgactctgtggagcaagccgtgtattactgcaagaaatgtacgtaccgtgacccactgtacgaaattgtacggaaacacatttacagagagcattttcagcacgtggccgctccttacattgccaaagccggagaaaagtcccttaacggtgctgtacccctgggatctaatgcccgcgaggaatcttccatccactgcaagcgttgtctcttcatgccaaaatcatatgaggccctggttcagcatgtgatagaagatcacgaacgtatcggatatcaggtcaccgcgatgattgggcacactaacgtagttgtgccaaggagtaaaccactgatgctgattgctcccaaaccacaggataagaagagcatgggcttaccaccccgcatcggctcactggcatccggcaatgtccggtctcttccctctcagcagatggtaaataggctctccatccctaagccaaacctgaatagtacaggagtgaacatgatgagctctgtacatctgcagcaaaacaactacggggtcaagagtgtgggccaaggttactcagtgggacagagtatgcgcctggggctgggtggaaatgccccggtgagcatcccccaacaaagtcaatcagtgaagcagctcctaccttcaggtaacggtcggtcttatggccttggtagtgaacagaggtctcaggcgcctgcccgatactcccttcagtctgctaacgcctcaagtcttagttctggccaactgaagtccccatcccttagtcagtcccaggctagtcgagtcttgggacagagcagtagcaagccagccgcagccgccaccggaccccccccgggtaatacctcttcaacccagaagtggaagatttgcacaatctgtaatgaattgtttccagaaaatgtatactcggtacactttgagaaagaacacaaagcagagaaagtgccggccgtcgccaactacattatgaaaattcataacttcactagtaagtgtctctactgcaatcggtatctgcccactgatacactcctcaatcatatgcttatccacgggctgtcttgcccatactgtcggtccaccttcaacgacgtggaaaagatggccgctcacatgcgcatggtgcacatcgacgaagagatgggacccaaaacggactccaccctaagctttgacctaactctacagcaggggtcccacactaatatccacctccttgttaccacttataatttgcgtgacgcaccagctgaaagcgtggcctaccacgcgcagaacaatcctccggtgcccccgaagccgcagccaaaagttcaggagaaagctgacatccctgtgaagtcctcccctcaggctgcagtgccctacaaaaaagatgtgggtaagaccttatgtcccctgtgcttttcaatcctaaaggggcctatcagcgatgcacttgcccatcatctgagagagagacatcaagtgattcaaacggtgcaccctgtggagaaaaagctcacttacaagtgcatccactgtctgggagtgtacacatctaatatgacagcgtctaccattaccctccatctggtgcactgccgcggcgtcggaaaaacacagaatggacaggacaaaactaatgctccctcaagactgaaccaaagcccttctttagccccggtaaaacgaacctacgagcagatggagttcccactgctgaaaaagcgcaagctcgatgatgatagtgactcccccagttttttcgaggagaagcccgaggaaccagttgtgctcgctctagacccaaagggtcacgaagatgattcttatgaggctcgtaaaagtttcctgacaaagtacttcaacaagcagccgtacccgacacggcgcgaaattgagaagctcgccgcttcgctgtggctctggaaaagtgatatcgctagccacttttctaataaacgaaagaagtgcgtaagagactgtgaaaagtacaagcctggggtgctcctggggttcaacatgaaagaacttaacaaagtgaaacacgagatggacttcgacgcagaatggttgttcgagaatcatgatgagaaagatagtcgtgtgaatgctagcaagacagctgataagaaactgaacctaggtaaggaagacgattcatcctccgattcattcgagaacctggaggaggagagcaacgagtccggaagcccttttgaccccgtgttcgaagtggagcctaagatatcaaacgacaaccccgaagaacatgtcctcaaggtaatacccgaagatgcttcagaatcagaagagaagttagaccaaaaggaggatggcagcaaatatgagactatccatttaactgaggaacccaccaaactgatgcataatgcttccgactccgaggtagaccaggacgatgtggtcgagtggaaagatggcgcaagtcctagcgaatcgggtccaggaagccaacaggtgtctgacttcgaggacaacacatgcgagatgaagcctgggacttggagtgacgagagcagccagtccgaggatgccaggagtagtaaacccgccgcaaagaagaaagctactatgcagggggatcgggagcagctgaagtggaaaaacagttcttacgggaaagtggaaggcttttggagtaaggatcagagccagtggaaaaatgcaagcgagaacgacgagaggttgtcaaacccacagatcgaatggcagaacagcaccatagatagcgaggacggggagcagtttgataatatgacggacggggtggctgagcctatgcatggatctctggccggcgtcaaattaagttcccagcaggca

SEQ ID NO: 321489 - DNA, 3306 bp, Artificial Sequence
  derived and/or modified sequence
atgttccaacttcccgtgaacaacctgggctccctgcggaaagcccggaaaactgtgaagaagatactttctgatatcggcctggagtactgtaaggagcatattgaggactttaaacaattcgaacccaacgatttctatttgaaaaatactacttgggaggatgttggactgtgggatccatcacttacaaagaatcaggactacagaacgaaaccgttctgctgctcggcatgtccgttctcatccaagtttttctccgcctacaagtcccattttcgcaacgtgcacagtgaagactttgagaacaggatcctccttaactgcccatattgcacattcaatgctgataagaagaccctggaaacacacataaagatctttcatgctcccaatgctagtgccccttcttctagcctctcaacattcaaggataagaataaaaatgacggactgaaaccaaaacaggctgactccgtggagcaagcagtgtactactgtaaaaaatgcacctatagagatccattgtacgaaatcgtgagaaaacatatttatcgggagcacttccagcatgtggcagccccctacatcgctaaggccggcgagaagtctctcaacggggcagttcctctgggctccaatgcccgcgaagaaagctccattcattgtaagcggtgcctattcatgcctaaaagttatgaggctctggtgcagcacgtgatagaggatcacgaacgaatagggtaccaagttactgctatgataggacacactaatgtggtcgttccacgcagcaagcctctcatgttgatcgctccaaaaccccaggacaaaaaaagcatgggcctccccccaaggatcgggtccctggcttccgggaacgtacgttctctgccctcccagcagatggtaaatcggctgtctatccccaaaccaaacttaaacagtacgggcgtgaatatgatgagttcagttcatcttcagcagaacaactacggcgttaagtcggtcggccaaggatattccgtgggccagagcatgcggcttggcctcggcggcaatgcaccagtttccattcctcaacagtctcaatctgttaaacagttactgccctccggcaacggaaggtcctacggactgggcagtgaacagaggtcacaggctcccgccaggtattccctgcaaagcgctaacgcttccagcttatcatcaggtcagctgaaatctccctccctctctcaatcccaggcgtcccgcgtgctcggacagagctcttccaagcctgctgcagccgccaccggtcctcccccggggaatactagttcaactcagaagtggaaaatctgtacgatatgcaatgaactttttcccgaaaacgtctactcagtgcactttgagaaagagcataaagctgaaaaggtgccggctgttgcaaattacatcatgaagattcacaactttacctctaagtgcctttattgtaataggtaccttccaacagatacgttgctgaatcacatgctgatccacgggctctcttgcccttactgtagatctacattcaacgacgtggagaagatggctgctcacatgcggatggtgcacatcgatgaggaaatgggacccaaaaccgattcgacattatcattcgatcttaccctacagcagggtagccacaccaacattcacctgttggtaacgacgtataacctgcgcgacgctccagccgaaagcgtggcttaccacgctcagaataacccgccagtaccacccaagccccaaccaaaagtccaggagaaagcagatatccctgtgaagtccagccctcaagccgcagttccctataaaaaagatgtggggaaaaccctgtgcccactgtgttttagtattctcaagggccctatctccgatgccctggcacaccatctccgggagaggcatcaagtcatccaaaccgtgcatccagttgagaagaagttgacgtataaatgcatccactgtttgggagtatatacatccaatatgacagcaagtacaattaccctccatttagttcactgtcggggtgttggaaaaacgcagaacgggcaggataagacgaacgctccgtctcgcctgaatcagtctccaagtctagcgcccgtgaagcggacttatgaacagatggagtttcctctcctgaagaagcgaaagctcgacgatgacagcgacagcccctccttttttgaagagaagcccgaggaaccagtagttctggcactcgaccccaagggtcacgaggacgatagctacgaagccagaaagtctttcttaaccaagtactttaacaaacagccataccccaccagaagggagattgagaagctggccgcgtctctgtggctttggaagagcgacatcgcttcccatttttcgaacaagcggaaaaaatgtgtccgcgactgtgagaagtacaagcccggcgtgctgctcggcttcaatatgaaagagctgaataaagttaaacacgaaatggacttcgacgcagaatggttgttcgaaaatcatgatgagaaagactcgagagttaatgccagtaagacagcagacaagaaactaaacctaggtaaggaagacgacagtagtagtgactcatttgagaacctcgaagaggagagcaacgaaagtggtagcccctttgacccagtattcgaagtcgaaccaaaaatctccaatgataaccctgaagagcacgtcttgaaggtcatccctgaggacgcttcggagtccgaagagaaactcgaccagaaggaggatggaagcaagtacgaaactatccatctcacagaggaacctaccaaactcatgcacaatgccagcgactccgaggtggaccaggacgacgtggtcgaatggaaggacggggcctccccatccgagagtggacctgggagtcagcaagtctccgacttcgaggacaatacctgcgagatgaaacccggcacttggagcgatgaatcttctcagtccgaagacgcaaggtcaagcaagcctgctgcgaaaaagaaggctaccatgcagggtgaccgggaacagctgaaatggaagaactcatcttatggaaaggtcgaggggttttggtccaaggatcagtcgcaatggaagaatgccagcgagaatgacgaacgtctgtcaaatcctcaaatagaatggcagaacagtaccatcgattcggaagatggggagcaattcgataacatgactgacggagtagcagaaccgatgcacggatcactagccggtgtaaagctttcctcccagcaggca

SEQ ID NO: 321490 - DNA, 3306 bp, Artificial Sequence
  derived and/or modified sequence
atgttccaattgcccgtgaacaatctgggcagtttgcgcaaggctcggaagaccgtgaaaaagattctctctgatataggactggagtactgtaaggagcatatcgaagattttaagcaatttgagcccaatgatttttacctgaagaacacaacgtgggaggacgttgggctgtgggacccgtccttgacaaaaaatcaggactacaggactaagcccttctgctgcagtgcatgtcctttcagttctaaatttttcagtgcttataaatcacactttagaaacgtccacagtgaggatttcgaaaacagaattctgttgaactgtccctattgtacgttcaacgccgataaaaagaccttggagacacatattaaaatctttcacgcgcctaacgcaagcgccccttcaagtagcctctccaccttcaaagataaaaataagaacgatggcttgaagccaaaacaggcggattccgtggagcaagccgtgtactattgtaagaagtgcacctacagggatcccctctatgagatcgtgaggaaacacatttacagagaacattttcaacacgtggccgcaccttatatcgccaaagccggtgagaagagcttgaacggcgccgtccctctgggctctaacgcccgggaggagagcagcatacactgcaaaaggtgcttgtttatgccaaaaagttacgaagcgctggtgcagcacgtcatagaggaccatgagcggataggatatcaggtgactgccatgatcggacacactaatgtcgtggttcccaggtctaagccactcatgcttatcgctccgaaaccacaggataaaaaatcaatgggtctcccccctcgaatcgggagtctggcttccggcaatgttaggtcactgccctcacagcagatggtaaatcggttgtccatccccaaaccaaacctgaacagtacaggggtcaacatgatgagctcagtgcatcttcagcaaaacaattacggcgtgaagagtgttggccaaggatactccgttgggcagtccatgcgcctcggcctcggcgggaacgccccagtttccatcccacagcagtcccaatctgtgaaacagctgcttccttccggcaatggtagatcatacggccttgggtccgagcagaggtcccaggcccccgcacggtatagtctgcaaagcgccaatgccagcagcttgtcttcaggccagcttaagagcccttccctgagccaatcccaggccagccgagtcctcgggcagtcctcttcaaagccggccgccgcagcgactggccccccccctggaaatacctctagcactcagaagtggaagatctgcaccatctgtaacgaactctttcctgagaacgtttacagtgtacatttcgaaaaggagcacaaagctgaaaaagttccggccgtagccaactacattatgaaaattcacaattttacaagtaaatgcctctattgcaaccgctacctccccaccgatacactccttaatcacatgctgattcacggactgagctgcccctactgtcgatctacattcaacgatgtcgaaaagatggccgcgcacatgagaatggtgcacatcgatgaagagatgggtcctaaaaccgactctaccctgtcctttgatctgaccctgcagcaggggagccacacgaacatccatctcctggtgacgacgtacaatcttagagacgccccagcagaaagcgtagcctatcatgcccaaaataacccccccgtcccaccgaaaccacagccaaaagtgcaggagaaagcggatataccagtgaagtccagcccacaggccgcagttccttataaaaaggatgttggaaagacgctctgtcccctgtgcttctccatcctgaagggccccatcagtgacgcccttgcgcatcacctgagggagagacaccaggttatccaaaccgtgcatccggtggagaaaaaattgacctacaaatgcattcactgtctgggcgtttacacaagcaatatgactgcaagcaccattaccttgcatcttgtgcactgcagaggtgttggaaagacccagaacggtcaggataaaactaacgcccccagccggctgaaccagtcaccctcactggctcctgtaaagcgcacctatgagcagatggagtttccgttgctgaagaagcgaaaattggatgacgattccgactcaccttccttctttgaggagaagcccgaagaaccggtagtgctcgctctggacccaaaagggcacgaggacgacagttacgaggcccgaaaaagttttctgactaagtatttcaataagcagccgtatccgacacggcgcgagatcgaaaagctggcagccagtctgtggctttggaaatccgacattgcctcccactttagtaacaaacggaagaagtgtgtgcgagactgcgagaaatacaaacctggggtgctcctcggattcaacatgaaggagctcaacaaggtgaagcacgagatggactttgacgccgaatggctgtttgagaaccacgacgagaaagacagccgggtgaacgcgtctaagaccgcggataagaaactgaacctggggaaagaggacgactcaagcagtgacagttttgagaatctggaggaggaaagtaatgaatcaggatcccccttcgacccagtgtttgaggtggaaccaaaaatttcaaacgacaaccctgaggagcacgtgctgaaagtgatcccagaggatgcctctgaaagcgaggaaaagttggaccagaaagaagacgggtccaagtacgaaactattcacctgacagaggaaccaacgaaactcatgcataatgcttccgactctgaggtggatcaggatgacgtggtggagtggaaagacggcgcaagccccagcgagtccggcccgggcagtcagcaggtctccgacttcgaggataatacttgcgaaatgaaaccgggcacttggtccgatgagtcttctcaatcagaggacgccagatcctcaaaaccagccgctaaaaaaaaggccacaatgcagggtgatagagagcaattgaagtggaagaacagcagttatggaaaagtggagggtttttggtccaaggaccagtcccagtggaagaatgcatccgagaacgatgaacgcctctccaacccccagattgagtggcagaactccacaatagatagtgaggatggtgaacagtttgacaatatgaccgacggcgtcgccgaaccaatgcacgggtccctggctggtgtaaaactctctagccagcaggct

SEQ ID NO: 321491 - RNA, 3455 nt, Artificial Sequence
  derived and/or modified sequence
gggaaauaagagagaaaagaagaguaagaagaaauauaagagccaccauguuccaacugccggugaacaaucucgggucauugcgcaaagcccgcaagacugucaagaaaauccugucagacaucgggcucgaguacuguaaggaacauauugaggauuucaaacaauucgaaccuaacgacuucuaccucaagaauacgacuugggaggacguagggcugugggaucccucacucacaaagaaucaggauuaccgcacaaagccauuuugcuguucagccugcccauuuucgagcaaauucuuuucagcguacaagucacacuuuaggaacguccacuccgaagauuuugagaaucgcauucuccuuaacugcccuuauugcacguuuaacgcagacaagaaaacucucgaaacacacauuaagaucuuccacgcgccgaaugccucagcgccuagcucgucccucucaaccuuuaaagacaagaauaagaacgacgguuugaagccgaaacaggcagacucggucgagcaggcagucuacuacuguaagaagugcacguaucgggacccgcuguaugaaaucgugcggaagcauaucuaccgcgagcacuuucaacacguggcagcgcccuauauugcgaaggcgggagaaaagagccugaacggagccgugccgcucggaucaaacgccagggaggagagcagcauccacugcaaaagauguuuguucaugcccaaaucguaugaggcacucgugcagcauguaaucgaggaccacgagaggauuggguaccaagucacugcgaugaucggacauaccaacgucguggugccuagaagcaaaccuuugaugcucaucgcgccgaagccccaagauaagaagucaaugggauugccuccccgaauuggcagccucgcaucggggaaugucagaucauugcccucacagcagauggugaaucggcucucaaucccgaagccuaacuugaacagcacuggagucaacaugauguccucgguacacuugcagcaaaacaauuacggagugaagagcgugggacaagguuacucggugggacagucgaugcgccuugggcugggagggaacgcaccgguauccauuccccagcaaucacagucagugaagcagcuucucccaucagguaacgguagaucauauggacuugguagcgaacagagaucacaggcacccgcacgauauucgcuucagagcgcuaaugccucaucccucucgucgggacaguugaaguccccaucguugucacagucacaggcgagcaggguauugggucaaucguccucgaaaccggccgcggcggcgacggggccaccgccugguaacacguccagcacacagaaauggaagauuugcaccauuugcaaugagcuuuuucccgagaaugucuacucagugcacuucgaaaaagaacacaaggccgaaaagguaccggccguggcaaacuauaucaugaagauccauaacuucacgucaaagugucucuacugcaaccgguaccuccccacggauacccucuugaaucauaugcucauccacgggcuuuccugucccuauugccgcucaacguucaacgacguagagaagauggccgcucauaugcgcaugguacacauugaugaggagauggguccuaagacagauucgacgcuguccuucgacuugacuuugcagcagggaucgcauacaaacauucaucugcucgucaccacuuacaacuugcgggaugcuccggccgagagcguggcguaccacgcgcagaauaacccuccugucccgcccaagccgcagccuaaaguccaagagaaggcggacauuccugucaaaucgucgccccaggcggcagugccguacaagaaagacgugggaaaaacauuguguccgcuguguuucucaauccuuaagggaccgaucuccgaugcacuggcccaccacuugagagaaaggcaucaaguaauccagacaguccaucccguggagaagaaguugacguauaagugcauccauugcuugggaguguauaccucgaacaugacggcgucgacgaucacacugcaucuugugcacugcagaggcgucgguaaaacacagaacggacaggacaaaacuaacgcgcccucacgccucaaccagagccccucgcuggcaccugucaagaggacauaugagcaaauggaauuuccucuuuugaagaagagaaaauuggaugaugauucggacucgcccagcuucuuugaagaaaagccggaagagccgguggucuuggcgcuugacccgaaggggcacgaagaugacagcuacgaggcgaggaaaucauuucucaccaaauacuucaacaaacaaccauauccgacgaggagagagauugaaaaacuggcugccagccucuggcuuuggaagagcgacaucgcgagccacuucuccaauaagcgaaagaaaugugugcgggacugugagaaguauaagcccggaguacugcugggguucaauaugaaggagcuuaacaaaguaaagcaugagauggauuucgaugcggaauggcuuuuugagaaccacgaugaaaaagauucgcgcgugaaugcuucgaaaacagcagacaaaaagcuuaaucuugggaaagaagaugauuccucauccgacucguuugaaaacuuggaagaggaaucgaacgaaagcgggagccccuuugaccccguguuugaagucgagcccaagaucucaaaugauaaucccgaggaacauguauugaaggugauucccgaggacgccucggagucagaggagaagcucgaucagaaggaggacggcuccaaauacgaaacgauccaccuuacggaggagccgacgaaacugaugcacaacgccuccgauuccgaggucgaccaggaugacgucgucgaguggaaggacggugccagccccagcgagucaggaccaggaucacaacaggugucggauuuugaagauaacacgugugagaugaagcccggaacguggucagaugaauccucgcaguccgaagaugcgcggucaagcaaaccggcagcaaagaagaaggccacuaugcagggagauagagagcaacuuaaguggaaaaacagcucauauggaaagguggaaggguucugguccaaggaucagucgcaguggaagaacgcaucagagaaugacgagcgguugucgaauccccaaauugaguggcagaauuccacgaucgacucggaggacggggaacaguucgacaauaugacggauggaguggcggaaccuaugcaugggucgcuggccggagucaaacuuucaucccagcaggcgugauaauaggcugccuucugcggggcuugccuucuggccaugcccuucuucucucccuugcaccuguaccucuuggucuuugaauaaagccugaguaggaag

SEQ ID NO: 321492 - RNA, 3309 nt, Artificial Sequence
  derived and/or modified sequence
auguuccagcuuccugucaauaacuugggcagcuuacgaaaggcccggaaaacuguaaagaaaauucucucagauauuggucuagaauacuguaaggagcacauugaggacuuuaagcaguuugaaccaaaugauuuuuacuugaagaacacaacuugggaggacgucgguuugugggacccaagucugacaaagaaucaagauuacagaaccaaaccauuuugcuguucagccugccccuuuucuucaaaguuuuucagcgccuauaagagucacuuccggaacguccacagugaggauuucgagaaccgcaucuuacuuaauugccccuauuguacuuuuaacgcagauaagaaaacauuagagacgcacaucaagauauuucaugcuccgaacgccucagccccuucaagcagcuuaucaacauucaaggauaagaacaagaaugacggccuuaaacccaagcaagcagacaguguggagcaagcaguguauuauugcaaaaaguguacauaucgggacccucuuuaugagaucgugcgaaaacacaucuacagagaacacuuccaacacguggccgcucccuacaucgcaaaagcuggcgaaaaaucacugaauggggcugugccucugggguccaacgcgcgcgaagaaagcaguauucauuguaaaaggugccuguuuaugccuaaaucuuacgaagcccuggugcagcacguaauugaagaccaugaaaggaucggcuaccaggugacugccaugauaggucauacuaaugucguggucccuaggagcaaaccauuaaugcugaucgccccuaagccacaggacaagaaaucgauggggcugcccccucguaucgggagccuggccucaggaaauguuagaucccugcccucacaacagauggugaacaggcuuuccaucccuaaaccgaacuuaaacuccacaggggugaacaugaugaguuccguucacuugcaacagaacaauuauggagucaaauccgugggccagggguauucagugggacagucgaugaggcugggacugggugggaacgcuccugucucaauaccccaacagucucaauccgucaagcaauuguugccauccgguaacggcaggagcuauggccucgggagugagcaaagaagucaagcgccugcccguuacucccugcaaucugccaaugcaucaucccuuucuagcggacagcugaaaucgcccucccuuagccagucccaggcaagccgaguguuaggacagagcuccaguaagcccgccgcugccgcuaccgguccaccaccaggaaacacuaguuccacgcagaaauggaagaucugcacaaucugcaacgagcuauuuccagagaacguguacagugugcacuuugaaaaagagcacaaagccgagaaagucccagccguggcuaacuacauuaugaaaauucacaauuuuacuaguaaguguuuguacuguaauagguauuugcccacugacacucuacuaaaucauaugcuaauacacggacuguccugcccuuauugccgcuccaccuucaacgacgucgaaaagauggcugcccacaugcguaugguccacauugacgaggagauggggccaaaaacagacagcacucuuucauuugaccuuacgcugcagcagggcucccacacaaauauacaccuguuagucacaacauacaaccugcgggacgcaccugccgaauccguagcuuaccacgcucaaaauaaucccccggucccccccaagccacaaccuaaagugcaggagaaggcagacaucccagugaagucuagcccccaggcugcaguacccuacaagaaggaugugggaaagacguugugcccucugugcuucucgauccuaaaggguccaauuuccgaugcuuuggcucaccaccugcgcgaacgccaucaagugauccaaaccguccauccaguugagaaaaaguugacuuauaaauguauucacugucugggcgucuacaccuccaauaugaccgcuagcaccaucacccuccaucuggugcacugcagaggagugggcaaaacucagaacggacaggacaaaaccaacgcaccaagccgccucaaucaguccccaucucuggcacccguaaaacgaaccuaugagcaaauggaauuuccccuucuuaaaaaacgcaagcucgacgacgauagugauucccccagcuucuuugaggaaaagccagaggagccggucguguuggcccuggacccuaaaggccacgaggacgauucuuacgaagccagaaagucguuccuuacuaaguacuuuaauaaacagcccuauccuacccggagggaaauagaaaagcucgcugccucucucugguuguggaaaucagacauugcuucucauuucagcaauaaaaggaaaaaaugcguccgugauugugagaaauacaagccaggggugcugcugggauucaauaugaaagaacuuaacaaagugaaacacgaaauggacuucgacgccgaauggcuguuugagaaccacgaugaaaaggauagccgcgucaaugcaucaaaaacugcagacaaaaagcucaaucuggguaaagaggaugauagcagcagcgauaguuucgagaaucuggaggaagaauccaacgaaagcgguagcccuuucgaccccguuuucgaaguggaaccgaagaucagcaacgauaauccugaagaacacgugcugaaggugauuccagaagacgcuucugaguccgaggaaaagcucgaccagaaggaagaugggucuaaauaugaaacuauacaccugacggaggaacccacuaagcucaugcacaaugcgucagauucagagguggaccaggacgaugugguugaguggaaggacggcgccucccccucugagagcgguccaggcucccaacaggugagcgauuucgaggacaauacgugugagaugaaaccaggcacguggagugaugaauccagccagagcgaggaugccagaagcaguaagccugcagccaaaaaaaaagccaccaugcagggcgauagagagcaguuaaaauggaagaacagcucuuauggaaaagucgaaggcuucuggucuaaagaccagagccaauggaagaacgccagugaaaacgaugaaagacuguccaacccacaaaucgaguggcagaauagcaccauagacagugaagacggggaacaguuugacaauaugacagacggcguggcugagccaaugcauggcucccuggcaggcgugaaacugaguagucaacaggccuag

SEQ ID NO: 321493 - RNA, 3309 nt, Artificial Sequence
  derived and/or modified sequence
auguuccagcugcccgucaauaauuugggaagcuugaggaaagcacgcaaaaccguaaagaagauacucucugauaucggucucgaguauugcaaagagcacaucgaggacuuuaaacaguucgagccgaacgauuucuacuuaaagaauacaaccugggaggaugugggucugugggauccuagccugaccaaaaaucaagacuacaggacaaaaccauucuguugcagugcgugcccuuuuagcucuaaguuuuuuuccgcauauaaaucccacuucaggaauguccacucugaggacuucgaaaacaggaucuugcuaaauugucccuacugcaccuucaaugcagacaaaaagacgcuggagacacacaucaaaauuuuccacgcucccaaugccagcgccccuucaucuagccugaguacauucaaggacaagaacaaaaacgacggucuuaagcccaagcaggcugauucuguagagcaggcagucuauuacuguaagaagugcacauaccgcgacccauuauaugagauugugcgaaagcacaucuaccgugaacauuuccagcauguggccgccccauauauugcaaaggcuggagaaaaaagcuugaauggagcugugccguuaggauccaaugcgagagaagaguccaguauucacuguaagcgguguuuguuuaugcccaagaguuaugaggcccugguccagcacgugaucgaggaucaugagagaauuggcuaucaggugacugcuaugaucggccacacaaauguggucgugccccgcuccaagccuuugaugcuuauagcccccaaaccucaggauaaaaaaaguaugggucugccuccacggauagguucucuggcguccgguaaugugaggagucugcccagccagcagaugguaaaucgccucaguaucccgaaaccuaaccuaaacagcacgggaguuaacaugaugagcagugugcacuugcagcagaacaacuacggcgugaaaucagucggucagggcuauagugugggacaaaguaugagauuaggucuaggcggcaacgcgcccgugucuauaccucagcagucucagagugucaagcagcuucugcccagcggaaauggacgaaguuauggccuuggcucugagcaacggucacaggcuccagccagauacucccuccagucagccaaugcaagcagucuuaguuccggccaguugaagucuccuucccuaucucagucccaggccuccaggguguugggacaguccucauccaaaccagccgccgcagcgacagggcccccccccggaaauacuaguaguacucaaaaauggaaaaucugcacaaucugcaaugaacuguucccggagaaugucuacucuguucauuuugaaaaggaacauaaagcugaaaaagugccagcuguggccaauuauauuaugaaaauucauaacuuuacguccaagugucuuuauugcaacagguauuugccgacggacacccuauugaaccacaugcugauccauggauugaguugcccauauugccgguccacauuuaaugacguggaaaagauggcugcgcacaugcgcauggugcacauugaugaggaaaugggcccuaaaacggauuccacucugucauucgaccuuaccuugcagcaaggcucucacacuaauauucaccugcuggugaccacauacaaucugcgggaugccccugccgaguccgucgcuuaucacgcccagaacaauccuccugugccacccaaaccucagccuaaggugcaagaaaaggcugacauucccgugaaaaguagcccucaagcagccguacccuacaaaaaggaugugggcaaaacuuugugcccucucugcuuuuccauucucaagggcccuaucucagacgcgcuggcccaccaucuuagggaaagacaccaggucauucagacuguccauccagucgagaaaaaacuaacauacaagugcauucacugccucgguguauauacguccaacaugaccgccucuaccauaacucugcacuuggugcauugccgaggaguugggaaaacccagaauggccaggacaagaccaaugcccccucucgccugaaccaaucacccagucuugcccccgugaaacgaacuuacgagcagauggaauuccccuugcuuaagaagaggaagcuggaugaugacuccgauagcccuucuuuuuucgaagagaaaccugaggaacccguggugcuugcuuuagacccaaagggccacgaggacgauucguaugaagcacgcaagucuuuccuaacuaaauauuuuaacaagcaaccuuauccuacucggcgugaaaucgagaaauuagccgcuagucucuggcucuggaaguccgauaucgcuagucacuucucuaacaagcggaaaaagugugugcgggacugcgaaaaguacaaacccggcgugcugcugggguucaacaugaaagaacuaaacaaggucaagcaugaaauggacuuugacgcggaauggcuguuugaaaaucaugacgagaaagacucgagaguaaaugcuaguaagacagccgauaaaaaacugaaucucggaaaagaggaugauagcagcucagacagcuuugaaaauuuagaggaggaauccaaugaguccggguccccauucgauccaguguucgaaguggagcccaagaucuccaacgauaacccagaagaacacguguugaaaguuauaccggaagaugcuagcgagagugaggagaaacuggaccagaaagaagacggaucuaaguaugagacuauccaucucacugaagagccaacuaaauuaaugcauaacgccucugacagcgagguggaccaggaugauguugucgaauggaaggauggagcaucgccuucagagucagguccuggaagucaacaggucagcgauuuugaggauaacacaugcgaaaugaagccaggcacauggagcgacgagucaucucaguccgaggaugcccgcagcucaaagccugcagcuaagaaaaaagccaccaugcagggcgaucgggagcagcucaaguggaaaaacaguucguauggaaagguugaggguuucuggucuaaggaucagucucaauggaaaaaugccagugagaacgaugaaaggcucucaaauccccagauagaauggcaaaacucuaccauugacagcgaagacggcgagcaguucgacaauaugaccgacggaguugcagagcccaugcaugggucccucgccggugugaaauuaucuagccagcaggccuag

SEQ ID NO: 321494 - RNA, 3309 nt, Artificial Sequence
  derived and/or modified sequence
auguuccaacucccagugaauaaucucggaaguuuaagaaaagcgagaaaaacugugaagaagauucuguccgauauuggcuuggaguauugcaaagagcacauugaggacuuuaagcaguuugagccaaaugauuuuuauuugaaaaauaccacaugggaagacgugggccugugggauccuucccucacaaaaaaccaggacuaccgcaccaagccauucugcugcucagcguguccauucagcagcaaauuuuucucugcuuacaagucccauuuucgaaacguccauucagaggacuuugaaaacagaauacuacucaauugcccauacuguaccuuuaacgcagacaagaaaacucuggagacucacaucaaaaucuuucacgcgcccaaugccagcgcuccgucuagcucucuaucaacauuuaaggacaaaaauaagaaugacggacugaagccuaaacaggcggacucuguggaacaggcuguguauuacuguaaaaaaugcaccuaccgggauccucuguacgagauuguucgaaaacauauauaucgggagcauuuucagcacguggcggccccuuauauugcaaaagccggugaaaagucuuugaacggagccguaccguuggguagcaacgcccgcgaggaaucuuccauccacuguaaacgaugucuguucaugcccaaauccuacgaggccuuggugcaacauguuauugaagaucacgagaggaucggcuaccaggugacagcaaugauuggucauacuaaugugguagugccccgcuccaagccucuuaugcucauugcuccuaaaccccaggacaagaaaaguaugggacugccuccccggauugguucacucgccucggggaacgugcggucucuuccaagccagcaaauggucaaccgcuugucaauuccgaaaccaaauuuaaauaguaccggcguuaacaugaugucuagcguucaccugcagcagaauaauuacggggugaaaucugugggucaaggcuacuccgugggucaaucgaugagguugggacugggcgguaacgcuccugucuccauuccucaacaaucccagucuguuaaacagcuguugccuucuggcaauggccgaucuuacggccuuggaucagagcagagaucccaggcgccagcccgauauucccugcaauccgccaacgcauccagucuuagcucugggcagcucaaaagucccucccuuagccagucgcaggcgagccgcguucucggccagaguuccuccaaaccugccgcggcugcaacaggucccccaccugggaacaccucguccacgcagaaauggaagauuuguacuaucugcaacgagcucuuucccgagaacguguacucaguccauuucgaaaaagaacauaaggccgagaaaguccccgccgucgccaacuacaucaugaaaauccacaauuuuacauccaaaugccuguauuguaaucguuaccuuccaaccgauacacuucucaaccacaugcuuauucacggacucuccugccccuacugcaggucgaccuucaacgacguggagaagauggcagcucauaugaggaugguucacaucgacgaagaaaugggccccaagacagauucaaccuuaagcuucgaccuuacccuccagcagggcagccauaccaacauccaucuguuagugaccaccuauaaccuccgcgacgccccagcugagagcguggcauaccacgcgcagaauaacccaccugugcccccgaagccccaaccuaaaguacaggaaaaggcugacaucccgguaaaguccucgccccaagcagcgguucccuacaagaaggauguaggcaaaacacugugcccacucugcuucucaauucugaaggggcccauaucugaugcacucgcccaucaccugcgggaacggcaccagguuauacagacugugcacccuguggagaaaaaacugacuuauaaaugcauccacugucugggcguuuauacuuccaacaugaccgccucaaccaucacucuucaccucguccauugccgcggugugggcaagacccaaaacggucaggacaaaacaaaugccccaagcaggcucaaucagucuccaucacuagccccugugaagagaacauacgagcaaauggaauucccuuuauuaaaaaaaagaaagcuagaugaugacucagacuccccuagcuucuuugaagaaaagccagaggagccaguugugcuggcauuggacccaaagggacaugaagaugacucuuaugaagccagaaagaguuuucugacuaaguacuuuaacaagcagcccuacccgacaaggagagagauagaaaaacuggccgcaucgcucugguuguggaaaagugacauugcgucucauuucucaaacaagcguaagaaaugcguucgcgacugcgagaaauacaagcccggcgugcuccugggguuuaacaugaaggaacugaacaaagugaagcaugagauggauuucgacgcggaguggcuuuucgaaaaucacgacgagaaagauuccaggguuaacgcuucuaaaacagcagacaagaaacugaaccuagguaaagaagaugauucuuccuccgacuccuuugaaaaucucgaggaggaaaguaaugaauccggcucacccuucgauccuguguuugaaguugagccuaagauuagcaaugacaauccugaagagcacguccugaaagucauacccgaagacgccucggagagugaggaaaaacuggaccagaaagaagacgguagcaaguacgaaacgauccaccugacagaggagcccaccaaguuaaugcauaacgccucagacagcgagguggaucaagaugauguggucgaguggaaggacggagcgucaccgagugaaagcgggccugguagccagcaggucucggauuuugaagauaacacaugugagaugaaaccuggcaccuggucugaugagucaagucaaagcgaggacgcgcgguccagcaagccagcugcgaaaaaaaaggcuacgaugcagggagaccgcgagcaguugaaauggaaaaacucaucuuacgguaagguggagggcuuuuggagcaaggaccagucucaauggaaaaacgcauccgagaacgacgagaggcugaguaacccccagauugaguggcaaaacucuacuaucgauuccgaggauggcgaacaguuugauaacaugacagaugggguggcagagcccaugcacgggagccuugcgggggucaagcugucaagucagcaagccuag

SEQ ID NO: 321495 - RNA, 3309 nt, Artificial Sequence
  derived and/or modified sequence
auguuccaacugcccgucaacaauuuaggaucucugcgcaaagcaaggaagacggugaaaaagauucuuuccgacauuggacuugaguacuguaaagagcauauugaggacuucaagcaguuugagcccaacgauuuuuaccugaaaaacacuacuugggaagaugugggguugugggauccuucccucaccaagaaccaagauuaccggacaaaaccguucugcuguagcgcauguccuuuuucaucuaaauucuucagcgcauacaaaucccacuuccgcaauguccacucugaagauuucgagaauaggauucucuuaaacugccccuauugcaccuucaacgccgauaaaaaaacccucgaaacacauaucaaaaucuuucacgcgccuaaugcaucagccccauccucaagucucucaaccuucaaagacaagaacaaaaaugaugggcugaaaccaaaacaagccgacuccguggaacaagccguguauuauuguaagaaauguaccuauagggacccacuauacgagaucguucggaaacacaucuaccgcgaacauuuccaacacguugcagcucccuauaucgcuaaggccggcgagaagagucugaauggcgccgugcccuuaggcucuaaugcacgcgaggaguccuccauucacugcaagcggugucucuucaugcccaagucguacgaagcccugguucaacaugugauugaggaucacgagagaaucggguaccaagugacggccaugauuggacauacgaacguaguggugcccagaucuaaaccucugaugcugauugccccuaagccacaggauaaaaaaaguauggggcuaccaccgcguaucggaucccuggccagugggaacgugcggucccuucccucucagcagauggucaaucggcuuucaauucccaagccuaacuugaacagcacgggcguuaauaugaugagcaguguccaucuccagcagaauaauuacggggugaaaucuguuggccaaggauauucuguggggcagaguaugcgauuagggcucggugguaacgcaccugugucaaucccccagcagagccaguccgucaaacagcuacuuccauccgguaauggcaggucuuauggacucgggucugagcagcggucacaagcaccagcaagguacucccuucagucagccaaugccaguagccuaucuagcggacaguugaaaucaccaagccugucacagucccaggcuaguagaguauugggccaaucauccucaaaacccgccgcagcugcaacuggcccuccgccugggaacaccagcagcacccagaaauggaaaauuuguacuaucuguaacgaguuguucccagagaacguuuauagcgugcacuucgaaaaagaacacaaggcagagaaggugccagcuguggcuaacuauaucaugaaaauacauaauuuuaccagcaaaugccuguacuguaaccguuaccuaccaaccgacacauugcuuaaccauaugcugauacacggucucucauguccuuacuguaggagcaccuucaacgauguugaaaagauggccgcccacaugagaauggugcauaucgaugaagagaugggucccaagacggauagcacccuuaguuucgacuuaacccuccagcaagguucccauaccaacauccaccugcucgugacaacauauaaccugagagaugccccagcggaaucuguggcauaccacgcucagaacaaccccccugucccccccaaaccacaacccaaagugcaggagaaggcagauaucccuguaaaaucuaguccucaggcggcugugcccuauaaaaaggacguuggcaagacucuaugcccccuuugcuuuucuaucuugaaggguccuauuucagacgcccuggcacaucaucugcgcgaaaggcaccaggugauccagaccgugcacccaguggagaagaagcugaccuacaagugcauccacugucucggagucuacacguccaacaugacugccagcaccaucacauuacaucuagugcauugcaggggcgucggcaaaacccaaaacggucaggauaagacaaacgcuccaagccgucugaaccagaguccuagucuagcuccugugaaacggaccuaugagcaaauggaauucccucucuugaaaaagcgcaaacucgaugaugacucugauuccccuucauucuuugaagagaagccggaggagccuguggugcucgccuuggauccuaaaggccacgaggacgacucauacgaggcccgcaaaucauuccucaccaaauacuucaacaagcagcccuaccccacccgucgcgaaaucgagaagcucgccgcgucucuguggcucuggaagagugauaucgcuucucacuucuccaauaaaagaaagaaguguguacgcgauugugagaaauacaaaccggggguuuuacugggauuuaacaugaaggaacucaacaaagugaaacaugaaauggacuuugaugccgaguggcucuucgaaaaucacgacgagaaagauucccgggugaacgccucgaagaccgccgacaaaaaacugaaucucgggaaggaagaugauucgagcagugauuccuuugagaaccucgaggaggagagcaacgaaucaggguccccauuugaccccguuuuugagguggagcccaaaauuagcaacgacaaccccgaagagcauguacuuaaagugauucccgaggaugccagcgaauccgaagagaaacuggaucagaaggaggaugguaguaaguacgaaacuauucaucucaccgaggagccgacaaaauuaaugcauaacgccagugauucugaaguggaucaagaugaugugguugaauggaaggacggggcuagcccuucagagagcggccccgguucucagcaggugucagauuuugaagacaacacuugugaaaugaagcccggcaccuggagcgacgaaagcucgcagagugaagacgcuagaucuuccaaacccgcugcaaagaaaaaagccacgaugcagggcgaucgcgagcaacucaaguggaaaaacuccagcuacgggaaaguagaaggauucuggagcaaagaucagucacaguggaaaaaugcaucagagaaugaugaacggcucucaaauccccagaucgaguggcaaaauaguaccaucgacuccgaagacggugagcaauuugauaauaugaccgacggcguagccgagcccaugcauggaucacuggccgggguuaaacucucaagucagcaagccuag

SEQ ID NO: 321496 - RNA, 3309 nt, Artificial Sequence
  derived and/or modified sequence
auguuccaacugccagucaauaaccuuggaucccuccguaaggcgagaaagaccgugaagaaaauucugucugauauuggacucgaauacuguaaagaacacaucgaggacuucaagcaauuugaaccaaaugauuuuuaccuaaaaaacacaaccugggaagacgugggauuaugggacccaagcuugacuaaaaaucaagauuaucggacuaagcccuuuuguugcagcgcaugccccuucucauccaaguucuuuagcgcuuauaaaucacacuucagaaauguccauucagaggauuucgaaaaucgcauccuccuuaacugucccuacugcacauucaacgccgauaaaaaaacccuggaaacucauauuaaaaucuuccacgcuccaaaugccucugcucccucuaguagccuguccacuuuuaaagauaagaauaagaaugauggauugaaaccaaagcaggccgacuccguagaacaggcuguguacuacuguaaaaagugcaccuacagagaccccuuguacgaaauuguuagaaagcacaucuacagagagcacuuucagcauguggccgcaccuuauaucgcuaaagcuggagaaaagucauuaaauggugccgugccuuuggggagcaacgccagagaagaguccuccauucacuguaagcgaugucuguuuaugccuaaguccuacgaagcccuuguucagcacguuauugaggaccaugaacggauuggauaccaggugaccgcuaugaucgggcauacaaacguggugguuccacggucaaagccucugaugcuaauagcuccgaagccucaggacaagaaaucuaugggucucccuccccgcauaggaagucuggccaguggaaauguuaggucccuuccuucgcagcaaaugguaaaucgacugucuauuccaaaacccaaccucaauucuacaggaguaaacaugaugucuuccgugcaccugcaacagaacaauuauggaguaaagagcgucgggcagggauacucaguuggucaaaguaugcgccucggccucgggggaaaugcaccugucagcauuccucagcaaucccaaucagugaagcaacucuuacccagcgggaacggcaggagcuacggucuagggucugaacagagaagucaagcaccagcccgcuacucucuccagucugccaaugcuuccucacuuucaagcggucaacuaaaaagucccucucugucucaaucucaggccucaagaguauuaggccagucuuccucuaaaccugcugcugccgcaacuggacccccccccggcaacaccaguucuacccagaaguggaagauuuguacaauuuguaacgaacuuuucccagaaaauguauacucuguacauuuugaaaaggagcacaaagcugagaagguuccugcugucgcaaacuauaucaugaagauucacaauuuuacuucuaaaugccuuuacuguaaccgauauuuacccacggacacucuacuaaaucauaugcuaauacacggacuguccugcccuuauugccgcuccaccuucaacgacgucgaaaagauggcugcccacaugcguaugguccacauugacgaggagauggggccaaaaacagacagcacucuuucauuugaccuuacgcugcagcagggcucccacacaaauauacaccuguuagucacaacauacaaccugcgggacgcaccugccgaauccguagcuuaccacgcucaaaauaaucccccggucccccccaagccacaaccuaaagugcaggagaaggcugacaucccagucaagagcucaccacaggcagccguuccauacaaaaaggauguggguaagacgcuguguccucugugcuucagcauccucaaggguccaauuagcgaugcccuagcccaccacuuacgugagagacaccaggucauccaaaccguucaccccguggagaagaaacucaccuacaagugcauucacugccuaggcgucuacacaucuaauaugaccgcuucgaccaucacacuucaucucguccauugcagaggugugggcaaaacucaaaacggacaagacaagacgaaugccccaucccggcucaaccagaguccuagccucgcaccugucaaaagaacguacgagcagauggaauuuccccuuuuaaagaagcguaaacucgacgaugauagcgacagcccuaguuuuuuugaagaaaagccugaggaacccgucgugcuggcauuagaucccaaaggucaugaagaugauucauaugaggcccggaagucuuuucuuacaaaguacuuuaauaaacagccguauccuacacgccgcgaaauugaaaaacuugccgccucacucuggcuguggaagagcgacauugcuucccacuucagcaauaagagaaaaaaguguguuagggauugugaaaaauacaaaccaggcgugcuguuaggcuucaacaugaaggaacugaauaaagugaaacacgaaauggacuucgacgcugaauggcuguucgaaaaccaugaugaaaaagauucucgagugaacgcguccaagaccgccgauaagaaacuaaaccuggggaaggaggacgacucaucuucagacaguuuugagaaccuagaggaagaaucuaacgagagcggcucacccuuugauccaguguuugaaguugaaccuaaaauuagcaacgauaaccccgaggagcauguguugaaggugaucccugaggacgcgucugaaagcgaagagaaacuggaucagaaagaggacggaucuaaauacgagacuauucaucugaccgaggaaccaacaaaacugaugcacaacgcuagcgauagcgaaguugaucaagaugaugucguugaguggaaggacggagcaucccccagugaauccgggcccggcagccagcagguuucugacuuugaggauaauacaugcgagaugaagccuggcacauggagcgaugagagcucccagucagaggacgcuaggagcuccaagcccgcugccaaaaaaaaggcuacaaugcagggggaucgagaacaacugaaguggaaaaacucaaguuacggcaagguggaaggauucuggucaaaagaccaaucucaguggaaaaaugcuucugaaaaugaugagcggcugucgaauccccaaaucgaguggcagaauucaacaauagacuccgaagauggcgaacaguucgauaauaugacagacggugucgcggagccaaugcauggaucacuggcuggaguuaaacuuucaucccaacaggcguag

SEQ ID NO: 321497 - RNA, 3309 nt, Artificial Sequence
  derived and/or modified sequence
auguuccaguuacccguuaauaaucugggaagucugcguaaagcgcggaaaaccgucaaaaaaauccucuccgauauuggucuggaauacuguaaggaacauaucgaggauuuuaaacaauucgaaccuaacgauuuuuauuugaagaacaccacaugggaagacgucggccugugggaccccucccucacgaaaaaucaggauuaccgaacuaaaccauuuuguugcucagcaugcccuuuuagcucuaaauucuucuccgccuacaagagucacuuucgaaacguccacuccgaagacuucgagaacaggauccuccugaacuguccauacuguaccuuuaacgccgauaagaagacucuggagacucacauuaagaucuuccaugccccaaaugcgagcgcgccguccucaagccugagcacuuuuaaagacaaaaacaaaaacgacggacugaagccuaaacaagccgacucuguggaacaggcagucuacuauugcaaaaaguguaccuacagagauccacuauaugagauugugcguaaacauauauacagagaacacuuccagcauguugccgcacccuacauugccaaagccggcgagaagagucugaauggcgccgucccgcugggcagcaacgccagagaagaaucuagcauucauugcaaaagguguuuguucaugccaaaaagcuacgaggcuuugguccagcaugucaucgaagaccaugagcgaauaggguaucaaguaaccgccaugaucggacacacaaauguggugguuccccguuccaaaccccuaaugcucauugcccccaaaccucaagauaagaaguccaugggccuucccccccgcaucgguucauuagccagcgguaauguaaggucccuucccucccagcaaauggucaaucgacuguccauccccaaacccaaccugaauagcacaggggugaauaugauguccucagugcaucuccaacagaauaauuacggaguaaagucuguggggcagggauacuccguuggucaauccaugagacucggacugggcgguaacgcuccggucucaauuccccagcagucacaaucaguuaagcagcuuuugccaucuggcaacggaaggucguacggacugggaagcgaacaacgaagucaagcgcccgcucguuauagccuccaauccgcgaacgcuagcaguuuaucuaguggacaacugaaaucuccuagucugagucaaucgcaggccucccguguccugggccaauccucuucaaaacccgcugccgccgccaccggcccuccucccgggaauacuucaagcacacagaaauggaagaucugcacuauuuguaacgagcuguuuccagagaaugucuacuccguccacuucgaaaaagaacauaaggcugaaaaggucccugccguagccaacuauaucaugaagauucacaauuucacgagcaaaugccuauacuguaaucgcuaucuaccuaccgacaccuuacuuaaccacaugcugauccauggccuguccuguccauauugucgcucuaccuuuaacgacguggagaaaauggcagcgcauaugcguaugguucauauagaugaagagaugggcccuaaaacggacucaacgcuuuccuuugacuuaacacuucagcagggaucccacacaaacauccaucugcuugugacaacuuauaaucuccgcgaugcaccugccgagagugucgcuuaccacgcucaaaauaacccaccaguacccccuaaaccacagccaaaagugcaggagaaagcugauauuccugugaaaucaagcccacaagcagcugugccuuacaagaaagauguugguaaaaccuugugcccgcuauguuuuucaauccuuaaaggccccauuucggacgcccuggcccaccaccugagagaacgccaccagguuauacagacaguccauccuguggagaaaaagcugaccuacaaaugcauucauugccucgguguguauacuucgaacaugacagccaguaccaucaccuugcauuugguccacugcagaggcgugggaaagacccagaacggccaagacaagacaaaugcccccucucgccugaaccaaucacccagucuugcccccgugaaacgaacuuacgagcagauggaauuccccuugcuuaagaagaggaagcuggaugaugacuccgauagcccuucuuuuuucgaagagaaaccugaggaacccguggugcuugcuuuagacccaaagggccacgaggacgauucguaugaagcacgcaagucuuuccuaacuaaauauuuuaacaagcaaccuuauccuacucggcgugaaaucgagaaauuagccgcuagucucuggcucuggaaguccgauaucgccagucacuucagcaacaagcggaagaagugcguucgggacugcgaaaaauauaagcccgguguacuccuuggauuuaacaugaaagaacuuaacaaaguaaaacacgagauggacuuugaugcugaauggcuguucgagaaucacgaugaaaaagauaguagaguaaaugcuagcaagaccgcagauaaaaaguuaaaucuaggaaaagaggaugauucuaguucugacucuuuugaaaaccucgaggaggaauccaaugaaagcgguagcccauucgacccaguguuugagguagagcccaagaucuccaacgauaacccagaagaacacguguugaaaguuauaccggaagaugcuagcgagagugaggagaaacuggaccagaaagaagacggaucuaaguaugagacuauccaucucacugaagagccaacuaaauuaaugcauaacgccucugacagcgagguggaccaggaugauguugucgaauggaaggauggagcaucgccuucagagucagguccuggaagucaacaggucagcgauuuugaggauaacacaugcgaaaugaagccaggcacauggagcgacgagucaagccaaagcgaggacgcacgcagcagcaaaccagcagcuaaaaaaaaggcaacaaugcaaggagaccgagagcagcugaaguggaaaaauagcagcuaugguaaggucgagggcuuuuggaguaaggaucagucacaguggaagaaugccuccgaaaacgaugagcgauuguccaacccacagaucgaauggcaaaacagcacuauagauucugaggacggugaacaguuugauaauaugacagauggaguugcugagccaaugcauggcagccuggccggagucaaacugagcagccagcaggccuag

SEQ ID NO: 321498 - RNA, 3309 nt, Artificial Sequence
  derived and/or modified sequence
auguuccagcucccuguaaacaauuugggaagccuccggaaagccagaaaaaccgugaaaaaaauuuuaagugacauaggucuggaauauuguaaagaacacauagaagauuucaaacaauuugaaccaaacgauuuuuaccuuaaaaacacaacaugggaagacgucggauugugggauccuucucugaccaaaaaucaagacuaucggaccaaaccuuucugcuguucagccuguccuuucagcagcaaguucuuuagcgcguauaagucccauuucagaaacgugcacagcgaggauuucgagaacagaauuuuacucaacugcccauacuguacauucaacgcggacaagaagacacuggaaacgcacaucaaaauuuuccacgcccccaacgccucagcgccuucaucaucacuuucgaccuuuaaggacaaaaauaaaaaugauggacucaagccuaaacaggccgacucugucgagcaagccguuuauuacuguaagaagugcacguaccgcgacccuuuauacgagaucguccgaaaacauaucuaccgagaacacuuucaacacgucgcagccccuuacauugcuaaggcgggggaaaaaucgcugaauggagccgugcccuuagguaguaacgcaagagaggaauccagcauucauugcaaacggugucucuucaugcccaaguccuacgaggcuuuaguucagcauguaaucgaagaccaugagcgcauaggcuaccaggugaccgccaugauagggcauacuaacgucguugugcccagaagcaaaccccucaugcuaauugccccuaaaccacaagacaagaaaucaaugggacuuccaccaagaaucggcucacuugccagcgggaacguuagaagccugccuagccagcagauggugaaccgccucagcauccccaaaccgaauuugaauagcaccggaguaaauaugaugucaagcguccaucugcagcagaacaacuauggugugaaguccgugggccaaggauauucugugggacagagcaugcgguuggggcuuggcggaaaugccccuguaagcaucccucagcaaagucagagcguaaagcaacuccuuccauccggcaacggcagauccuauggcuugggcagugagcaaaggucccaggcgccagccagauacagucuccagucagccaaugcuucgagucuuuccucaggacaacuaaaaucacccagccugucccaaucacaagccagucgggucuuaggucagucuaguucaaagcccgccgccgcugcuaccggucccccccccgguaacacuuccuccacccagaaauggaagauuuguacaaucugcaacgagcuguuccccgagaacguguauaguguucacuucgagaaagaacacaaggccgaaaaggugccugcaguagcuaacuacaucaugaagauucacaacuucaccagcaagugccuguacuguaaccgcuaccuuccuacagauacccuacucaaucauauguugauccacgggcugucaugucccuacugccgcuccacuuuuaacgaugucgagaaaauggcagcacauaugcggaugguucauauugaugaggaaaugggcccgaagaccgauuccacucucaguuuugacuugacgcuccaacaaggaucccacaccaauauucaccucuuaguaacuacguauaaccuaagggaugcaccagcagagucaguggcuuaccacgcccagaacaaccccccugugccacccaagccucagccaaaaguucaggagaaggcugauauuccaguuaaaaguagcccgcaggccgcggucccuuacaaaaaggauguagguaagacuuuauguccacuguguuucuccauucuaaaagggcccaucagcgaugcuuuagcucaccaccuacgcgaacgacaccaaguuauccagaccgugcaccccguggagaaaaaacugaccuauaagugcauccacugucugggaguuuauacauccaauaugacugccucgacuauuaccuuacaccuggugcauuguagagggguuggcaagacccaaaaugggcaagacaagacuaacgcacccagcagguuaaaucagucaccuucuuuggccccagugaaaagaacauaugagcagauggaguuuccuuugcucaagaagcgaaagcucgaugacgauagugacagccccucuuuuuucgaagaaaaaccagaagaacccguaguauuagcucuggauccuaaaggccaugaagacgauucuuacgaggcaaggaagaguuuccugacaaaauauuucaauaaacagccuuauccuaccagacgcgaaauagaaaaacuggccgcaucuuuguggcuuuggaaaucugacauugcaucccauuuuuccaacaagagaaagaaaugugucagggacugugagaaauacaagccuggcgugcugcuuggcuucaacaugaaggaacugaacaaagucaagcaugagauggauuuugacgccgaaugguuguuugaaaaccacgacgagaaggauaguagaguuaaugcuucuaaaacggccgacaaaaagcugaaucucggcaaggaggaugauaguaguagcgacaguuucgagaaccuagaagaggaaaguaacgaauccggcucgcccuucgauccuguguucgagguagagccuaagauuucuaaugacaacccugaagagcacgugcugaagguaauuccugaggaugcgucugagucagaagaaaaacucgaucaaaaagaagacgguucaaaguaugagacaauccaucugaccgaagagccaacuaaguuaaugcacaaugcuuccgauucugagguggaucaggaugacguugucgaauggaaggauggagcgucgccaagugaauccggcccgggcucccaacaagugagcgacuuugaagauaauacuugcgaaaugaaaccugguaccuggucggaugagagcucacaaagcgaggacgcacgcuccucuaagccagcugcuaaaaagaaagccacaaugcagggggauagggaacagcuuaaauggaagaacaguucauacgggaaggucgaggguuucuggagcaaagaccagagccaguggaagaaugcauccgaaaacgacgagagacugaguaauccacagauugaauggcagaauucaaccauugacuccgaagauggggaacaauucgauaauaugacagacggcguggccgagccgaugcacggguccuuggcgggugugaagcugagcagccagcaggccuag

SEQ ID NO: 321499 - RNA, 3309 nt, Artificial Sequence
  derived and/or modified sequence
auguuccagcuucccgugaauaaccuggguucccugcguaaggcgagaaaaacuguaaagaagauccugagugacauuggccuggaauauugcaaggagcauaucgaggacuucaagcaauucgaaccaaacgacuuuuaccugaaaaauacgaccugggaggacguugggcucugggaccccagucugacuaagaaucaagacuaucgcacuaaaccuuucugcuguuccgcaugccccuucucuagcaaauucuucuccgcauacaaaucacauuuucguaacguccacucugaagacuucgagaaccggauacugcugaacugcccuuauuguacuuuuaaugcugacaagaaaacccucgagacacacaucaagauuuuucacgcaccgaacgcuuccgcaccguccuccucacuuucaacuuuuaaagacaaaaacaagaacgauggccuaaaaccaaaacaagcugauaguguugagcaagcaguguacuacuguaagaaauguacguaccgcgauccucucuacgaaauuguuaggaaacacaucuaccgagaacacuuccagcacgucgcugcgccguacaucgcuaaagccggggagaagucgcugaauggagccgugccccucgggucuaacgcuagagaggagagcucuauucauuguaagcgauguuuauuuaugccaaagucauaugaggcgcucguccaacauguaaucgaggaccacgagagaauuggcuaucaaguuacugcuaugaucggacacacaaaugucguuguaccucguucaaagccgcugauguugauagcaccuaagccacaggacaagaaaaguaugggcuuacccccacgaaucggaagucucgcuaguggaaauguucgcucacucccaucucagcagauggucaaucggcuuucaauucccaagccuaacuugaacagcacgggcguuaauaugaugagcaguguccaucuccagcagaauaauuacggggugaaaucuguuggccaaggauauucuguggggcagaguaugcgauuagggcucggugguaacgcaccugugucaaucccccagcagagccaguccgucaaacagcuacuuccauccgguaauggcaggucuuauggacucgggucugagcagcggucacaagcaccagcaagguacucccuucagucagccaaugccaguucacucuccuccggucagcuuaagagccccaguuuaucccaaucucaagccagccggguguuaggacaaucuucauccaaaccggcagcagcugccaccggcccgccccccggaaacacaucaagcacccagaaguggaagaucugcaccauuuguaaugagcuauucccugagaacguuuauagcgugcauuucgaaaaagagcauaaagccgagaaagucccagccguugccaauuacaucaugaaaauucacaauuucaccagcaaaugcuuguauugcaauagguaccugcccaccgauacucuucucaaccacaugcucauucacggcuuaaguuguccauacugcagauccacauuuaacgauguggaaaagauggcugcccauaugcgcaugguacauaucgacgaggagaugggaccuaagacggauucuacccuaucauucgaucugacacugcaacagggaagucacaccaauauucaucugcuaguuacuacauacaaccuuagagaugcuccagccgaaucagucgccuaccacgcucagaacaauccuccugucccccccaagccucagccaaaaguucaagaaaaggcagacauaccugucaagucauccccacaagccgcaguccccuauaagaaggaugucggaaagacuuuauguccccuuugcuucuccauucuuaaaggcccaaucucagacgcacuggcccaccaucucagagagcgucaccaagucauucagacaguacacccugucgaaaaaaagcuuaccuacaaaugcauccauugucucggcguguacacaucuaauaugacagcuagcacuaucacccugcaccuggugcauugucggggcgugggcaagacccaaaauggucaggacaaaacuaaugccccauccagacucaaccagucucccucucuggcccccguaaagcgaaccuaugaacaaauggaguuuccccuccugaaaaaacgcaaacucgacgaugauucugauucuccgucuuuuuuugaagagaaaccggaagagccggucguacuggccuuagauccaaaagggcaugaagacgauucauaugaagcccgaaagaguuuccugacgaaguauuucaacaagcaacccuauccgacacgcagagagaucgagaagcucgcagccucgcucuggcucuggaaaagugacauugcaagccacuucuccaacaaaaggaaaaaauguguccgugacugugagaaguacaagccuggaguacugcuuggguuuaacaugaaggagcugaauaaaguaaaacacgaaauggauuuugacgcugaauggcucuucgaaaaccacgacgaaaaggacagccgcguaaacgccuccaaaacugccgauaaaaaacuaaauuuagggaaagaggaugauucaucuagugacagcuuugaaaaucuagaggaggagaguaacgaauccggcagccccuucgacccgguuuuugagguagagccuaaaauaaguaacgauaaucccgaagagcauguguugaaggucaucccggaagaugcuucagagagcgaagagaaacuggaccagaaggaggacggcaguaaguacgaaacuauccaucugacagaagagccgacaaaacucaugcauaaugcuucagauucagaggucgaccaggaugauguaguggaauggaaagacggcgcuucuccaagugagagugggccgggaucccaacaggugagcgauuucgaagauaauacgugcgaaaugaagccagguaccugguccgacgaaagcucgcagagugaagacgcuagaucuuccaaacccgcugcaaagaaaaaagccacgaugcagggcgaucgcgagcaacucaaguggaaaaacuccagcuacgggaaaguagaaggauucuggagcaaagaucagucacaguggaaaaaugcaucagagaaugaugaacggcucucaaauccccagaucgaguggcaaaauaguaccaucgacuccgaagacggugagcaauuugauaauaugaccgacggcguagccgagcccaugcauggaucacuggccgggguuaaacucucaagucagcaggccuag

SEQ ID NO: 321500 - DNA, 345 bp, Artificial Sequence
  derived and/or modified sequence
atgtgcggctgggaagattcacagaaacctagtgtccccagtcacggccccaagacgccgtcatgtaaaggagtgaaggctccacactcctcacgtccccgcgcctggaaacaggacctcgagcagtctctggcggcagcctacgtgcctgtggttgtagacagcaaaggacagaaccccgacaaattgcggttcaatttctacacttcccagtactctaacagtttaaatccgttttacactcttcaaaagcccacctgtggttacttgtacaggcgggatacggaccatactcgcaagcgcttcgacgttcctcccgctaacctcgtcctgtggcgaagttag

SEQ ID NO: 321501 - DNA, 513 bp, Artificial Sequence
  derived and/or modified sequence
atgttcgacggtcgcttcatacccctggcaaggcccgaggtgaagtggacccacgagcaggggagcgtgatgatgttcgagcaccttatcaacagcaacggtatcaagcctgtgatggagcaatacggactcatcccagaagaggatatctgttttataaaagagcaaatcgttggtcccctcgagtcacccgtcgaagattctctatggccatataaggggcgcccagaaaataaaagctttttatacgaaattgtctcaaacaagagaaacgggattgacgtggacaagtgggactacttcgcacgagactgccatcacctcggaattcagaacaacttcgactataagaggttcattaagttcgcaagggtgtgcgaagtggacaatgagctgcggatttgtgccagagataaagaggtcggcaacttatatgatatgtttcatacaagaaactctttacatcggcgagcctatcagcacaaggttgggaatatcattgataccatgtag

SEQ ID NO: 321502 - DNA, 513 bp, Artificial Sequence
  derived and/or modified sequence
atgtttgatggccgcttcatccccctggcccggcctgaggtgaagtggacccatgagcagggctctgtgatgatgtttgagcacctgatcaacagcaatggcatcaagcctgtgatggagcagtatggcctcatccctgaggaggacatctgcttcatcaaggagcagatcgtgggccccctggagagccctgtggaggacagcctgtggccctacaagggccggcctgagaacaagagcttcctgtatgaaattgtgagcaacaagagaaatggaattgatgtggacaagtgggactactttgcccgggactgccaccacctgggcatccagaacaactttgactacaagcgcttcatcaagtttgcccgggtgtgtgaggtggacaatgagctgcgcatctgtgcccgggacaaggaggtgggcaacctgtatgacatgttccacaccaggaacagcctgcaccggcgggcctaccagcacaaggtgggcaacatcatcgacaccatgtag

SEQ ID NO: 321503 - DNA, 513 bp, Artificial Sequence
  derived and/or modified sequence
atgttcgacggccggttcatccccctggcccggcccgaggtgaagtggacacacgaacaaggctccgttatgatgttcgagcacctcattaactccaatggaattaagcccgtcatggagcagtacggtttgatacccgaagaggacatttgctttataaaagaacaaattgtcggacctctggaatctcccgtagaggactccctgtggccttacaagggccgaccagagaacaagagctttttatatgagattgtctccaataaacgaaatggcattgatgttgataagtgggattattttgctagagattgccaccatctgggcatccagaacaattttgactataagcggttcattaaattcgcaagggtgtgcgaggtggacaatgagctgcgcatatgcgcacgcgataaagaggtgggaaacctgtatgatatgtttcacactcgcaactctttgcacaggcgcgcctatcaacacaaagtgggaaacatcatagataccatgtag

SEQ ID NO: 321504 - DNA, 513 bp, Artificial Sequence
  derived and/or modified sequence
atgtttgacggcaggttcattcctctcgctcggcctgaggtaaagtggacacatgaacagggttccgtcatgatgttcgagcacctgataaattctaacggcataaaacccgtgatggagcagtacgggctgatccccgaggaggatatttgctttatcaaggaacagattgtcggtccactcgagagccctgtggaagactctctatggccttacaaagggcgacccgagaacaagagcttcctctatgagattgtatctaacaaaagaaatggtatagacgtggataagtgggactacttcgcacgcgactgtcaccacctggggatacagaacaacttcgactataaacggtttatcaagtttgcccgtgtgtgtgaagtagataacgaactaagaatctgtgccagagataaggaggtgggtaatctttatgacatgtttcatacccgcaactcgttgcatcggcgagcctatcagcataaagtaggtaatattatcgacaccatgtag

SEQ ID NO: 321505 - DNA, 1395 bp, Artificial Sequence
  derived and/or modified sequence
agtgcgcctgcgcgcgggtccggcgccgaggttcttgactgctgtgccggacgccaggtgtagccatgcagcgagccgattccgagcagccctccaagcgtccccgttgcgatgacagcccgagaaccccctcaaacaccccttccgcagaggcagactggtccccgggcctggaactccatcccgactacaagacatggggtccggagcaggtgtgctccttcctcaggcgcggtggctttgaagagccggtgctgctgaagaacatccgagaaaatgaaatcacaggcgcattactgccttgtcttgatgagtctcgttttgaaaatcttggagtaagttccttgggggagaggaagaagctgcttagttatatccagcgattggttcaaatccacgttgatacaatgaaggaagaagtaaaatatactcaaatccaatatacttgatctgtctggtagtgatacctaaataaggtaattaatgatcctatccatggccacattgagctccaccctctcctcgtccgaatcattgatacacctcaatttcaacgtcttcgatacatcaaacagctgggaggtggttactatgtttttccaggagcttcacacaatcgatttgagcatagtctaggggtggggtatctagcaggatgtctagttcacgcactgggtgaaaaacaaccagagctgcagataagtgaacgagatgttctctgtgttcagattgctggactttgtcatgatctcggtcatgggccattttctcacatgtttgatggacgatttattccacttgctcgcccggaggtgaaatggacgcatgaacaaggctcagttatgatgtttgagcaccttattaattctaatggaattaagcctgtcatggaacaatatggtctcatccctgaagaagatatttgctttataaaggaacaaattgtaggaccacttgaatcacctgtcgaagattcattgtggccatataaagggcgtcctgaaaacaaaagcttcctttatgagatagtatctaataaaagaaatggcattgatgtggacaaatgggattattttgccagggactgccatcatcttggaatccaaaataattttgattacaagcgctttattaagtttgcccgtgtctgtgaagtagacaatgagttgcgtatttgtgctagagataaggaagttggaaatctgtatgacatgttccacactcgcaactctttacaccgtagagcttatcaacacaaagttggcaacattattgatacaatgtaagaaacttgattgtcatttccctataaaattttccttgatacttggctagagtatcatactaggctcaactagacatttctagatgagttcaagtgaatattaagtgatt

SEQ ID NO: 321506 - DNA, 513 bp, Artificial Sequence
  derived and/or modified sequence
atgttcgacggcagattcatccccctggccagacccgaggtgaagtggacccacgagcagggcagcgtgatgatgttcgagcacctgatcaacagcaacggcatcaagcccgtgatggagcagtacggcctgatccccgaggaggacatctgcttcatcaaggagcagatcgtgggccccctggagagccccgtggaggacagcctgtggccctacaagggcagacccgagaacaagagcttcctgtacgagatcgtgagcaacaagagaaacggcatcgacgtggacaagtgggactacttcgccagagactgccaccacctgggcatccagaacaacttcgactacaagagattcatcaagttcgccagagtgtgcgaggtggacaacgagctgagaatctgcgccagagacaaggaggtgggcaacctgtacgacatgttccacaccagaaacagcctgcacagaagagcctaccagcacaaggtgggcaacatcatcgacaccatgtag

SEQ ID NO: 321507 - DNA, 219 bp, Artificial Sequence
  derived and/or modified sequence
atgagctaccagcagcagcagtgcaagcagccctgccagcccccccccgtctgccccacgcctaagtgtccagagccttgtccccccccaaagtgtcctgaaccctgtccaagccctaaatgcccccagccatgcccgcctcagcaatgccagcagaaataccctcccgtcacaccgtcacctccctgccaacccaaatgtcccccaaagagtaagtag

SEQ ID NO: 321508 - protein, 399 aa, Artificial Sequence
  derived and/or modified sequence
MQSLSTEARYVPRVPQHRDQISPRSPQHGGQICPRSPLHRGQICPRSPPARRYQQILHRNLVYLATIADSNQNMQSLLPAPPTQNMNLGPGALTQSGSSQGLHSQGSLSDAISTGLPPSSLLQGQIGNGPSHVSMQQTAPNTLPTTSMSISGPGYSHAGPASQGVPMQGQGTIGNYVSRTNINMQSNPVSMMQQQAATSHYSSAQGGSQHYQGQSSIAMMGQGSQGSSMMGQRPMAPYRPSQQGSSQQYLGQEEYYGEQYSHSQGAAEPMGQQYYPDGHGDYAYQQSSYTEQSYDRSFEESTQHYYEGGNSQYSQQQAGYQQGAAQQQTYSQQQYPSQQSYPGQQQGYGSAQGAPSQYPGYQQGQGQQYGSYRAPQTAPSAQQQRPYGYEQGQYGNYQQ

SEQ ID NO: 321509 - protein, 128 aa, Artificial Sequence
  derived and/or modified sequence
MQSLSTEARYVPRVPQHRDQISPRSPQHGGQICPRSPLHRGQICPRSPPARRYQQILHRNLVYLATIADSNQNMQSLLPAPPTQNMNLGPGALTQSGSSQGLHSQGSLSDAISTGLPPSSLLQGQIGN

SEQ ID NO: 321510 - DNA, 1200 bp, Artificial Sequence
  derived and/or modified sequence
atgcagagcctgagcaccgaggccagatacgtgcccagagtgccccagcacagagaccagatcagccccagaagcccccagcacggcggccagatctgccccagaagccccctgcacagaggccagatctgccccagaagcccccccgccagaagataccagcagatcctgcacagaaacctggtgtacctggccaccatcgccgacagcaaccagaacatgcagagcctgctgcccgccccccccacccagaacatgaacctgggccccggcgccctgacccagagcggcagcagccagggcctgcacagccagggcagcctgagcgacgccatcagcaccggcctgccccccagcagcctgctgcagggccagatcggcaacggccccagccacgtgagcatgcagcagaccgcccccaacaccctgcccaccaccagcatgagcatcagcggccccggctacagccacgccggccccgccagccagggcgtgcccatgcagggccagggcaccatcggcaactacgtgagcagaaccaacatcaacatgcagagcaaccccgtgagcatgatgcagcagcaggccgccaccagccactacagcagcgcccagggcggcagccagcactaccagggccagagcagcatcgccatgatgggccagggcagccagggcagcagcatgatgggccagagacccatggccccctacagacccagccagcagggcagcagccagcagtacctgggccaggaggagtactacggcgagcagtacagccacagccagggcgccgccgagcccatgggccagcagtactaccccgacggccacggcgactacgcctaccagcagagcagctacaccgagcagagctacgacagaagcttcgaggagagcacccagcactactacgagggcggcaacagccagtacagccagcagcaggccggctaccagcagggcgccgcccagcagcagacctacagccagcagcagtaccccagccagcagagctaccccggccagcagcagggctacggcagcgcccagggcgcccccagccagtaccccggctaccagcagggccagggccagcagtacggcagctacagagccccccagaccgcccccagcgcccagcagcagagaccctacggctacgagcagggccagtacggcaactaccagcagtag

SEQ ID NO: 321511 - DNA, 387 bp, Artificial Sequence
  derived and/or modified sequence
atgcagagcctgagcaccgaggccagatacgtgcccagagtgccccagcacagagaccagatcagccccagaagcccccagcacggcggccagatctgccccagaagccccctgcacagaggccagatctgccccagaagcccccccgccagaagataccagcagatcctgcacagaaacctggtgtacctggccaccatcgccgacagcaaccagaacatgcagagcctgctgcccgccccccccacccagaacatgaacctgggccccggcgccctgacccagagcggcagcagccagggcctgcacagccagggcagcctgagcgacgccatcagcaccggcctgccccccagcagcctgctgcagggccagatcggcaactag

SEQ ID NO: 321512 - DNA, 1200 bp, Artificial Sequence
  derived and/or modified sequence
atgcaaagcctttcaaccgaggcgaggtacgttccccgggtccctcagcacagggaccaaatttccccacggtctccccaacatggtggtcaaatctgcccgcggtctccattgcaccgtggacaaatatgtccccgctctccccccgccagacgatatcagcaaatcctgcacaggaacctcgtatacttagctacaatcgctgactcgaaccaaaatatgcagagcctcttgcctgcccccccaactcagaatatgaatctggggccgggagcgttgactcagagtgggtcgagccagggactccactcccagggctcactgagtgatgcaatcagcacaggcctgccaccctcttccctcctgcagggccagattggcaatggaccttctcacgtctcgatgcagcagactgcacccaacacactgcctaccacatccatgagcatctccggccccggatatagtcacgcagggccagcgtcgcagggcgtccccatgcagggtcaggggacaatcgggaactacgtgtccagaaccaatatcaatatgcagtctaatccagtgtctatgatgcagcagcaggctgccacatcacattacagcagtgcacagggaggctcacagcattaccaggggcagagcagtatagccatgatgggtcaaggcagtcagggtagctctatgatgggacaaagaccgatggcaccttatcgtccctctcagcaaggaagcagccagcagtacctgggccaagaagagtactacggagagcaatactctcattctcagggtgcagctgagcccatggggcaacaatattacccagatggtcacggggattacgcctaccagcagagcagctatacagagcagagctacgatcgtagctttgaagagagcacccagcattactatgaggggggcaattcgcagtatagccagcaacaggccggttaccagcagggcgctgcacagcaacagacttattcgcaacaacagtatccttctcagcagagctacccgggtcaacagcagggctatggcagcgcccagggagcacctagtcagtatcctgggtatcagcagggccagggacagcagtacgggtcttacagagcaccacaaactgcacctagcgcacagcagcagagaccatacggatacgagcagggtcaatacggcaactaccaacagtag

SEQ ID NO: 321513 - DNA, 387 bp, Artificial Sequence
  derived and/or modified sequence
atgcaatccctttcaacagaagctagatacgttccacgggtcccacagcatagagaccagatatcaccacggtcccctcagcatggggggcagatctgcccccgctctccactgcaccgcggacagatttgccctaggtctcccccagctcggagatatcagcagatactgcacagaaatctcgtctatctagctaccattgcagattctaatcaaaacatgcagtctctgctgcctgctccgcctacacagaatatgaatctgggacccggcgcacttactcagagtggttcttcacaggggctccattcccagggctccctgtctgacgctataagtactggtctgcctccctcatcccttctccagggccagatcggtaattag

SEQ ID NO: 321514 - DNA, 1200 bp, Artificial Sequence
  derived and/or modified sequence
atgcagagcctgagcacagaggcccgctacgtgccccgggtgccccagcaccgggaccagatcagccccaggagcccccagcacggcggccagatctgccccaggagccccctgcaccggggccagatctgccccaggagccccccagcccggcgctaccagcagatcctgcacaggaacctggtgtacctggccaccatcgctgacagcaaccagaacatgcagagcctgctgcctgccccacccacccagaacatgaacctgggccctggggccctgacccagagcggcagcagccagggcctgcacagccagggcagcctgagtgatgccatcagcacaggcctgccccccagcagcctgctgcagggccagattggaaatggccccagccacgtgtccatgcagcagacagcccccaacaccctgcccaccacctccatgagcatcagcggccctggctacagccacgccggccctgccagccagggcgtgcccatgcagggccagggcaccatcggcaactacgtgtccaggaccaacatcaacatgcagagcaaccctgtgtccatgatgcagcagcaggccgccaccagccactacagcagcgcccagggcggcagccagcactaccagggccagagcagcatcgccatgatgggccagggcagccagggcagctccatgatgggccagaggcccatggccccctaccggcccagccagcagggcagcagccagcagtacctgggccaggaggagtactacggggagcagtacagccacagccagggcgctgctgagcccatgggccagcagtactacccagatggccatggagactatgcctaccagcagagcagctacacagagcagagctatgacaggagctttgaggagagcacccagcactactatgagggcggcaacagccagtacagccagcagcaggccggctaccagcagggcgccgcccagcagcagacctacagccagcagcagtaccccagccagcagagctacccaggccagcagcagggctacggcagcgcccagggcgcccccagccagtacccaggctaccagcagggccagggccagcagtatggcagctaccgggccccccagacagcccccagcgcccagcagcagaggccctacggctatgagcagggccagtatggcaactaccagcagtag

SEQ ID NO: 321515 - DNA, 387 bp, Artificial Sequence
  derived and/or modified sequence
atgcagagcctgagcacagaggcccgctacgtgccccgggtgccccagcaccgggaccagatcagccccaggagcccccagcacggcggccagatctgccccaggagccccctgcaccggggccagatctgccccaggagccccccagcccggcgctaccagcagatcctgcacaggaacctggtgtacctggccaccatcgctgacagcaaccagaacatgcagagcctgctgcctgccccacccacccagaacatgaacctgggccctggggccctgacccagagcggcagcagccagggcctgcacagccagggcagcctgagtgatgccatcagcacaggcctgccccccagcagcctgctgcagggccagatcggcaactag

SEQ ID NO: 321516 - DNA, 1200 bp, Artificial Sequence
  derived and/or modified sequence
atgcagagcctgagcaccgaggcccggtacgtgccccgggtgccccagcatagggatcagattagtcccaggtctcctcaacacggaggacagatctgcccccgttcacctctgcacagaggccagatctgcccgcggtctcctcccgccagaaggtatcagcagattctgcataggaacctggtttacctggctaccatcgctgactccaatcagaatatgcagtctttgttgcccgcaccacccactcagaacatgaacctcggacctggcgcactcacccagagcggaagctcccagggcttgcactcccagggaagcttgtcagatgccatttcgactgggctcccccccagctcacttctccagggtcaaatcggcaatgggccctcacatgtatccatgcagcagaccgctcccaacacattgcctactactagtatgagtatttccggaccaggctatagtcacgccggcccagcctctcagggcgtcccgatgcaaggacaaggtaccattggtaactatgtcagcaggacaaatatcaatatgcagtcaaatccagtgtcaatgatgcagcagcaggcggcaacaagtcactacagttcagcacagggaggttctcagcattaccaggggcagagcagcatcgctatgatgggccagggctcccaaggaagctccatgatgggccagcggcccatggccccttaccgcccctcgcagcagggtagctctcaacagtaccttggtcaggaggagtactatggggagcaatactcacacagtcagggcgcagccgaaccaatgggacaacagtactacccagacgggcacggagattacgcgtaccagcaatcctcatatactgagcagtcctatgacaggtcatttgaggaaagcacccagcactactatgagggcgggaattcccagtactcacaacaacaggccggataccaacagggcgcagcccagcaacagacctactctcagcagcagtatccttcccagcagagctatccgggacagcaacaaggctacggctccgctcaaggggccccaagtcaatacccgggctaccagcaggggcagggacaacagtacggaagctaccgagcccctcagaccgcacccagtgcacagcagcaaagaccatacgggtacgagcagggacagtacgggaattatcagcagtag

SEQ ID NO: 321517 - DNA, 387 bp, Artificial Sequence
  derived and/or modified sequence
atgcagagcctgagcaccgaggcccggtacgtgccccgggtgccccagcatcgcgaccagatctctccccgtagtccacagcacggtggacagatttgccccagatcgcctctccatagaggccagatttgcccccgtagcccccctgctagaaggtatcagcagattcttcatagaaacctggtttacctggccacaatcgcagactccaatcagaacatgcagagccttctgcctgccccacccacacaaaacatgaatctggggcccggagcattgactcagtcgggcagttcccaaggcttacacagccaagggtccctttccgacgctatctctaccggacttccgcccagttccctgttgcagggacagataggcaactag

SEQ ID NO: 321518 - DNA, 1200 bp, Artificial Sequence
  derived and/or modified sequence
atgcagagcctctcaaccgaggctcgctatgtgccaagagtcccccagcatagggatcaaattagtcctagatctcctcagcatggtgggcagatctgccctagaagccccttacatcgtggtcagatctgccccaggagccctcctgcacgtcgatatcaacagatactgcaccgtaatctcgtctatttggctacgattgctgattccaaccagaacatgcagagcctgctgccagcccctccgacccagaatatgaacctgggccctggtgctctcactcaatccggttccagccagggactacacagtcaagggtcgctgtcggatgcaatcagtactgggcttcctccctcatccctgctacaaggccaaatcgggaatggcccttctcatgtgtccatgcaacagactgcacctaacaccctgcctacaacctccatgtccataagcgggccaggttatagccatgccggtccagcctcacagggggtccctatgcaggggcaaggaacgatcggaaattacgtcagcagaactaatattaacatgcagtctaatcccgtgagtatgatgcagcagcaggcagcaacctcacattattctagtgcccagggaggtagccaacactaccaggggcaaagcagtattgcaatgatgggccagggaagtcagggcagtagtatgatgggacagcgaccaatggcaccctaccgcccaagccaacagggcagcagccaacagtatctgggtcaggaggaatattatggcgagcaatattctcactcacagggtgctgccgagcctatgggccaacagtattaccctgacgggcacggggattacgcgtatcagcagtcctcttataccgaacaatcatatgatagaagttttgaagagagtacacagcactattacgagggaggcaattcgcagtatagccagcagcaggctggctatcaacagggtgcagcccagcagcaaacttacagccaacagcagtacccctcacagcagagttaccctggccagcagcagggatatggatcagcgcagggcgctccctcccagtatcctggctatcagcaagggcaggggcaacagtatggatcttaccgcgcaccccagactgccccttccgcacagcagcaacgcccttacggatatgaacaaggccagtacgggaactatcagcagtag

SEQ ID NO: 321519 - DNA, 387 bp, Artificial Sequence
  derived and/or modified sequence
atgcagtcactctccaccgaggcccgatacgtgccaagggtgccccagcaccgggatcagatttctcctagatcgcctcagcacggcggtcagatctgcccacggagtcctctccatcgaggacaaatctgcccccgtagtcccccagcacggcgttatcagcagatcctgcacagaaacttggtctatctcgctaccatcgccgacagcaaccagaatatgcagagtctgttaccagcaccaccaacacagaacatgaacctcggtccaggagccttgactcagagtggtagtagccagggactgcacagccaggggagcctgagtgacgcaatctctactgggcttccgccatcttcactcctacagggccagatcgggaactag

SEQ ID NO: 321520 - DNA, 3657 bp, Artificial Sequence
  derived and/or modified sequence
atgcagagtctaagcacagaggccagatacgtcccaagagtcccccagcacagagatcagataagtcccaggagtccccagcacggaggccagatatgtcccaggagtcccctgcacagaggccagatatgtcccaggagtcccccagcacggaggtaccagcagatcctgcaccggaacctggtatacctggccacgatcgcagactccaaccagaacatgcagtccctgcttcctgccccgcccacgcagaacatgaacctgggccctggagccctgactcagagcggctccagccagggcctgcactctcagggcagcctgagtgacgccatcagcacgggcctgccaccctcctccctcctgcagggccagattggcaacgggccgagccacgtgtccatgcagcagacggcgcctaacacgctgcccaccacctccatgagcatctctgggcccggctacagccacgcgggacccgcctcgcagggcgtccccatgcaggggcaaggcaccatcggcaactacgtgtctcggaccaacatcaacatgcagtccaacccagtctccatgatgcagcagcaggcggccacgtcgcactacagctcggcgcagggcggcagccagcactaccagggccagtcgtccatcgccatgatggggcagggcagccaggggagcagcatgatggggcagcggcccatggcgccctaccggccctcccagcaaggctcttcccagcagtacctgggccaggaggagtactatggcgagcagtacagccacagccagggcgccgcggagcccatgggccagcagtactaccccgacggccatggcgattacgcctaccagcagtcatcctacacggagcagagctacgaccggtccttcgaggagtccacgcagcactactatgaggggggaaactcccagtacagccagcagcaggccgggtaccagcagggtgccgcgcagcagcagacgtactcccagcagcagtaccccagccagcagagctaccccgggcagcagcagggctacgggtctgcccagggagccccgtcacagtaccccggctaccagcaaggccaaggccagcagtacggaagctaccgagcaccgcagacagcgccgtctgcccagcagcagcggccctacggctatgaacagggccagtatggaaattaccagcagtaagggacacacattctggctggagcccttgtggtagcgtgttcatccaggggccggatgggctggcggcagctctggtgaattgtgacatgttggttacctgttcgcccagtgccacgtctgcatgtgaagcgtgctcatttcatgctgggacctacttgctcagatctccaagcaagcatttcttttcttttagggatgtctgaaagtcacatccagttacattactgtgttctttctaatgaaaagtaaaggttttatatagagaaacttgagtaatttttacatttctaagacattaaatcccatttaaattctgtgtgaacattaaagacagcacacttgcaaaagtatggtcaaaggaaaaaaatcccacatttcaattaacaagtagcatggacatttgatcaacctttagttggaataataatattcatatttgctatgaatccttttaaaaaaatctttggataaatgctgacagatttccaagaactaccaagaaaatacaagagatatccaatgcttgatatatgaggcctagtaataacgatatttctctttaattgatgttttgttttaaaagttaaaagtaattcttggcgtggtggttcacgcctgtaatcccagcactttgggaggccgaagcgggcggatcacctgaggtcgggagttcgagaccagcctgaccaacatggagaaaccccgtccctactaaaaatacaaaattagccaggtatggtggtgcatacctgtaatcccagctactcgggaacctgaggcaggagaatggcttgaacccaggagacagaggttgtggtggggcaagatcgcaccattgcacccgagcctaggcaacaagagtgaaattccgtctcaaaaaaataaataaataaataaataaataagttaaaattaattctttatccagagtcgggtgctttagaatttataagtcacttatgtgttttgcttgaattaattctgacagcccctatgaggaaatctggaggcaggtaacagttcccattttagagatgaagaactgaggcacagattaaaggacttgcctgtgttgaataccagtcctgttctaggacattctcccctctcctaggagacggatgtcacgcacaaatggggagagaagtgtttattttgtaggcactaagggtttctaaaacccttaacactggtaagggctcaaaaataaacgtatgtgttcatattcgatcaccgaaatgagagttcttaattgctaattgacaaacgcgttagcaatttcagttagggagtcatctcccttgattgtgttcttttcctgtcaattttcatagacctaatttgcaaactcaatcggggactaaaatttcccactgaaaatgttaaacattttagataactgtgaagatagtttatttttattccttgccaatctgggaatatgccttttttgtgtgtttgtgtgtttttttaagtgctgtattaataatactttctgaaagaaaaggacacttaccccaaaacttcaatctgaaatgtcttacattaagaatatcttgaatgttgtgtatatattttaaaaagcactttgcaaaatagtttgtacatttatttcctaatttatacatgatttttggtgttaatatatttaatgattaataacagaatgtttatttaatgtgctgtccatttttatgtaatattatggggaaagtgatgccagcagttccttttcattattctatcttctgtcatatgaatgttgagcaaagcttaggccaacatgaattgtttgtgaagtgtggttgatggtgctttgtttttttctgactacttctatggaaggccagtgaagaagcaaaggaagacatgaaaattgacgctcattcttcttcctattgttccctgacatccagcaaattgtgaatttgaaaaatgatggccagttttcagaagtgctgacaaattcatattggtatgcaaaagctcatcacccattaaggtttgttgttgaatcaacagtactcagcatattaaaacagtacatcagaactcatgccaacagtctttatgatgggattaaggtggacaagatctcctaagatctgtgaatgggattaaggtggacaagatctcctaagatctgaaaagaaaccttaatacgctcatatggttggagtgttaagtgaacctctgattttgtcagggtttttctacgtgtaggcgtgaatagggggcaccccttcaaaactgtacaaagaagacgactgttttccatttccatttaaacatttttagccacttcatttctatttattgaacaggtcaaatttgtcttgttatttgtgagtacagtacatttaaaaaacatccttatcggttatttttttttcagtcggagtttgacgtataaattgtttatgcttttggtgtaatctcttaataaactggttcttc

SEQ ID NO: 321521 - DNA, 781 bp, Artificial Sequence
  derived and/or modified sequence
cacgggctgagccccgcgccgccaccatgtccgtggccttcgcgtctgcccggccaagaggcaaaggggaggttacgcagcaaaccatccagaagtttttgaagaatgccggccagtcatcgagtgcccttggtttgggtacaaggtgcgttttcctaacttgcgggtctgaaagtgcgtccattcccccttcacgcctggttgcggtttcggcggactagaatttctacgcagaagtctccctcaggatcagaccgtagcccttccggaaacctccatgatgctggacgagaaccaccacctgatccagtgcatcctggagtaccagagcaagggcaagacggccgagtgcacgcagtgagtgcccgccatacaccggaacacttggagggtgtcatgcagagtctaagcacagaggccagatacgtcccaagagtcccccagcacagagatcagataagtcccaggagtccccagcacggaggccagatatgtcccaggagtcccctgcacagaggccagatatgtcccaggagtcccccagcacggaggtaccagcagatcctgcaccggaacctggtatacctggccacgatcgcagactccaaccagaacatgcagtccctgcttcctgccccgcccacgcagaacatgaacctgggccctggagccctgactcagagcggctccagccagggcctgcactctcagggcagcctgagtgacgccatcagcacgggcctgccaccctcctccctcctgcagggccagattggcaacg

SEQ ID NO: 321522 - protein, 797 aa, Artificial Sequence
  derived and/or modified sequence
MAAAPVAAGSGAGRGRRSAATVAAWGGWGGRPRPGNILLQLRQGQLTGRGLVRAVQFTETFLTERDKQSKWSGIPQLLLKLHTTSHLHSDFVECQNILKEISPLLSMEAMAFVTEERKLTQETTYPNTYIFDLFGGVDLLVEILMRPTISIRGQKLKISDEMSKDCLSILYNTCVCTEGVTKRLAEKNDFVIFLFTLMTSKKTFLQTATLIEDILGVKKEMIRLDEVPNLSSLVSNFDQQQLANFCRILAVTISEMDTGNDDKHTLLAKNAQQKKSLSLGPSAAEINQAALLSIPGFVERLCKLATRKVSESTGTASFLQELEEWYTWLDNALVLDALMRVANEESEHNQASIVFPPPGASEENGLPHTSARTQLPQSMKIMHEIMYKLEVLYVLCVLLMGRQRNQVHRMIAEFKLIPGLNNLFDKLIWRKHSASALVLHGHNQNCDCSPDITLKIQFLRLLQSFSDHHENKYLLLNNQELNELSAISLKANIPEVEAVLNTDRSLVCDGKRGLLTRLLQVMKKEPAESSFRFWQARAVESFLRGTTSYADQMFLLKRGLLEHILYCIVDSECKSRDVLQSYFDLLGELMKFNVDAFKRFNKYINTDAKFQVFLKQINSSLVDSNMLVRCVTLSLDRFENQVDMKVAEVLSECRLLAYISQVPTQMSFLFRLINIIHVQTLTQENVSCLNTSLVILMLARRKERLPLYLRLLQRMEHSKKYPGFLLNNFHNLLRFWQQHYLHKDKDSTCLENSSCISFSYWKETVSILLNPDRQSPSALVSYIEEPYMDIDRDFTEE

SEQ ID NO: 321523 - protein, 758 aa, Artificial Sequence
  derived and/or modified sequence
MAAAPVAAGSGAGRGRRSAATVAAWGGWGGRPRPGNILLQLRQGQLTGRGLVRAVQFTETFLTERDKQSKWSGIPQLLLKLHTTSHLHSDFVECQNILKLLVEILMRPTISIRGQKLKISDEMSKDCLSILYNTCVCTEGVTKRLAEKNDFVIFLFTLMTSKKTFLQTATLIEDILGVKKEMIRLDEVPNLSSLVSNFDQQQLANFCRILAVTISEMDTGNDDKHTLLAKNAQQKKSLSLGPSAAEINQAALLSIPGFVERLCKLATRKVSESTGTASFLQELEEWYTWLDNALVLDALMRVANEESEHNQASIVFPPPGASEENGLPHTSARTQLPQSMKIMHEIMYKLEVLYVLCVLLMGRQRNQVHRMIAEFKLIPGLNNLFDKLIWRKHSASALVLHGHNQNCDCSPDITLKIQFLRLLQSFSDHHENKYLLLNNQELNELSAISLKANIPEVEAVLNTDRSLVCDGKRGLLTRLLQVMKKEPAESSFRFWQARAVESFLRGTTSYADQMFLLKRGLLEHILYCIVDSECKSRDVLQSYFDLLGELMKFNVDAFKRFNKYINTDAKFQVFLKQINSSLVDSNMLVRCVTLSLDRFENQVDMKVAEVLSECRLLAYISQVPTQMSFLFRLINIIHVQTLTQENVSCLNTSLVILMLARRKERLPLYLRLLQRMEHSKKYPGFLLNNFHNLLRFWQQHYLHKDKDSTCLENSSCISFSYWKETVSILLNPDRQSPSALVSYIEEPYMDIDRDFTEE

SEQ ID NO: 321524 - protein, 782 aa, Artificial Sequence
  derived and/or modified sequence
MAAAPVAAGSGAGRGRRSAATVAAWGGWGQLTGRGLVRAVQFTETFLTERDKQSKWSGIPQLLLKLHTTSHLHSDFVECQNILKEISPLLSMEAMAFVTEERKLTQETTYPNTYIFDLFGGVDLLVEILMRPTISIRGQKLKISDEMSKDCLSILYNTCVCTEGVTKRLAEKNDFVIFLFTLMTSKKTFLQTATLIEDILGVKKEMIRLDEVPNLSSLVSNFDQQQLANFCRILAVTISEMDTGNDDKHTLLAKNAQQKKSLSLGPSAAEINQAALLSIPGFVERLCKLATRKVSESTGTASFLQELEEWYTWLDNALVLDALMRVANEESEHNQASIVFPPPGASEENGLPHTSARTQLPQSMKIMHEIMYKLEVLYVLCVLLMGRQRNQVHRMIAEFKLIPGLNNLFDKLIWRKHSASALVLHGHNQNCDCSPDITLKIQFLRLLQSFSDHHENKYLLLNNQELNELSAISLKANIPEVEAVLNTDRSLVCDGKRGLLTRLLQVMKKEPAESSFRFWQARAVESFLRGTTSYADQMFLLKRGLLEHILYCIVDSECKSRDVLQSYFDLLGELMKFNVDAFKRFNKYINTDAKFQVFLKQINSSLVDSNMLVRCVTLSLDRFENQVDMKVAEVLSECRLLAYISQVPTQMSFLFRLINIIHVQTLTQENVSCLNTSLVILMLARRKERLPLYLRLLQRMEHSKKYPGFLLNNFHNLLRFWQQHYLHKDKDSTCLENSSCISFSYWKETVSILLNPDRQSPSALVSYIEEPYMDIDRDFTEE

SEQ ID NO: 321525 - DNA, 2394 bp, Artificial Sequence
  derived and/or modified sequence
atggccgccgcccccgtggccgccggcagcggcgccggcagaggcagaagaagcgccgccaccgtggccgcctggggcggctggggcggcagacccagacccggcaacatcctgctgcagctgagacagggccagctgaccggcagaggcctggtgagagccgtgcagttcaccgagaccttcctgaccgagagagacaagcagagcaagtggagcggcatcccccagctgctgctgaagctgcacaccaccagccacctgcacagcgacttcgtggagtgccagaacatcctgaaggagatcagccccctgctgagcatggaggccatggccttcgtgaccgaggagagaaagctgacccaggagaccacctaccccaacacctacatcttcgacctgttcggcggcgtggacctgctggtggagatcctgatgagacccaccatcagcatcagaggccagaagctgaagatcagcgacgagatgagcaaggactgcctgagcatcctgtacaacacctgcgtgtgcaccgagggcgtgaccaagagactggccgagaagaacgacttcgtgatcttcctgttcaccctgatgaccagcaagaagaccttcctgcagaccgccaccctgatcgaggacatcctgggcgtgaagaaggagatgatcagactggacgaggtgcccaacctgagcagcctggtgagcaacttcgaccagcagcagctggccaacttctgcagaatcctggccgtgaccatcagcgagatggacaccggcaacgacgacaagcacaccctgctggccaagaacgcccagcagaagaagagcctgagcctgggccccagcgccgccgagatcaaccaggccgccctgctgagcatccccggcttcgtggagagactgtgcaagctggccaccagaaaggtgagcgagagcaccggcaccgccagcttcctgcaggagctggaggagtggtacacctggctggacaacgccctggtgctggacgccctgatgagagtggccaacgaggagagcgagcacaaccaggccagcatcgtgttccccccccccggcgccagcgaggagaacggcctgccccacaccagcgccagaacccagctgccccagagcatgaagatcatgcacgagatcatgtacaagctggaggtgctgtacgtgctgtgcgtgctgctgatgggcagacagagaaaccaggtgcacagaatgatcgccgagttcaagctgatccccggcctgaacaacctgttcgacaagctgatctggagaaagcacagcgccagcgccctggtgctgcacggccacaaccagaactgcgactgcagccccgacatcaccctgaagatccagttcctgagactgctgcagagcttcagcgaccaccacgagaacaagtacctgctgctgaacaaccaggagctgaacgagctgagcgccatcagcctgaaggccaacatccccgaggtggaggccgtgctgaacaccgacagaagcctggtgtgcgacggcaagagaggcctgctgaccagactgctgcaggtgatgaagaaggagcccgccgagagcagcttcagattctggcaggccagagccgtggagagcttcctgagaggcaccaccagctacgccgaccagatgttcctgctgaagagaggcctgctggagcacatcctgtactgcatcgtggacagcgagtgcaagagcagagacgtgctgcagagctacttcgacctgctgggcgagctgatgaagttcaacgtggacgccttcaagagattcaacaagtacatcaacaccgacgccaagttccaggtgttcctgaagcagatcaacagcagcctggtggacagcaacatgctggtgagatgcgtgaccctgagcctggacagattcgagaaccaggtggacatgaaggtggccgaggtgctgagcgagtgcagactgctggcctacatcagccaggtgcccacccagatgagcttcctgttcagactgatcaacatcatccacgtgcagaccctgacccaggagaacgtgagctgcctgaacaccagcctggtgatcctgatgctggccagaagaaaggagagactgcccctgtacctgagactgctgcagagaatggagcacagcaagaagtaccccggcttcctgctgaacaacttccacaacctgctgagattctggcagcagcactacctgcacaaggacaaggacagcacctgcctggagaacagcagctgcatcagcttcagctactggaaggagaccgtgagcatcctgctgaaccccgacagacagagccccagcgccctggtgagctacatcgaggagccctacatggacatcgacagagacttcaccgaggagtag

SEQ ID NO: 321526 - DNA, 2277 bp, Artificial Sequence
  derived and/or modified sequence
atggccgccgcccccgtggccgccggcagcggcgccggcagaggcagaagaagcgccgccaccgtggccgcctggggcggctggggcggcagacccagacccggcaacatcctgctgcagctgagacagggccagctgaccggcagaggcctggtgagagccgtgcagttcaccgagaccttcctgaccgagagagacaagcagagcaagtggagcggcatcccccagctgctgctgaagctgcacaccaccagccacctgcacagcgacttcgtggagtgccagaacatcctgaagctgctggtggagatcctgatgagacccaccatcagcatcagaggccagaagctgaagatcagcgacgagatgagcaaggactgcctgagcatcctgtacaacacctgcgtgtgcaccgagggcgtgaccaagagactggccgagaagaacgacttcgtgatcttcctgttcaccctgatgaccagcaagaagaccttcctgcagaccgccaccctgatcgaggacatcctgggcgtgaagaaggagatgatcagactggacgaggtgcccaacctgagcagcctggtgagcaacttcgaccagcagcagctggccaacttctgcagaatcctggccgtgaccatcagcgagatggacaccggcaacgacgacaagcacaccctgctggccaagaacgcccagcagaagaagagcctgagcctgggccccagcgccgccgagatcaaccaggccgccctgctgagcatccccggcttcgtggagagactgtgcaagctggccaccagaaaggtgagcgagagcaccggcaccgccagcttcctgcaggagctggaggagtggtacacctggctggacaacgccctggtgctggacgccctgatgagagtggccaacgaggagagcgagcacaaccaggccagcatcgtgttccccccccccggcgccagcgaggagaacggcctgccccacaccagcgccagaacccagctgccccagagcatgaagatcatgcacgagatcatgtacaagctggaggtgctgtacgtgctgtgcgtgctgctgatgggcagacagagaaaccaggtgcacagaatgatcgccgagttcaagctgatccccggcctgaacaacctgttcgacaagctgatctggagaaagcacagcgccagcgccctggtgctgcacggccacaaccagaactgcgactgcagccccgacatcaccctgaagatccagttcctgagactgctgcagagcttcagcgaccaccacgagaacaagtacctgctgctgaacaaccaggagctgaacgagctgagcgccatcagcctgaaggccaacatccccgaggtggaggccgtgctgaacaccgacagaagcctggtgtgcgacggcaagagaggcctgctgaccagactgctgcaggtgatgaagaaggagcccgccgagagcagcttcagattctggcaggccagagccgtggagagcttcctgagaggcaccaccagctacgccgaccagatgttcctgctgaagagaggcctgctggagcacatcctgtactgcatcgtggacagcgagtgcaagagcagagacgtgctgcagagctacttcgacctgctgggcgagctgatgaagttcaacgtggacgccttcaagagattcaacaagtacatcaacaccgacgccaagttccaggtgttcctgaagcagatcaacagcagcctggtggacagcaacatgctggtgagatgcgtgaccctgagcctggacagattcgagaaccaggtggacatgaaggtggccgaggtgctgagcgagtgcagactgctggcctacatcagccaggtgcccacccagatgagcttcctgttcagactgatcaacatcatccacgtgcagaccctgacccaggagaacgtgagctgcctgaacaccagcctggtgatcctgatgctggccagaagaaaggagagactgcccctgtacctgagactgctgcagagaatggagcacagcaagaagtaccccggcttcctgctgaacaacttccacaacctgctgagattctggcagcagcactacctgcacaaggacaaggacagcacctgcctggagaacagcagctgcatcagcttcagctactggaaggagaccgtgagcatcctgctgaaccccgacagacagagccccagcgccctggtgagctacatcgaggagccctacatggacatcgacagagacttcaccgaggagtag

SEQ ID NO: 321527 - DNA, 2349 bp, Artificial Sequence
  derived and/or modified sequence
atggccgccgcccccgtggccgccggcagcggcgccggcagaggcagaagaagcgccgccaccgtggccgcctggggcggctggggccagctgaccggcagaggcctggtgagagccgtgcagttcaccgagaccttcctgaccgagagagacaagcagagcaagtggagcggcatcccccagctgctgctgaagctgcacaccaccagccacctgcacagcgacttcgtggagtgccagaacatcctgaaggagatcagccccctgctgagcatggaggccatggccttcgtgaccgaggagagaaagctgacccaggagaccacctaccccaacacctacatcttcgacctgttcggcggcgtggacctgctggtggagatcctgatgagacccaccatcagcatcagaggccagaagctgaagatcagcgacgagatgagcaaggactgcctgagcatcctgtacaacacctgcgtgtgcaccgagggcgtgaccaagagactggccgagaagaacgacttcgtgatcttcctgttcaccctgatgaccagcaagaagaccttcctgcagaccgccaccctgatcgaggacatcctgggcgtgaagaaggagatgatcagactggacgaggtgcccaacctgagcagcctggtgagcaacttcgaccagcagcagctggccaacttctgcagaatcctggccgtgaccatcagcgagatggacaccggcaacgacgacaagcacaccctgctggccaagaacgcccagcagaagaagagcctgagcctgggccccagcgccgccgagatcaaccaggccgccctgctgagcatccccggcttcgtggagagactgtgcaagctggccaccagaaaggtgagcgagagcaccggcaccgccagcttcctgcaggagctggaggagtggtacacctggctggacaacgccctggtgctggacgccctgatgagagtggccaacgaggagagcgagcacaaccaggccagcatcgtgttccccccccccggcgccagcgaggagaacggcctgccccacaccagcgccagaacccagctgccccagagcatgaagatcatgcacgagatcatgtacaagctggaggtgctgtacgtgctgtgcgtgctgctgatgggcagacagagaaaccaggtgcacagaatgatcgccgagttcaagctgatccccggcctgaacaacctgttcgacaagctgatctggagaaagcacagcgccagcgccctggtgctgcacggccacaaccagaactgcgactgcagccccgacatcaccctgaagatccagttcctgagactgctgcagagcttcagcgaccaccacgagaacaagtacctgctgctgaacaaccaggagctgaacgagctgagcgccatcagcctgaaggccaacatccccgaggtggaggccgtgctgaacaccgacagaagcctggtgtgcgacggcaagagaggcctgctgaccagactgctgcaggtgatgaagaaggagcccgccgagagcagcttcagattctggcaggccagagccgtggagagcttcctgagaggcaccaccagctacgccgaccagatgttcctgctgaagagaggcctgctggagcacatcctgtactgcatcgtggacagcgagtgcaagagcagagacgtgctgcagagctacttcgacctgctgggcgagctgatgaagttcaacgtggacgccttcaagagattcaacaagtacatcaacaccgacgccaagttccaggtgttcctgaagcagatcaacagcagcctggtggacagcaacatgctggtgagatgcgtgaccctgagcctggacagattcgagaaccaggtggacatgaaggtggccgaggtgctgagcgagtgcagactgctggcctacatcagccaggtgcccacccagatgagcttcctgttcagactgatcaacatcatccacgtgcagaccctgacccaggagaacgtgagctgcctgaacaccagcctggtgatcctgatgctggccagaagaaaggagagactgcccctgtacctgagactgctgcagagaatggagcacagcaagaagtaccccggcttcctgctgaacaacttccacaacctgctgagattctggcagcagcactacctgcacaaggacaaggacagcacctgcctggagaacagcagctgcatcagcttcagctactggaaggagaccgtgagcatcctgctgaaccccgacagacagagccccagcgccctggtgagctacatcgaggagccctacatggacatcgacagagacttcaccgaggagtag

SEQ ID NO: 321528 - DNA, 2394 bp, Artificial Sequence
  derived and/or modified sequence
atggccgcagctcctgtcgccgccgggtctggagctggaagaggacggagatctgcagctacagtggccgcatggggcgggtgggggggccggccgcgtcctggcaatatattgttgcaactcaggcagggccaactcacaggccgcggcctggtgagagctgtccaatttaccgaaacctttctgaccgagagagataagcaatccaagtggtcaggtatcccacagctgcttctcaaattgcacacaacatctcacctgcacagtgacttcgtggagtgtcagaacatccttaaagaaatcagtccattgttgtcaatggaagcaatggctttcgtgaccgaagagagaaagctgacacaagagaccacttacccaaacacgtacatttttgacctgtttggaggagtcgacttgctggtggagatcttgatgcggcccacaatctctatccggggccagaagctcaaaatatctgatgaaatgagcaaggattgtctgtctattttgtacaacacctgcgtgtgcaccgagggggttacaaaaagacttgccgaaaagaacgatttcgtaatttttctgttcaccttgatgaccagcaagaaaaccttcctccaaactgctacgctgatcgaggacatcctgggtgtgaagaaagagatgattcgcctcgacgaggtgccaaacctgagcagtctggtgagtaactttgatcagcaacagctcgcaaacttctgtcggattctcgcagtaaccatctccgagatggacactggtaacgacgacaagcatactttattggccaaaaatgcgcagcaaaagaagagcctcagtttaggcccttccgccgccgagatcaaccaggctgcgctcctcagtatccctgggttcgtcgaacggttatgcaaactcgctacccggaaagtttccgaatcaacagggacggcttcgttcctacaggagctggaggagtggtacacgtggctggataacgcgctcgtactggacgcgctgatgagggtggccaatgaggaatctgagcacaatcaggctagtatcgtattccccccaccaggggcctctgaggaaaacggccttccccatacctcagcccggactcagctgccccaatcgatgaagattatgcacgagattatgtataaactggaggtgctttacgtgctgtgcgtgcttctgatgggtcggcaaagaaaccaggtccatcgaatgattgctgagtttaagcttatccctgggttaaacaacctcttcgataagcttatctggagaaagcacagcgcttccgcactggtcctgcacggacataaccaaaattgtgattgctcccccgatatcacgttgaaaattcagttcctccgcctcttacagagcttttccgatcaccacgaaaataagtatttgctgcttaacaaccaggaactgaatgaactcagtgcgatcagcctgaaggcaaacattcccgaagtcgaggcagttcttaacacagaccgaagtcttgtgtgtgacgggaagagaggccttctgacccgccttttacaagtgatgaagaaggaaccagccgaatcatcttttagattttggcaggcccgggctgttgaatcctttctcagagggacaacctcatatgccgaccagatgtttctgctgaagaggggtctactcgaacacattctgtactgcatcgttgattctgagtgtaagtctcgggatgtgctccaaagctacttcgaccttttgggagagctcatgaagttcaacgtagacgcatttaaaagatttaacaagtacatcaatactgatgcaaaatttcaggtctttctcaaacagattaattccagccttgtggactcaaacatgctcgtgcgctgcgtgaccctgagcctggaccgttttgagaaccaggtggatatgaaggtcgccgaggtcctttctgagtgcagactactagcatacatctctcaggtgcccacccagatgtcattcctgtttcgattaattaacattattcacgtccaaactctgacgcaggagaacgtcagttgccttaacacctcccttgtgatactgatgcttgctaggcgcaaggaacggctgcctctgtacctgcgcctcctgcagagaatggaacattctaagaagtaccccggcttccttctgaataacttccataacctgcttcgattttggcagcaacattacctccacaaagataaggattcaacctgtttagaaaatagttcttgcatctccttcagttattggaaggagacagtgtcaatattgttgaaccccgaccgccagagtcctagcgccctcgtgagctacatcgaggagccatatatggacattgatcgcgacttcacagaagagtag

SEQ ID NO: 321529 - DNA, 2277 bp, Artificial Sequence
  derived and/or modified sequence
atggctgctgccccagtcgctgcaggaagcggcgccggaagaggccgaagatccgctgctactgtcgcagcctggggaggttggggcggccggcctcgtccaggcaacatcttactgcagctgcgccagggccagctaactggcaggggtctggttcgcgccgtccaattcaccgaaacattcctaaccgagcgcgataagcagtctaaatggtctgggataccacagctgctgctgaagttacacaccacttcccatctgcacagcgattttgtcgagtgccagaacatccttaaactcttggtggaaatcttgatgcgtccaacgatatcaatcagaggccagaaattgaagatttccgacgaaatgagtaaggattgcctgtccatactctacaatacctgcgtgtgcactgagggagtgactaaaaggctcgccgaaaagaacgatttcgttatcttcttatttacgctcatgacctctaagaaaacgtttctgcagaccgccaccttgatcgaagatattctcggggtgaaaaaggagatgattcgtctggacgaagtgccgaacctgagttccctggttagcaactttgaccagcagcagctggccaacttttgtcggattctggccgtgactatttccgagatggataccggcaatgatgataaacataccctcctggctaaaaacgcgcaacagaagaagagcctgtcgctgggcccttccgcggcagaaatcaaccaggccgccctcctgtccatccccgggtttgtcgagcgcctatgcaaacttgctacccgcaaagtgagcgaaagtaccgggacagcaagcttcctccaagagctggaggaatggtatacgtggctggacaacgctctggtcctcgatgccctcatgcgtgttgcgaatgaggagagtgaacacaaccaagcgagcatcgttttccctcccccgggggcctctgaggaaaatggtctgcctcacaccagcgccaggacccagctgccccaaagcatgaagattatgcatgagattatgtacaagctggaggtcttgtacgtgctttgcgtgctcctcatggggaggcaacgtaatcaagtgcatcgtatgattgccgagtttaaactgatccccgggctaaataacctgtttgacaagctgatttggcggaagcactccgcatctgccctggtgttacacggccataatcagaactgcgactgctcaccagacatcacgctaaagatccagttcctgcggttgcttcagtcttttagcgatcaccacgaaaacaagtatctgctactgaacaaccaagaactcaacgagctttccgccattagcctcaaggccaatatccctgaagtggaagcggtcctgaacaccgatcgttcgcttgtctgtgatgggaagagggggttgctgacacgactcctacaggtgatgaagaaggaaccggctgaatctagctttcgattctggcaggctagggcagtcgaatcctttctgcgcgggaccaccagctacgccgatcagatgttcctgctcaaacgggggttgctggaacacatcttatattgcattgtggattccgagtgcaaaagtcgggatgtgcttcaatcatatttcgatctgctgggagaactgatgaagtttaacgtcgacgcgtttaagcggtttaataaatacatcaacacggacgccaagtttcaagtgtttttgaagcaaataaactcgagccttgtggactctaacatgttggttaggtgtgtgaccctgtcacttgatcgattcgagaatcaggtggatatgaaggttgcagaggttctcagcgaatgccggctgctcgcatacatctctcaggtgccaacgcaaatgagttttctgtttaggctgataaacatcattcacgtgcagactctgacacaggaaaacgtcagttgcttgaacacttcccttgtgatcctgatgttggctaggagaaaggagcgattgccgctgtacctgcgccttctgcagagaatggaacactccaaaaagtacccagggtttctccttaataatttccataacctgctgcgattctggcagcaacattatttgcacaaagataaggactctacgtgtttggaaaactcaagctgcatatcgttttcatattggaaagaaacggtctctattctgctgaatcccgatcggcagtccccatccgcgctggttagctatatagaagaaccctacatggatatagaccgagatttcacagaggagtag

SEQ ID NO: 321530 - DNA, 2349 bp, Artificial Sequence
  derived and/or modified sequence
atggcagcagcacctgtggccgccgggagcggtgctggaaggggccgaaggtcagccgcaacagttgccgcctggggaggatggggccagctcaccgggagagggctcgttagggccgttcaattcactgagactttccttactgaaagagacaagcagtccaaatggtctggcatacctcaacttttattaaagctgcacactacctcacacttgcacagcgactttgtcgaatgtcagaacattctcaaggagataagccccctactgagtatggaggcgatggccttcgtgaccgaagagcgcaaactcactcaggagactacatatccgaacacatacattttcgatctgtttggtggagtggatctgctcgtggaaatcctaatgcgacccaccatttccattcgtggacaaaaactgaagattagcgacgaaatgtctaaggactgtttgtctatcctgtacaacacatgcgtttgtaccgaaggagttacgaaacggcttgctgagaagaacgatttcgtaattttcttatttacccttatgacaagcaagaagacttttctgcaaacagcaaccctgatcgaagatatcctaggtgtgaaaaaagaaatgatacggttggatgaggtgcccaatctctctagcctggtgtcaaactttgaccagcagcagttggctaatttttgtagaatcctggccgtgacaatctccgaaatggataccgggaacgacgataagcatacactgctagctaagaacgcacagcagaagaaatcgctgtccctcggccccagcgctgccgaaatcaaccaggccgctctgttgtcgatccccggatttgtcgaaaggctctgtaagctcgctacgcgaaaggtgtcggaatctacagggactgcttcgttcttgcaagagctggaggagtggtacacgtggctggacaacgccctagtgttggacgctctcatgagagtagccaacgaggagtctgaacacaaccaagcaagcatcgtgttccctcctccgggagccagtgaggagaatgggctgccccatacctctgccagaactcagctgccgcagagcatgaaaatcatgcatgagattatgtataagctggaggtgctctatgtgctttgcgtcctcctgatggggaggcagcgaaatcaggtgcacaggatgatcgccgaatttaagctcatccctggtctgaacaatctgttcgacaagctcatatggcgaaagcactcagctagcgccctcgtcttgcacgggcacaaccaaaactgcgactgcagccctgatattacactgaagatccaatttctgagactgctccagagcttttcagatcaccatgagaataagtacctgctcctgaataaccaggaacttaacgagctgtccgctatctccctcaaggccaatataccagaggttgaggcggttctgaacactgaccgatcactggtctgtgatggcaaacgaggcctccttactcgcctgctgcaagtcatgaaaaaagagcctgcagagtcaagctttcggttctggcaagctagggcagtcgagagcttcctccggggaactaccagttatgccgatcagatgtttttgttgaagcgcggcttgctggagcacatcttatactgtattgtcgatagtgagtgtaagtcccgggacgtgttgcaatcctatttcgaccttctcggggaactcatgaagttcaatgtagatgccttcaagcgcttcaacaagtatataaatacagatgctaaattccaagtgtttctcaagcaaatcaatagtagtctggtggacagcaacatgctggtgcggtgtgtgacactgtccttagaccgtttcgaaaaccaggtagatatgaaggtggcagaagtattgagcgaatgtaggctgctggcctacatttctcaggtgcctacccagatgtcatttctttttcgcctgatcaacatcatccatgtgcagacactgacgcaagagaatgtgtcttgtctaaatacctccttggtgattctgatgctcgcgaggcgcaaagagcgactccctctgtatcttcggctgctgcaacggatggagcactcaaagaagtaccctggatttctcctgaacaacttccacaatctgctgcggttctggcagcaacactacctgcacaaagacaaagacagcacatgcttggagaattcctcctgcataagtttttcttattggaaggagaccgtgtcaattctgctcaatcctgacagacagagcccctcagcattagtttcttatatcgaggagccatacatggacatagatcgagatttcaccgaagagtag

SEQ ID NO: 321531 - DNA, 2394 bp, Artificial Sequence
  derived and/or modified sequence
atggctgctgcccctgtggccgccggcagcggggccggccggggccgccgctctgctgccaccgtggccgcctggggcggctggggcggccggccccggcccggcaacatcctgctgcagctgcggcagggccagctgaccggccggggcctggtgcgggctgtgcagttcacagagaccttcctgacagagcgggacaagcagagcaagtggagcggcatcccccagctgctgctgaagctgcacaccaccagccacctgcacagcgactttgtggagtgccagaacatcctgaaggagatcagccccctgctgtccatggaggccatggcctttgtgacagaggagaggaagctgacccaggagaccacctaccccaacacctacatctttgacctgtttggaggagtggacctgctggtggagatcctgatgaggcccaccatcagcatccggggccagaagctgaagatcagtgatgagatgagcaaggactgcctgagcatcctgtacaacacctgtgtgtgcacagaaggagtgaccaagaggctggccgagaagaatgactttgtgatcttcctgttcaccctgatgaccagcaagaagaccttcctgcagacagccaccctgattgaggacatcctgggcgtgaagaaggagatgatccggctggatgaggtgcccaacctgagcagcctggtgagcaactttgaccagcagcagctggccaacttctgccgcatcctggccgtgaccatcagcgagatggacacaggaaatgatgacaagcacaccctgctggccaagaatgcccagcagaagaagagcctgagcctgggccccagcgctgctgagatcaaccaggccgccctgctgagcatccctggctttgtggagcggctgtgcaagctggccaccaggaaggtgtctgagagcactggaacagccagcttcctgcaggagctggaggagtggtacacctggctggacaatgccctggtgctggatgccctgatgagggtggccaatgaggagagcgagcacaaccaggccagcatcgtgttccccccacctggggcctctgaagaaaatggcctgccccacaccagcgcccggacccagctgccccagagcatgaagatcatgcatgagatcatgtacaagctggaggtgctgtatgtgctgtgtgtgctgctgatgggccggcagaggaaccaggtgcacaggatgattgctgagttcaagctgatccctggcctgaacaacctgtttgacaagctgatctggaggaagcacagcgccagcgccctggtgctgcacggccacaaccagaactgtgactgcagcccagacatcaccctgaagatccagttcctgcggctgctgcagagcttcagtgaccaccacgagaacaagtacctgctgctgaacaaccaggagctgaatgagctgagcgccatcagcctgaaggccaacatccctgaggtggaggccgtgctgaacacagacaggagcctggtgtgtgatggcaagaggggcctgctgacccggctgctgcaggtgatgaagaaggagcctgctgagagcagcttccgcttctggcaggcccgggctgtggagagcttcctgcggggcaccaccagctatgctgaccagatgttcctgctgaagaggggcctgctggagcacatcctgtactgcatcgtggacagcgagtgcaagagcagagatgtgctgcagagctactttgacctgctgggggagctgatgaagttcaacgtggatgccttcaagcgcttcaacaagtacatcaacacagatgccaagttccaggtgttcctgaagcagatcaacagcagcctggtggacagcaacatgctggtgcgctgtgtgaccctgagcctggacagatttgagaaccaggtggacatgaaggtggccgaggtgctgtctgagtgccgcctgctggcctacatcagccaggtgcccacccagatgtccttcctgttccgcctcatcaacatcatccacgtgcagaccctgacccaggagaatgtgtcctgcctgaacaccagcctggtgatcctgatgctggcccggaggaaggagcggctgcccctgtacctgcggctgctgcagaggatggagcacagcaagaagtacccaggcttcctgctgaacaacttccacaacctgctgcgcttctggcagcagcactacctgcacaaggacaaggacagcacctgcctggagaacagcagctgcatctccttctcctactggaaggagaccgtgtccatcctgctgaacccagaccggcagagccccagcgccctggtgtcctacatcgaggagccctacatggacatcgaccgggacttcacagaggagtag

SEQ ID NO: 321532 - DNA, 2277 bp, Artificial Sequence
  derived and/or modified sequence
atggctgctgcccctgtggccgccggcagcggggccggccggggccgccgctctgctgccaccgtggccgcctggggcggctggggcggccggccccggcccggcaacatcctgctgcagctgcggcagggccagctgaccggccggggcctggtgcgggctgtgcagttcacagagaccttcctgacagagcgggacaagcagagcaagtggagcggcatcccccagctgctgctgaagctgcacaccaccagccacctgcacagcgactttgtggagtgccagaacatcctgaagctgctggtggagatcctgatgaggcccaccatcagcatccggggccagaagctgaagatcagtgatgagatgagcaaggactgcctgagcatcctgtacaacacctgtgtgtgcacagagggcgtgaccaagaggctggccgagaagaatgactttgtgatcttcctgttcaccctgatgaccagcaagaagaccttcctgcagacagccaccctgattgaggacatcctgggcgtgaagaaggagatgatccggctggatgaggtgcccaacctgagcagcctggtgagcaactttgaccagcagcagctggccaacttctgccgcatcctggccgtgaccatcagcgagatggacacaggaaatgatgacaagcacaccctgctggccaagaatgcccagcagaagaagagcctgagcctgggccccagcgctgctgagatcaaccaggccgccctgctgagcatccctggctttgtggagcggctgtgcaagctggccaccaggaaggtgtctgagagcactggaacagccagcttcctgcaggagctggaggagtggtacacctggctggacaatgccctggtgctggatgccctgatgagggtggccaatgaggagagcgagcacaaccaggccagcatcgtgtttcctcctcctggggccagcgaggagaatggcctgccccacaccagcgcccggacccagctgccccagagcatgaagatcatgcatgagatcatgtacaagctggaggtgctgtatgtgctgtgtgtgctgctgatgggccggcagaggaaccaggtgcacaggatgattgctgagttcaagctgatccctggcctgaacaacctgtttgacaagctgatctggaggaagcacagcgccagcgccctggtgctgcacggccacaaccagaactgtgactgcagcccagacatcaccctgaagatccagttcctgcggctgctgcagagcttcagtgaccaccacgagaacaagtacctgctgctgaacaaccaggagctgaatgagctgagcgccatcagcctgaaggccaacatccctgaggtggaggccgtgctgaacacagacaggagcctggtgtgtgatggcaagaggggcctgctgacccggctgctgcaggtgatgaagaaggagcctgctgagagcagcttccgcttctggcaggcccgggctgtggagagcttcctgcggggcaccaccagctatgctgaccagatgttcctgctgaagaggggcctgctggagcacatcctgtactgcatcgtggacagcgagtgcaagagcagagatgtgctgcagagctactttgacctgctgggggagctgatgaagttcaacgtggatgccttcaagcgcttcaacaagtacatcaacacagatgccaagttccaggtgttcctgaagcagatcaacagcagcctggtggacagcaacatgctggtgcgctgtgtgaccctgagcctggacagatttgagaaccaggtggacatgaaggtggccgaggtgctgtctgaatgtcggctgctggcctacatcagccaggtgcccacccagatgtccttcctgttccgcctcatcaacatcatccacgtgcagaccctgacccaggagaatgtgtcctgcctgaacaccagcctggtgatcctgatgctggcccggaggaaggagcggctgcccctgtacctgcggctgctgcagaggatggagcacagcaagaagtacccaggcttcctgctgaacaacttccacaacctgctgcgcttctggcagcagcactacctgcacaaggacaaggacagcacctgcctggagaacagcagctgcatctccttctcctactggaaggagaccgtgtccatcctgctgaacccagaccggcagagccccagcgccctggtgtcctacatcgaggagccctacatggacatcgaccgggacttcacagaggagtag

SEQ ID NO: 321533 - DNA, 2349 bp, Artificial Sequence
  derived and/or modified sequence
atggctgctgcccctgtggccgccggcagcggggccggccggggccgccgctctgctgccaccgtggccgcctggggcggctggggccagctgaccggccggggcctggtgcgggctgtgcagttcacagagaccttcctgacagagcgggacaagcagagcaagtggagcggcatcccccagctgctgctgaagctgcacaccaccagccacctgcacagcgactttgtggagtgccagaacatcctgaaggagatcagccccctgctgtccatggaggccatggcctttgtgacagaggagaggaagctgacccaggagaccacctaccccaacacctacatctttgacctgtttggaggagtggacctgctggtggagatcctgatgaggcccaccatcagcatccggggccagaagctgaagatcagtgatgagatgagcaaggactgcctgagcatcctgtacaacacctgtgtgtgcacagagggcgtgaccaagaggctggccgagaagaatgactttgtgatcttcctgttcaccctgatgaccagcaagaagaccttcctgcagacagccaccctgattgaggacatcctgggcgtgaagaaggagatgatccggctggatgaggtgcccaacctgagcagcctggtgagcaactttgaccagcagcagctggccaacttctgccgcatcctggccgtgaccatcagcgagatggacacaggaaatgatgacaagcacaccctgctggccaagaatgcccagcagaagaagagcctgagcctgggccccagcgctgctgagatcaaccaggccgccctgctgagcatccctggctttgtggagcggctgtgcaagctggccaccaggaaggtgtctgagagcactggaacagccagcttcctgcaggagctggaggagtggtacacctggctggacaatgccctggtgctggatgccctgatgagggtggccaatgaggagagcgagcacaaccaggccagcatcgtgtttcctcctcctggggccagcgaggagaatggcctgccccacaccagcgcccggacccagctgccccagagcatgaagatcatgcatgagatcatgtacaagctggaggtgctgtatgtgctgtgtgtgctgctgatgggccggcagaggaaccaggtgcacaggatgattgctgagttcaagctgatccctggcctgaacaacctgtttgacaagctgatctggaggaagcacagcgccagcgccctggtgctgcacggccacaaccagaactgtgactgcagcccagacatcaccctgaagatccagttcctgcggctgctgcagagcttcagtgaccaccacgagaacaagtacctgctgctgaacaaccaggagctgaatgagctgagcgccatcagcctgaaggccaacatccctgaggtggaggccgtgctgaacacagacaggagcctggtgtgtgatggcaagaggggcctgctgacccggctgctgcaggtgatgaagaaggagcctgctgagagcagcttccgcttctggcaggcccgggctgtggagagcttcctgcggggcaccaccagctatgctgaccagatgttcctgctgaagaggggcctgctggagcacatcctgtactgcatcgtggacagcgagtgcaagagcagagatgtgctgcagagctactttgacctgctgggggagctgatgaagttcaacgtggatgccttcaagcgcttcaacaagtacatcaacacagatgccaagttccaggtgttcctgaagcagatcaacagcagcctggtggacagcaacatgctggtgcgctgtgtgaccctgagcctggacagatttgagaaccaggtggacatgaaggtggccgaggtgctgtctgaatgtcggctgctggcctacatcagccaggtgcccacccagatgtccttcctgttccgcctcatcaacatcatccacgtgcagaccctgacccaggagaatgtgtcctgcctgaacaccagcctggtgatcctgatgctggcccggaggaaggagcggctgcccctgtacctgcggctgctgcagaggatggagcacagcaagaagtacccaggcttcctgctgaacaacttccacaacctgctgcgcttctggcagcagcactacctgcacaaggacaaggacagcacctgcctggagaacagcagctgcatctccttctcctactggaaggagaccgtgtccatcctgctgaacccagaccggcagagccccagcgccctggtgtcctacatcgaggagccctacatggacatcgaccgggacttcacagaggagtag

SEQ ID NO: 321534 - DNA, 2394 bp, Artificial Sequence
  derived and/or modified sequence
atggccgccgcccccgtggccgccggcagcggcgccggccggggccgcaggtccgcagccacagtggctgcttggggaggctggggcggccgccctcgccctggcaacatcctcctacaattgagacagggacaactcactggacgaggactggtgcgagctgtccaattcacagagactttcttgacagagagggacaagcagtctaagtggagcggaataccacagttgctgctgaagctgcatacaaccagccatctgcattctgactttgtcgagtgccagaatatacttaaggaaatttcccctctgctgagcatggaggccatggcctttgtgacagaagaaagaaaactcactcaagagacaacctaccccaacacctacattttcgatctttttgggggcgtggacttgttggtggaaatcctgatgaggccgaccatctcaattcgaggccagaagctcaagatttcggacgagatgtccaaagattgtctttctatcctgtacaacacctgtgtctgcacagaaggtgtaaccaaacggctcgccgaaaaaaatgacttcgttattttcctcttcacactgatgacttcgaaaaagacgttcctgcaaacagctaccctcattgaagatattttaggtgtgaagaaagaaatgattcgtctggacgaagtgcctaacctcagctccttggtcagtaactttgaccaacagcagttagcaaatttttgtagaatactggcagttaccatttcagagatggatacagggaatgacgacaaacacacactgctggcaaaaaacgctcagcaaaaaaaaagtctcagcctcggccctagtgccgcggaaattaatcaggccgccctcctgagtatcccaggctttgttgagcggctgtgcaaactggctactaggaaagtatccgaaagcaccgggaccgccagtttcttgcaggagcttgaggaatggtatacttggctcgataacgcactcgttttggatgccctgatgagggtcgccaatgaagagtctgagcataatcaggcttcaatcgtcttcccccccccaggggcctccgaggagaatgggctcccccacacatccgctcgcacacagctaccacagtcaatgaagatcatgcacgagatcatgtataagctggaggtattgtacgtactgtgtgtgctgttaatgggaaggcaaaggaaccaggtacatcggatgatcgcagagttcaagctcattcccggcctcaataatctcttcgacaaacttatctggcgaaagcacagcgctagtgctttagtgttgcatggccataatcagaactgtgactgcagtcccgacattacattgaagatccaatttttgcggctgcttcagagcttcagcgatcatcacgagaacaaatacctgctgctgaacaaccaggaactgaatgaattatctgccatcagtcttaaagccaatattccagaggttgaagctgtgctgaacaccgatagaagcctggtgtgtgacggaaaacggggcctcctcactcgtctgctgcaggtgatgaagaaggaaccggctgagtccagcttcagattctggcaggcgagagcagtagaaagcttcctccgaggcaccacatcctatgctgatcagatgtttctcctgaagcgcgggttgctggaacacatcctttactgcatcgtggactctgaatgcaaaagtagggatgtgctccagtcctacttcgatttattaggcgagctcatgaagtttaatgtggacgcatttaaacggttcaataagtatataaatactgatgcaaaattccaggtgttcctgaaacagattaatagctcactcgttgacagcaacatgcttgtccggtgcgttacactaagcctggatcggtttgaaaaccaggtagacatgaaggtcgccgaagttttaagtgaatgccgactccttgcctatattagccaggttccgactcagatgtcgttcctgtttcgactgatcaatattatccacgtgcagaccctgacgcaggagaatgtctcatgcttgaatacgtccctagtcatcctcatgttagctcgccgaaaagaaaggctgcctctctatctccgtcttttacagcggatggaacacagtaaaaagtaccccggatttctgctgaataacttccataaccttctgcggttctggcagcagcactatctgcacaaagacaaggatagcacatgcttagaaaattcatcgtgcatcagtttctcatattggaaggagaccgtgtccatcctcctgaaccccgataggcagtcaccatctgctctggtgagctacatcgaggaaccatacatggatatcgaccgggattttactgaggagtag

SEQ ID NO: 321535 - DNA, 2277 bp, Artificial Sequence
  derived and/or modified sequence
atggccgccgcccccgtggccgccggcagcggcgccggccggggccgaagatccgcagccacagtggctgcctggggcggatgggggggcagacctcgccctggaaacatactcctccagctgcgtcagggccagttgaccgggcgcggcttggtacgggcagttcagtttactgagactttcctgacagagcgcgataaacagagcaaatggtcagggattccccaactgctgctaaaactgcacacaacatcacacctccactctgatttcgtagagtgtcaaaacatcctgaaattactggtagagatactcatgcgtcctactatctccatacgtgggcagaaattgaagatttccgacgagatgagcaaggactgcctcagcattctgtataatacatgtgtctgcacggaaggtgtgacaaagagactggctgagaagaatgactttgtgatcttcctgtttaccctgatgacatccaaaaaaacatttcttcagacagctacattgatcgaggatatcttaggtgtgaaaaaggagatgatcaggctagatgaggtaccaaacctgtcctctttggttagtaactttgatcaacagcagctcgcaaatttctgtcgcatccttgcggtgacaatctcggaaatggatacagggaatgacgacaagcacacattgctggccaagaacgcccaacaaaagaagtctctatcgctagggccttctgccgctgagatcaatcaagctgcattgctgtccatccccgggtttgtggaaagactgtgcaaactcgctacacgcaaagttagcgagtcaacgggaaccgccagcttccttcaggaactggaagaatggtacacatggctcgacaatgctttagtactggatgcacttatgcgggttgccaacgaggaatccgagcataatcaagcatccatcgtgtttccgccaccaggagccagtgaagaaaatggactgccccatactagtgccagaacccagttaccccagtcaatgaaaatcatgcacgagatcatgtacaagctggaggtactttacgtgttatgtgtgttactcatggggagacaaaggaatcaggtgcacaggatgatcgccgagttcaaactcattcctggtttgaacaatctatttgataaacttatctggaggaagcactccgcctcagctttggtgttgcacggccacaaccaaaactgtgactgctcgccagacataaccctcaagattcagtttctgcgcctgttacagtcattcagcgaccaccatgaaaacaaatacttgctgttgaacaaccaggaactgaacgagctgtcagccatctcccttaaagcgaatattccagaagtagaagcggtcctgaacaccgatcgttccttagtctgcgatggaaaacgcgggctgttaactaggctactgcaggtgatgaaaaaagaaccggccgagagtagttttcggttttggcaagcgagagctgttgagtcattcttgagaggtacaaccagctacgccgaccaaatgttcctcctgaaacgtggactgctcgagcacatcctgtactgcatcgtagattccgaatgcaagagtagagacgtcttacagtcctacttcgacctgctcggagaactgatgaagtttaatgttgacgccttcaagaggttcaacaagtatatcaataccgatgctaagttccaagtcttcttgaaacaaattaacagctcactggtggattctaacatgctggtccgctgcgttactcttagcctggatagattcgagaatcaggtggatatgaaagtcgcggaggtgctgtcagagtgtcggctcctggcctacatttctcaggtcccgacccagatgagcttcctgttcaggttgatcaatattatccacgttcagactctaacccaggaaaacgtgtcttgcttaaatacctcccttgtgattttgatgctggcacgaagaaaggaacggctcccactgtacctgcggttgttacagcggatggaacacagtaagaaatatcccggatttctgttaaacaacttccacaaccttcttcgattttggcagcagcactaccttcacaaagacaaggactctacctgcctggaaaatagctcatgcatatccttttcatactggaaggaaacagtaagcatccttctgaatccagacagacagtcaccctccgccctggtgtcttacatcgaggaaccctacatggatattgatcgggacttcactgaggaatag

SEQ ID NO: 321536 - DNA, 2349 bp, Artificial Sequence
  derived and/or modified sequence
atggccgccgcccccgtggccgccggcagcggcgccggccggggcagacggtctgccgctaccgttgctgcctggggcgggtgggggcaactcactggccgcgggctggtgcgtgccgttcagttcactgagacatttctcacagagcgagataagcagagtaaatggtccggtatcccccaacttcttctcaaactgcataccaccagccatctacattctgacttcgttgagtgccagaacatactcaaagagatttcacctctcctgtccatggaagccatggcttttgtgaccgaagagaggaagcttacccaggagactacgtaccctaatacgtatatttttgacctgttcggtggtgtggacctcctcgtcgagattctaatgcgacccacgattagcattcgtggacagaagttaaaaatatcagatgaaatgtccaaagattgcttgagtatcttgtacaatacttgcgtctgcactgaaggggtgacgaaacggttagcagaaaaaaatgatttcgttatctttctgttcaccttgatgacgtccaagaagacgtttctgcagaccgcaacgctgattgaagacattctgggagtgaagaaggaaatgatccggcttgatgaagtgcccaatcttagttcactggtgtcaaactttgaccagcagcagctcgcaaatttttgtcggatcctggccgtgaccatctctgaaatggacacaggcaacgatgacaagcacacattgctcgccaaaaatgcgcagcagaaaaagtcgctgagccttggtccttctgcggccgaaataaaccaggctgccctgctatccatccctgggtttgtcgaacggctgtgtaagctcgcgacgagaaaagtgagcgagagcacaggcaccgcatccttcctccaggaactggaggagtggtacacctggctggacaacgctctggttcttgatgctcttatgcgtgtggccaacgaggaatcagagcacaatcaggcatccattgttttccccccccctggcgcctccgaagaaaacggattgccacacaccagcgcaagaactcagttgccacagtccatgaaaatcatgcatgagataatgtataagttggaggtgctatacgtactctgcgtgttactgatgggccggcaaagaaaccaggtacaccgaatgatcgcagaattcaagttaattcctggcctcaataacctttttgacaagttaatctggaggaagcactcagcgagcgcccttgtcctgcatggccacaatcaaaattgtgactgttcgcctgacatcacactgaagattcagttcctgcgcttacttcagtctttttccgatcaccatgagaacaaatacctgttgttgaataatcaggagttgaatgaactatctgccataagtttgaaagccaatatccccgaagttgaagcagtcctgaatacagacagatccctggtgtgcgacgggaaacgtggattgctgacccggcttcttcaggttatgaagaaggagcccgccgagagttctttcaggttctggcaagcacgggctgtggaatccttccttagaggaacaaccagctatgcggaccaaatgtttctgctgaaaagaggactcttggagcatatcttatactgcatcgttgattcagaatgcaagtcccgcgacgtgttacagtcttactttgacctgctgggagagctgatgaagtttaacgtagacgcctttaaacgcttcaacaaatacattaacacggatgcgaagttccaggtgtttttgaaacagatcaattcgagcctcgttgattcaaatatgctcgtcagatgtgtgaccctgagcctggatcggtttgaaaaccaagtcgatatgaaggtcgccgaagtgttgtccgaatgcaggttactagcatacataagtcaagtgcccacacagatgagctttctcttcaggctcataaacattattcacgtgcaaaccctcacgcaggaaaacgtctcatgtctgaataccagtttggtcatcctgatgctggcccgaagaaaggagcggcttcccctctacctccgtctccttcagcgcatggaacacagcaagaagtatccagggtttctcctcaataatttccacaaccttcttcgtttctggcagcagcattatctccataaggacaaagatagtacctgtctagagaactctagctgcattagctttagctattggaaggagaccgtaagtattctcctgaatcccgatcggcaatctccttcggccttagtatcttatattgaagagccatacatggatattgaccgggattttaccgaagagtag

SEQ ID NO: 321537 - DNA, 2394 bp, Artificial Sequence
  derived and/or modified sequence
atggctgctgccccagttgctgccggttcgggcgcaggaagaggaagaaggtctgcagccaccgtagcagcctggggcggttggggcggaaggcccagacctggcaatattcttttacaactgaggcaaggccagctcacaggtcggggattagtcagagccgtgcaatttacggaaacgtttctcacagaacgggataaacagtccaagtggtctggaatcccccagctgctcctgaagctacacacaacgtcccacttgcacagcgattttgtcgagtgtcagaacattctgaaggagatctcccccctcctcagtatggaagcaatggcatttgtcaccgaggaacgcaagctgacccaggaaaccacgtaccctaacacatacattttcgaccttttcggtggcgtggatctcctcgttgaaattttaatgcgaccgacaattagcattaggggacagaagcttaagatcagcgacgagatgtccaaagactgcttgtctatattgtataacacttgcgtctgcacagagggggtgactaagaggctggctgaaaaaaatgatttcgtcatatttctgttcacgctgatgacaagcaagaagacctttctccaaactgccacgttgatcgaggacattctgggagtgaagaaagaaatgattcggttagatgaggtacctaacctgtccagtctggtctccaacttcgatcagcagcagctggctaatttttgtcggatcctggctgtcactatttcagaaatggacaccgggaatgacgacaagcacaccctactggcaaagaacgctcaacagaagaaaagcctgtccctcgggccttcagcagccgaaattaatcaagctgccctcctctccattcctggtttcgtcgagcggttgtgcaagctagccacgcgcaaggtgtccgagagtaccggcaccgcctcattcctacaggagctagaggagtggtacacatggttagacaacgctctcgtattggacgccctaatgagagtagcaaacgaagaatctgaacacaaccaggccagtattgtgtttccaccccctggcgcaagcgaggagaacgggctgcctcacacaagtgcgagaacccagctgcctcagtcaatgaagattatgcatgagataatgtacaaactcgaggtgttatatgtgctgtgcgtgcttctcatggggagacagagaaaccaagtgcataggatgattgcggagtttaagcttattcccggactaaacaacctgttcgataagcttatttggagaaagcacagcgccagtgccctggtactgcacggccataaccaaaactgtgactgcagccccgacataacgctgaagattcagtttcttcgactgctgcagtctttttcagaccatcacgagaacaaatacctgttattaaacaaccaggagctcaatgagctttccgccatctctctcaaagccaacatacctgaagtggaggcagttctgaacaccgaccgcagccttgtatgtgatggaaagagaggcctgctgaccaggctcctccaggtgatgaagaaagaacccgctgagtcctcattcagattttggcaggcaagggctgtggaatcgttccttagggggacaacctcttatgccgatcaaatgttccttctcaagcggggacttttggaacacattctgtattgcatcgtggacagcgagtgtaaatccagagatgtcctccaaagttattttgatctgctaggagaactgatgaagttcaacgtggacgctttcaagagatttaacaaatacatcaataccgacgccaaattccaggtgtttcttaagcaaattaactcatctctggtggatagcaacatgcttgtccggtgcgtgactttgtctttagacagattcgagaatcaggtggacatgaaggttgctgaagtgctctcagagtgccggctgctagcgtacatatctcaagtgcctactcaaatgtcatttctattcagattgatcaacatcatccatgtgcagacacttacacaggaaaacgtcagttgcctgaatacatcattggtgattcttatgctggcccgaaggaaggagcgccttccgctgtacctccgccttcttcagaggatggagcactctaagaagtaccctgggttcctgctcaataattttcacaacttactccgcttctggcagcagcattacctgcataaggacaaagattccacatgtctggagaattcgagctgtatatccttctcttattggaaggaaactgtgtctatcttgttaaatcctgatcggcagtctccgagcgctctcgtcagttatatcgaggagccatatatggatattgatcgagattttaccgaagaatag

SEQ ID NO: 321538 - DNA, 2277 bp, Artificial Sequence
  derived and/or modified sequence
atggccgctgccccagtggctgccggatcaggggcaggtagaggcagaaggtccgccgctacggtcgctgcctggggcggttgggggggtcggccaagacctggtaacatcctgctgcagcttagacagggccaactgaccggccgaggcctggtgagggccgtacaattcaccgagacgtttctcacagagcgggacaaacaatcaaaatggagcggcatcccacagctgctgctgaagctgcacactacatcgcatttacactctgattttgtcgagtgtcagaacattcttaagctcctcgtcgaaatcctcatgaggccgacaatctcaatacggggacagaagctaaagatatctgatgaaatgtctaaagattgccttagtatcctgtataacacctgcgtgtgcacagagggcgtaaccaaaagactggcagagaagaatgatttcgtcatctttctcttcactctgatgaccagtaagaagacctttcttcagacagctacactgattgaggatatcctcggagtgaagaaagaaatgatccggctggatgaggtgccgaacctcagctccctcgtgtccaacttcgaccaacagcagctggcgaatttttgccgcatcctcgcggtaaccatttcggaaatggacactggaaacgacgataagcacacccttctagctaaaaacgcccaacagaagaaatccctgtcccttggcccatcggctgctgagatcaatcaggccgctctactttccattcctggatttgttgagagactgtgcaaattagcgaccagaaaggtttctgagtcgacaggaaccgcgagtttccttcaggaactggaggaatggtatacctggctcgacaacgcgctggtgctcgatgctctgatgagggtcgcaaacgaagagtccgagcacaaccaagcttcaattgtctttccgccacccggtgcatccgaggaaaatggccttccacacacttctgctcgaacccagctgccacaatctatgaagataatgcacgaaatcatgtataaactcgaggtgctttacgtcctttgcgtccttctgatgggaagacagcgcaatcaggttcacaggatgatcgccgaattcaaacttattcctggtttgaacaacctgttcgataaactgatctggaggaaacatagtgcttctgcactagtgttacatggacacaaccaaaattgtgattgctcacctgatataactttaaaaatacagttcctcaggcttctgcaaagctttagtgaccatcacgagaataagtaccttctcctaaataatcaggagcttaacgagctgagcgccatcagtctgaaggctaacattcccgaggtggaggctgtgcttaacactgaccgaagcctcgtgtgtgatggcaagagaggacttttgacacggctattgcaagttatgaagaaggaacccgcagagtccagcttccggttctggcaggccagagcagttgagtccttcttgcggggaaccacatcctatgctgaccaaatgttcctacttaaacgcggactgctggagcatatcctttattgtattgtcgactcggagtgtaaatcacgagatgtgcttcagagctatttcgacctacttggagaactaatgaagttcaacgtggacgcatttaagaggttcaacaagtacatcaataccgacgcaaaatttcaggtgtttctaaaacagattaattcctcgttggtggacagcaatatgctggtgcgatgcgtcacactgtccctggatcgcttcgagaaccaggttgacatgaaggtcgccgaggtcctaagcgagtgccgccttctagcctacatctcccaagtgcctacgcagatgagttttctattcagactgataaatatcatccacgtgcagaccctcacgcaggaaaacgtgtcctgccttaacacttcgctcgtgatcctcatgctggcacggaggaaagagcggcttcctctgtatctgcgactgttacaacgcatggaacactcaaaaaaatacccaggattccttttgaataacttccacaatctgctgcgtttttggcagcaacactatcttcacaaagataaggactcaacatgtctggagaacagtagttgcatctcattcagctactggaaagagacagtcagcattctgctaaaccccgacagacagtcacccagcgctttagtatcctatatcgaggagccttatatggatattgaccgggatttcacagaggagtag

SEQ ID NO: 321539 - DNA, 2349 bp, Artificial Sequence
  derived and/or modified sequence
atggccgcagctccagttgcggctgggtccggggcaggtcggggtaggaggtcagccgctaccgtggccgcttggggcggatggggccagctgacaggccgaggtctcgtgagggctgttcagttcacagagacgtttttaacggaaagggacaagcagtcaaaatggtccggcatcccgcaactgctgctgaagctccacacaacttcccatctgcacagtgattttgttgagtgccaaaatatcctcaaggaaatcagcccactcctctccatggaagcaatggcttttgtcacggaagaacgcaaactgacacaggagacaacctatccaaacacttatatatttgatctgttcggaggagtggatctcctagtcgaaatcctgatgcgacctacgatatcaatccgaggtcaaaagcttaaaatcagcgacgagatgagtaaggactgcttatccatcctgtacaacacttgcgtttgtacagagggggtcacaaagcgcctagccgaaaaaaacgacttcgtgatattcctctttactttgatgacctctaagaaaacattcttacaaacggctacactgattgaagatatcctgggggtaaaaaaggaaatgatacgcctggacgaggttcccaacctaagtagtttggtgtccaactttgatcagcaacagctcgccaatttttgtaggatcttggccgtcacaatttctgaaatggacaccgggaacgatgacaaacatactcttctagccaagaatgcacagcagaaaaagtccctttctttggggcctagcgctgccgagatcaaccaagctgctctgctttcaatccctggattcgtggaacgcctgtgtaagctggcaacccggaaggtaagcgaaagtactgggactgcatccttcctccaggaactggaagaatggtatacctggttagataacgccctggtgctggatgccctgatgagagtcgctaacgaagaatcagaacacaaccaggcgtcaattgtcttccctccacctggcgcttccgaagagaacggcctgcctcacacctcggcccgaacccaactgccacaatcaatgaaaattatgcacgagatcatgtacaaactggaagtgctttacgtcttgtgtgtactcctcatgggaagacaaaggaatcaggttcataggatgatcgccgagttcaagctgattcccggtctgaacaacctgttcgataagctcatctggagaaaacactcagcttccgcgctggtattgcacggccataatcagaactgcgattgcagccctgatatcaccctcaaaatccagttcctgaggttgcttcagtcattttccgaccaccacgagaacaagtacctgcttctcaacaatcaggagcttaacgagctctccgcaattagtctgaaggccaatatccccgaagtggaagctgtactcaacacagaccgttctttggtctgcgacggtaaaagaggcttactcacaaggctactccaggtgatgaaaaaggagcccgcagaatcctctttccgattctggcaggctcgggctgtggagagcttcctgcgcggtacaacatcctacgctgaccagatgtttttgctgaagagaggcttattggagcatatcttatattgcatcgtggactccgagtgcaagtctcgggatgtactgcagtcatatttcgacctcctcggagaactgatgaagttcaacgtggatgcattcaagaggtttaacaaatacatcaacactgacgccaagttccaggtttttctgaaacaaattaacagctctctggtggactccaatatgctggtcaggtgtgtgaccctgagcctcgatagattcgaaaaccaagtggatatgaaagtggcagaagtcctgagcgaatgccggctgttggcatacatttctcaggtgccaacacagatgtctttcttgttcaggctgattaatataattcacgtccagactttgacgcaagagaatgtctcttgtcttaatacgtccctcgtgatcctgatgctagccagaagaaaggagcggctaccactctacttgcgacttctgcagagaatggagcacagcaagaagtacccaggtttcctgttaaacaacttccataatctgttgcgattctggcaacagcattatttgcataaggacaaagactcaacctgtttagagaacagcagttgcatatcattctcttattggaaagagaccgtaagcatccttttgaaccccgacagacagtccccaagcgctctggttagctatatagaagagccttatatggacattgatcgagactttaccgaagaatag

SEQ ID NO: 321540 - DNA, 3226 bp, Artificial Sequence
  derived and/or modified sequence
actgggggcgctgcggcgacccctccgccgccccgtagaaatctccgcggccccgaggccgcttgcttcctgtttgtccgacgaggagacatggcggcggcgccggtagcggctgggtctggagccggccgagggagacggtcggcagccacagtggcggcttggggcggatggggcggccggccgcggcctggtaacattctgctgcagctgcggcagggccagctgaccggccggggcctggtccgggcggtgcagttcactgagacttttttgacggagagggacaaacaatccaagtggagtggaattcctcagctgctcctcaagctgcacaccaccagccacctccacagtgactttgttgagtgtcaaaacatcctcaaggaaatttctcctcttctctccatggaggctatggcatttgttactgaagagaggaaacttacccaagaaaccacttatccaaatacttacatttttgacttgtttggaggtgttgatcttcttgtagaaattcttatgaggcctacgatctctatccggggacagaaactgaaaataagtgatgaaatgtccaaggactgcttgagtatcctgtataatacctgtgtctgtacagagggagttacaaagcgtttggcagaaaagaatgactttgtgatcttcctgtttacattgatgacaagtaagaagacattcttacaaacagcaaccctcattgaagatattttgggtgttaaaaaggaaatgatccgactagatgaagtccccaatctgagttccttagtatccaatttcgatcagcagcagctcgctaatttctgccggattctggctgtcaccatttcagagatggatacagggaatgatgacaagcacacgcttcttgccaaaaatgctcaacagaagaagagcttgagtttggggccttctgcagctgaaatcaatcaagcggcccttctcagcattcctggctttgttgagcggctttgcaaactggcgactcgaaaggtgtcagagtcaacgggcacagccagcttccttcaggagttggaagagtggtacacatggctagacaatgctttggtgctagatgccctgatgcgagtggccaatgaggagtcagagcacaatcaagcctccattgtgttccctcctccaggggcttctgaggagaatggcctgcctcacacgtcagccagaacccagctgccccagtcaatgaagattatgcatgagatcatgtacaaactggaagtgctctatgtcctctgcgtgctgctgatggggcgtcagcgaaaccaggttcacagaatgattgcagagttcaagctgatccctggacttaataatttgtttgacaaactgatttggaggaagcattcagcatctgcccttgtcctccatggtcacaaccagaactgtgactgtagcccggacatcaccttgaagatacagtttttgaggcttcttcagagcttcagtgaccaccacgagaacaagtacttgttactcaacaaccaggagctgaatgaactcagtgccatctctctcaaggccaacatccctgaggtggaagctgtcctcaacaccgacaggagtttggtgtgtgatgggaagaggggcttattaactcgtctgctgcaggtcatgaagaaggagccagcagagtcgtctttcaggttttggcaagctcgggctgtggagagtttcctccgagggaccacctcctatgcagaccagatgttcctgctgaagcgaggcctcttggagcacatcctttactgcattgtggacagcgagtgtaagtcaagggatgtgctccagagttactttgacctcctgggggagctgatgaagttcaacgttgatgcattcaagagattcaataaatatatcaacaccgatgcaaagttccaggtattcctgaagcagatcaacagctccctggtggactccaacatgctggtgcgctgtgtcactctgtccctggaccgatttgaaaaccaggtggatatgaaagttgccgaggtactgtctgaatgccgcctgctcgcctacatatcccaggtgcccacgcagatgtccttcctcttccgcctcatcaacatcatccacgtgcagacgctgacccaggagaacgtcagctgcctcaacaccagcctggtgatcctgatgctggcccgacggaaagagcggctgcccctgtacctgcggctgctgcagcggatggagcacagcaagaagtaccccggcttcctgctcaacaacttccacaacctgctgcgcttctggcagcagcactacctgcacaaggacaaggacagcacctgcctagagaacagctcctgcatcagcttctcatactggaaggagacagtgtccatcctgttgaacccggaccggcagtcaccctctgctctcgttagctacattgaggagccctacatggacatagacagggacttcactgaggagtgaccttgggccaggcctcgggaggctgctgggccagtgtgggtgagcgtgggtacgatgccacacgccctgccctgttcccgttcctccctgctgctctctgcctgccccaggtctttgggtacaggcttggtgggagggaagtcctagaagcccttggtccccctgggtctgagggccctaggtcatggagagcctcagtccccataatgaggacagggtaccatgcccacctttccttcagaaccctggggcccagggccacccagaggtaagaggacatttagcattagctctgtgtgagctcctgccggtttcttggctgtcagtcagtcccagagtggggaggaagatatgggtgacccccaccccccatctgtgagccaagcctcccttgtccctggcctttggacccaggcaaaggcttctgagccctgggcaggggtggtgggtaccagagaatgctgccttcccccaagcctgcccctctgcctcattttcctgtagctcctctggttctgtttgctcattggccgctgtgttcatccaagggggttctcccagaagtgaggggcctttccctccatcccttggggcacggggcagctgtgcctgccctgcctctgcctgaggcagccgctcctgcctgagcctggacatggggcccttccttgtgttgccaatttattaacagcaaataaaccaattaaatggagactattaaataactttattttaaaaatga

SEQ ID NO: 321541 - DNA, 2489 bp, Artificial Sequence
  derived and/or modified sequence
gcttcctgtttgtccgacgaggagacatggcggcggcgccggtagcggctgggtctggagccggccgagggagacggtcggcagccacagtggcggcttggggcggatggggcggccggccgcggcctggtaacattctgctgcagctgcggcagggccagctgaccggccggggcctggtccgggcggtgcagttcactgagacttttttgacggagagggacaaacaatccaagtggagtggaattcctcagctgctcctcaagctgcacaccaccagccacctccacagtgactttgttgagtgtcaaaacatcctcaagcttcttgtagaaattcttatgaggcctacgatctctatccggggacagaaactgaaaataagtgatgaaatgtccaaggactgcttgagtatcctgtataatacctgtgtctgtacagagggagttacaaagcgtttggcagaaaagaatgactttgtgatcttcctgtttacattgatgacaagtaagaagacattcttacaaacagcaaccctcattgaagatattttgggtgttaaaaaggaaatgatccgactagatgaagtccccaatctgagttccttagtatccaatttcgatcagcagcagctcgctaatttctgccggattctggctgtcaccatttcagagatggatacagggaatgatgacaagcacacgcttcttgccaaaaatgctcaacagaagaagagcttgagtttggggccttctgcagctgaaatcaatcaagcggcccttctcagcattcctggctttgttgagcggctttgcaaactggcgactcgaaaggtgtcagagtcaacgggcacagccagcttccttcaggagttggaagagtggtacacatggctagacaatgctttggtgctagatgccctgatgcgagtggccaatgaggagtcagagcacaatcaagcctccattgtgttccctcctccaggggcttctgaggagaatggcctgcctcacacgtcagccagaacccagctgccccagtcaatgaagattatgcatgagatcatgtacaaactggaagtgctctatgtcctctgcgtgctgctgatggggcgtcagcgaaaccaggttcacagaatgattgcagagttcaagctgatccctggacttaataatttgtttgacaaactgatttggaggaagcattcagcatctgcccttgtcctccatggtcacaaccagaactgtgactgtagcccggacatcaccttgaagatacagtttttgaggcttcttcagagcttcagtgaccaccacgagaacaagtacttgttactcaacaaccaggagctgaatgaactcagtgccatctctctcaaggccaacatccctgaggtggaagctgtcctcaacaccgacaggagtttggtgtgtgatgggaagaggggcttattaactcgtctgctgcaggtcatgaagaaggagccagcagagtcgtctttcaggttttggcaagctcgggctgtggagagtttcctccgagggaccacctcctatgcagaccagatgttcctgctgaagcgaggcctcttggagcacatcctttactgcattgtggacagcgagtgtaagtcaagggatgtgctccagagttactttgacctcctgggggagctgatgaagttcaacgttgatgcattcaagagattcaataaatatatcaacaccgatgcaaagttccaggtattcctgaagcagatcaacagctccctggtggactccaacatgctggtgcgctgtgtcactctgtccctggaccgatttgaaaaccaggtggatatgaaagttgccgaggtactgtctgaatgccgcctgctcgcctacatatcccaggtgcccacgcagatgtccttcctcttccgcctcatcaacatcatccacgtgcagacgctgacccaggagaacgtcagctgcctcaacaccagcctggtgatcctgatgctggcccgacggaaagagcggctgcccctgtacctgcggctgctgcagcggatggagcacagcaagaagtaccccggcttcctgctcaacaacttccacaacctgctgcgcttctggcagcagcactacctgcacaaggacaaggacagcacctgcctagagaacagctcctgcatcagcttctcatactggaaggagacagtgtccatcctgttgaacccggaccggcagtcaccctctgctctcgttagctacattgaggagccctacatggacatagacagggacttcactgaggagtgaccttgggccaggcctcgggaggctgctgggccagtgtgggtgagcgtgggtacgatgccacacgccctgccctgttcccgttcctccctgctgctctctgcctgccccaggtctttgggtacaggcttggtgggagggaagtcctagaagcccttggtccccctgggtctgagggccctaggtcat

SEQ ID NO: 321542 - DNA, 2504 bp, Artificial Sequence
  derived and/or modified sequence
gcttcctgtttgtccgacgaggagacatggcggcggcgccggtagcggctgggtctggagccggccgagggagacggtcggcagccacagtggcggcttggggcggatggggccagctgaccggccggggcctggtccgggcggtgcagttcactgagacttttttgacggagagggacaaacaatccaagtggagtggaattcctcagctgctcctcaagctgcacaccaccagccacctccacagtgactttgttgagtgtcaaaacatcctcaaggaaatttctcctcttctctccatggaggctatggcatttgttactgaagagaggaaacttacccaagaaaccacttatccaaatacttacatttttgacttgtttggaggtgttgatcttcttgtagaaattcttatgaggcctacgatctctatccggggacagaaactgaaaataagtgatgaaatgtccaaggactgcttgagtatcctgtataatacctgtgtctgtacagagggagttacaaagcgtttggcagaaaagaatgactttgtgatcttcctgtttacattgatgacaagtaagaagacattcttacaaacagcaaccctcattgaagatattttgggtgttaaaaaggaaatgatccgactagatgaagtccccaatctgagttccttagtatccaatttcgatcagcagcagctcgctaatttctgccggattctggctgtcaccatttcagagatggatacagggaatgatgacaagcacacgcttcttgccaaaaatgctcaacagaagaagagcttgagtttggggccttctgcagctgaaatcaatcaagcggcccttctcagcattcctggctttgttgagcggctttgcaaactggcgactcgaaaggtgtcagagtcaacgggcacagccagcttccttcaggagttggaagagtggtacacatggctagacaatgctttggtgctagatgccctgatgcgagtggccaatgaggagtcagagcacaatcaagcctccattgtgttccctcctccaggggcttctgaggagaatggcctgcctcacacgtcagccagaacccagctgccccagtcaatgaagattatgcatgagatcatgtacaaactggaagtgctctatgtcctctgcgtgctgctgatggggcgtcagcgaaaccaggttcacagaatgattgcagagttcaagctgatccctggacttaataatttgtttgacaaactgatttggaggaagcattcagcatctgcccttgtcctccatggtcacaaccagaactgtgactgtagcccggacatcaccttgaagatacagtttttgaggcttcttcagagcttcagtgaccaccacgagaacaagtacttgttactcaacaaccaggagctgaatgaactcagtgccatctctctcaaggccaacatccctgaggtggaagctgtcctcaacaccgacaggagtttggtgtgtgatgggaagaggggcttattaactcgtctgctgcaggtcatgaagaaggagccagcagagtcgtctttcaggttttggcaagctcgggctgtggagagtttcctccgagggaccacctcctatgcagaccagatgttcctgctgaagcgaggcctcttggagcacatcctttactgcattgtggacagcgagtgtaagtcaagggatgtgctccagagttactttgacctcctgggggagctgatgaagttcaacgttgatgcattcaagagattcaataaatatatcaacaccgatgcaaagttccaggtattcctgaagcagatcaacagctccctggtggactccaacatgctggtgcgctgtgtcactctgtccctggaccgatttgaaaaccaggtggatatgaaagttgccgaggtactgtctgaatgccgcctgctcgcctacatatcccaggtgcccacgcagatgtccttcctcttccgcctcatcaacatcatccacgtgcagacgctgacccaggagaacgtcagctgcctcaacaccagcctggtgatcctgatgctggcccgacggaaagagcggctgcccctgtacctgcggctgctgcagcggatggagcacagcaagaagtaccccggcttcctgctcaacaacttccacaacctgctgcgcttctggcagcagcactacctgcacaaggacaaggacagcacctgcctagagaacagctcctgcatcagcttctcatactggaaggagacagtgtccatcctgttgaacccggaccggcagtcaccctctgctctcgttagctacattgaggagccctacatggacatagacagggacttcactgaggagtgaccttgggccaggcctcgggaggctgctgggccagtgtgggtgagcgtgggtacgatgccacacgccctgccctgttcccgttcctccctgctgctctctgcctgccccaggtctttgggtacaggcttg

SEQ ID NO: 321543 - protein, 399 aa, Artificial Sequence
  derived and/or modified sequence
MRSQSTIKVHRMIAEFKLIPGLNNLFDKLIWRKHSASALVLHGHNQNCDCSPDITLKIQFLRLLQSFSDHHENKYLLLNNQELNELSAISLKANIPEVEAVLNTDRSLVCDGKRGLLTRLLQVMKKEPAESSFRFWQARAVESFLRGTTSYADQMFLLKRGLLEHILYCIVDSECKSRDVLQSYFDLLGELMKFNVDAFKRFNKYINTDAKFQVFLKQINSSLVDSNMLVRCVTLSLDRFENQVDMKVAEVLSECRLLAYISQVPTQMSFLFRLINIIHVQTLTQENVSCLNTSLVILMLARRKERLPLYLRLLQRMEHSKKYPGFLLNNFHNLLRFWQQHYLHKDKDSTCLENSSCISFSYWKETVSILLNPDRQSPSALVSYIEEPYMDIDRDFTEE

SEQ ID NO: 321544 - DNA, 1200 bp, Artificial Sequence
  derived and/or modified sequence
atgagaagccagagcaccatcaaggtgcacagaatgatcgccgagttcaagctgatccccggcctgaacaacctgttcgacaagctgatctggagaaagcacagcgccagcgccctggtgctgcacggccacaaccagaactgcgactgcagccccgacatcaccctgaagatccagttcctgagactgctgcagagcttcagcgaccaccacgagaacaagtacctgctgctgaacaaccaggagctgaacgagctgagcgccatcagcctgaaggccaacatccccgaggtggaggccgtgctgaacaccgacagaagcctggtgtgcgacggcaagagaggcctgctgaccagactgctgcaggtgatgaagaaggagcccgccgagagcagcttcagattctggcaggccagagccgtggagagcttcctgagaggcaccaccagctacgccgaccagatgttcctgctgaagagaggcctgctggagcacatcctgtactgcatcgtggacagcgagtgcaagagcagagacgtgctgcagagctacttcgacctgctgggcgagctgatgaagttcaacgtggacgccttcaagagattcaacaagtacatcaacaccgacgccaagttccaggtgttcctgaagcagatcaacagcagcctggtggacagcaacatgctggtgagatgcgtgaccctgagcctggacagattcgagaaccaggtggacatgaaggtggccgaggtgctgagcgagtgcagactgctggcctacatcagccaggtgcccacccagatgagcttcctgttcagactgatcaacatcatccacgtgcagaccctgacccaggagaacgtgagctgcctgaacaccagcctggtgatcctgatgctggccagaagaaaggagagactgcccctgtacctgagactgctgcagagaatggagcacagcaagaagtaccccggcttcctgctgaacaacttccacaacctgctgagattctggcagcagcactacctgcacaaggacaaggacagcacctgcctggagaacagcagctgcatcagcttcagctactggaaggagaccgtgagcatcctgctgaaccccgacagacagagccccagcgccctggtgagctacatcgaggagccctacatggacatcgacagagacttcaccgaggagtag

SEQ ID NO: 321545 - DNA, 1200 bp, Artificial Sequence
  derived and/or modified sequence
atgcgtagccagtcaaccattaaggtacaccggatgatcgccgagttcaaacttatccctgggttaaataatctgtttgacaagctgatttggaggaagcactcggcatccgccttggtgctccatggccacaaccaaaattgtgactgctccccagacattactctcaaaatccagtttctaagactcctgcagagcttttctgatcaccacgaaaacaaatatctgctcctcaacaaccaggaactgaacgagctcagtgccatatcgctcaaagccaacattcccgaagtggaagccgtactcaacaccgataggagcttggtgtgcgatgggaagagaggtctgctgactaggctgctccaggtgatgaagaaggaacctgctgaatcctccttccggttttggcaggccagagcggtcgaaagcttcttgcgtggaactacctcctatgctgatcagatgttcctgcttaaaaggggcctgctggaacacatcctatattgcattgtggactcagagtgtaaatcccgagatgtcctgcagtcttactttgacttgctgggcgagctgatgaagttcaacgtggatgctttcaaacggttcaacaagtacatcaatactgatgcaaaattccaagtgttccttaaacagataaacagctcactggtcgacagtaacatgctggtcagatgtgtgaccctgagcctcgatcgctttgaaaatcaagtcgacatgaaagtggccgaggtactctcagagtgcagacttttggcctacatttcccaggtgccaacccagatgagtttccttttcagactgatcaacattatccacgtgcagactttgacccaggaaaatgtgtcgtgtctgaacacttccctcgtgatcctgatgctcgctagacgaaaagagaggctgcccctctacctgcgactcttgcagaggatggagcacagtaaaaaatatccgggtttcttgctgaacaatttccataacttattgaggttttggcaacagcattacctacataaggacaaggatagcacctgcttagagaatagttcttgtatatccttcagctactggaaggaaaccgtatccatcttactgaatccggacagacagtccccaagcgcgttagtgtcttacattgaggaaccctacatggacatcgatcgggattttaccgaagagtag

SEQ ID NO: 321546 - DNA, 1200 bp, Artificial Sequence
  derived and/or modified sequence
atgaggagccagagcaccatcaaggtgcacaggatgattgctgagttcaagctgatccctggcctgaacaacctgtttgacaagctgatctggaggaagcacagcgccagcgccctggtgctgcacggccacaaccagaactgtgactgcagcccagacatcaccctgaagatccagttcctgcggctgctgcagagcttcagtgaccaccacgagaacaagtacctgctgctgaacaaccaggagctgaatgagctgagcgccatcagcctgaaggccaacatccctgaggtggaggccgtgctgaacacagacaggagcctggtgtgtgatggcaagaggggcctgctgacccggctgctgcaggtgatgaagaaggagcctgctgagagcagcttccgcttctggcaggcccgggctgtggagagcttcctgcggggcaccaccagctatgctgaccagatgttcctgctgaagaggggcctgctggagcacatcctgtactgcatcgtggacagcgagtgcaagagcagagatgtgctgcagagctactttgacctgctgggggagctgatgaagttcaacgtggatgccttcaagcgcttcaacaagtacatcaacacagatgccaagttccaggtgttcctgaagcagatcaacagcagcctggtggacagcaacatgctggtgcgctgtgtgaccctgagcctggacagatttgagaaccaggtggacatgaaggtggccgaggtgctgtctgagtgccgcctgctggcctacatcagccaggtgcccacccagatgtccttcctgttccgcctcatcaacatcatccacgtgcagaccctgacccaggagaatgtgtcctgcctgaacaccagcctggtgatcctgatgctggcccggaggaaggagcggctgcccctgtacctgcggctgctgcagaggatggagcacagcaagaagtacccaggcttcctgctgaacaacttccacaacctgctgcgcttctggcagcagcactacctgcacaaggacaaggacagcacctgcctggagaacagcagctgcatctccttctcctactggaaggagaccgtgtccatcctgctgaacccagaccggcagagccccagcgccctggtgtcctacatcgaggagccctacatggacatcgaccgggacttcacagaggagtag

SEQ ID NO: 321547 - DNA, 1200 bp, Artificial Sequence
  derived and/or modified sequence
atgcggagccagagcaccatcaaggtgcaccggatgatcgccgagttcaaactgattcccggactaaacaatctgtttgacaagctcatttggcgaaaacactcagctagcgcactggtgctgcacggacacaatcagaactgtgactgtagccctgacataaccctcaagatccagtttttaaggttgctacaaagtttctcagaccaccacgagaataaatacctgttgctgaacaaccaggaattaaatgaactctctgctatctccctaaaggctaacattcctgaggtcgaagccgtcctgaacactgatagaagcctggtgtgcgatggaaaaaggggactgttaaccagactgctgcaggtgatgaagaaagagcctgccgagtcctcattccggttttggcaggcccgagcagttgaaagctttctgagggggaccaccagctacgccgaccagatgttcttattgaagcggggactgctagaacacattttgtattgtatagtggatagcgagtgcaaatcccgggacgttcttcagagctactttgacctgttgggcgaactgatgaagttcaatgtggacgccttcaaacgcttcaacaagtatatcaacacggacgcgaagtttcaagtgttccttaaacagatcaactcctctcttgtagacagtaacatgctggtgcgatgtgtcacactctccctggaccgatttgaaaatcaagttgacatgaaggtcgcagaagttctgagcgagtgtcgcctgctggcctatatcagccaggtgccaacacagatgtccttcctgtttaggctgatcaacatcatacatgttcaaactctgacccaggagaacgtttcttgtttgaacacttcgctggttatcttgatgctggcccgcaggaaggaacggctcccattgtaccttagactgttacagcgtatggaacactccaagaaatacccaggattcctgctgaataattttcataatctactgaggttttggcagcaacactacttgcataaagacaaggactccacatgtctggagaatagtagctgcatctctttcagttactggaaggagactgtaagtatccttcttaatcccgatcgacagtcaccgagcgccctggtctcatacatagaggagccgtatatggacatcgaccgcgatttcacagaggaatag

SEQ ID NO: 321548 - DNA, 1200 bp, Artificial Sequence
  derived and/or modified sequence
atgaggtctcagagtacaataaaggtccataggatgatcgcagaatttaagctgatccccggactcaacaacctgttcgacaaactgatttggagaaaacacagtgccagtgcactagtcctgcatggccacaatcaaaattgtgactgttcacctgatataaccctaaaaattcagttccttagactgctgcaaagtttctcagatcaccacgagaacaagtatctgctcctcaataaccaagaactcaatgaattgagcgctatcagcctgaaggctaacatccctgaagtcgaggcggtactgaatactgatagatctctggtatgtgacggcaagagaggattgctgactcggctgctgcaggtgatgaagaaggagcctgccgaatcaagcttccgattctggcaagcccgtgctgtggaatcgtttctgcggggaaccacttcctatgccgatcagatgtttttgctgaaaagagggctactggagcacatcctctactgtatcgttgactccgagtgcaaatcaagggacgttcttcagagttactttgatctactgggcgaattgatgaagttcaacgtggacgccttcaagagatttaataagtacatcaatactgatgccaaatttcaagtgttcctaaaacagattaactcttctcttgtcgacagcaatatgctggtacgctgcgtcactttatcacttgaccgtttcgagaaccaggttgatatgaaagtggccgaagtgctgagtgagtgtagactcctggcgtatattagccaggtgcccacacagatgagcttcctgtttaggctaattaatataatccatgttcagacattaacccaagaaaacgtgtcctgcctgaacacgtccctggtgattctgatgctggccaggcgcaaggagcgactgcccctctacttacgattgcttcagcgcatggaacattctaagaagtaccctgggtttctgctcaataacttccacaaccttctacgcttctggcaacagcactatctccacaaggacaaagattcgacttgtctcgaaaacagctcctgcattagcttttcttattggaaggagaccgtgagcattttattgaaccccgaccggcagtccccgtctgcacttgtgtcatatatcgaggagccttacatggacatcgatagggacttcaccgaagaatag

SEQ ID NO: 321549 - DNA, 1746 bp, Artificial Sequence
  derived and/or modified sequence
cctggctttgttgagcggctttgcaaactggcgactcgaaaggtgtcagagtcaacgggcacagccagcttccttcaggagttggaagagtggtacacatggctagacaatgctttggtgctagatgccctgatgcgagtggccaatgaggagtcagagcacaatcaaggttcacagaatgattgcagagttcaagctgatccctggacttaataatttgtttgacaaactgatttggaggaagcattcagcatctgcccttgtcctccatggtcacaaccagaactgtgactgtagcccggacatcaccttgaagatacagtttttgaggcttcttcagagcttcagtgaccaccacgagaacaagtacttgttactcaacaaccaggagctgaatgaactcagtgccatctctctcaaggccaacatccctgaggtggaagctgtcctcaacaccgacaggagtttggtgtgtgatgggaagaggggcttattaactcgtctgctgcaggtcatgaagaaggagccagcagagtcgtctttcaggttttggcaagctcgggctgtggagagtttcctccgagggaccacctcctatgcagaccagatgttcctgctgaagcgaggcctcttggagcacatcctttactgcattgtggacagcgagtgtaagtcaagggatgtgctccagagttactttgacctcctgggggagctgatgaagttcaacgttgatgcattcaagagattcaataaatatatcaacaccgatgcaaagttccaggtattcctgaagcagatcaacagctccctggtggactccaacatgctggtgcgctgtgtcactctgtccctggaccgatttgaaaaccaggtggatatgaaagttgccgaggtactgtctgaatgccgcctgctcgcctacatatcccaggtgcccacgcagatgtccttcctcttccgcctcatcaacatcatccacgtgcagacgctgacccaggagaacgtcagctgcctcaacaccagcctggtgatcctgatgctggcccgacggaaagagcggctgcccctgtacctgcggctgctgcagcggatggagcacagcaagaagtaccccggcttcctgctcaacaacttccacaacctgctgcgcttctggcagcagcactacctgcacaaggacaaggacagcacctgcctagagaacagctcctgcatcagcttctcatactggaaggagacagtgtccatcctgttgaacccggaccggcagtcaccctctgctctcgttagctacattgaggagccctacatggacatagacagggacttcactgaggagtgaccttgggccaggcctcgggaggctgctgggccagtgtgggtgagcgtgggtacgatgccacacgccctgccctgttcccgttcctccctgctgctctctgcctgccccaggtctttgggtacaggcttggtgggagggaagtcctagaagcccttggtccccctgggtctgagggccctaggtcatggagagcctcagtccccataatgaggacagggtaccatgcccacctttccttcagaaccctggggcccagggccacccagaggtaagaggacatttagcattagctctgtgtgagctcctgccggtttcttggctgtcagtcagtcccagagtggggaggaagatatgggtgacccccaccccccatctgtgagccaagcctcccttgtccctgg

SEQ ID NO: 321550 - protein, 108 aa, Artificial Sequence
  derived and/or modified sequence
MPLWVFFFVILTLSNSSHCSPPPPLTLRMRRYADAIFTNSYRKVLGQLSARKLLQDIMSRQQGESNQERGARARLGRQVDSMWAEQKQMELESILVALLQKHSRNSQG

SEQ ID NO: 321551 - DNA, 327 bp, Artificial Sequence
  derived and/or modified sequence
atgcccttgtgggtgtttttctttgtcattctgaccctcagtaactccagtcactgtagccccccaccgcctctcacgctccggatgagacgctatgccgacgctatatttacaaactcctacagaaaggtcctgggccaactgtccgcccggaagttgttacaggatatcatgagccgccagcagggggagtccaatcaggaacgaggggccagagcacggttggggcggcaggtggattccatgtgggctgagcagaagcagatggaactggagtccattttagtcgctttgttacagaaacatagtaggaatagtcagggatag

SEQ ID NO: 321552 - DNA, 327 bp, Artificial Sequence
  derived and/or modified sequence
atgcctctgtgggtcttcttttttgtgatactgacactctccaatagtagccactgctccccgccccctcccctgactttgaggatgcggagatacgcggacgctatcttcactaactcatatagaaaggttttgggccagctgagcgcacggaagctgttgcaggacattatgagcaggcagcagggagaaagtaatcaggagagaggcgcaagagcccgtctcggcagacaagtagactcaatgtgggccgagcagaagcagatggaactcgagagcatactggttgccctgctgcagaaacattctaggaattctcagggctag

SEQ ID NO: 321553 - DNA, 461 bp, Artificial Sequence
  derived and/or modified sequence
gtgaaggatgccactctgggtgttcttctttgtgatcctcaccctcagcaacagctcccactgctccccacctccccctttgaccctcaggatgcggcggtatgcagatgccatcttcaccaacagctaccggaaggtgctgggccagctgtccgcccgcaagctgctccaggacatcatgagcaggcagcagggagagagcaaccaagagcgaggagcaagggcacggcttggtcgtcaggtagacagcatgtgggcagaacaaaagcaaatggaattggagagcatcctggtggccctgctgcagaagcacagcaggaactcccagggatgaagattcctcctgtgacccgggctacctgtagccaaaatgcaactggatccagttaatcctctcatttctgacccactttttcctttgaaaatacaataaaattcccccataccggtgtgcatttaaa

SEQ ID NO: 321554 - DNA, 566 bp, Artificial Sequence
  derived and/or modified sequence
tgggaacgccaggcggctgccagagcaaacacccagcccagggcccctggatttgagcagtgcctcggagcagagggatatctgccgcatcaggtgccaccccgggtgaaggatgccactctgggtgttcttctttgtgatcctcaccctcagcaacagctcccactgctccccacctccccctttgaccctcaggatgcggcggtatgcagatgccatcttcaccaacagctaccggaaggtgctgggccagctgtccgcccgcaagctgctccaggacatcatgagcaggcagcagggagagagcaaccaagagcgaggagcaagggcacggcttggtcgtcaggtagacagcatgtgggcagaacaaaagcaaatggaattggagagcatcctggtggccctgctgcagaagcacagcaggaactcccagggatgaagattcctcctgtgacccgggctacctgtagccaaaatgcaactggatccagttaatcctctcatttctgacccactttttcctttgaaaatacaataaaattcccccataccggtgtgcatttaaa

SEQ ID NO: 321555 - DNA, 327 bp, Artificial Sequence
  derived and/or modified sequence
atgcccctgtgggtgttcttcttcgtcatcctgaccctgagcaacagcagccactgcagccccccaccacccctgaccctgaggatgagaagatatgcagatgccatcttcaccaacagctacaggaaggtgctgggccagctgagcgccaggaagctgctgcaggacatcatgagccggcagcagggcgagagcaaccaggagcggggggcccgggcccggctgggccggcaggtggacagcatgtgggccgagcagaagcagatggagctggagagcatcctggtggccctgctgcagaagcacagcaggaacagccagggctag

SEQ ID NO: 321556 - DNA, 327 bp, Artificial Sequence
  derived and/or modified sequence
atgcccctgtgggtgttcttcttcgtgatcctgaccctgagcaactcgtcgcactgctcacccccacctccactgacacttcgaatgcgtcgatatgccgatgccatcttcactaattcgtacagaaaggtcctcggacagttgtcagccagaaaactcctacaggacataatgtcccggcagcaaggtgaatcaaaccaagagcggggcgctagagccaggctggggcggcaggtggacagtatgtgggctgaacagaagcaaatggaactcgagtccatcctggttgcccttcttcaaaagcacagccggaactctcaaggatag

SEQ ID NO: 321557 - DNA, 327 bp, Artificial Sequence
  derived and/or modified sequence
atgcccctgtgggtgttcttcttcgtgatcctgaccctgagcaactctagccactgctcccctccgcctcccctgacgctgaggatgcgacggtacgccgatgctatttttactaacagctatcgtaaggtcctcgggcagctgagcgcgcggaaattgctacaggatatcatgagcaggcagcagggcgagtccaatcaggagcgaggtgcgagagcaagattaggaagacaggtcgactccatgtgggccgagcaaaaacagatggaattagagagtatcctcgtggcattgttgcagaagcatagcagaaattcgcagggttag

SEQ ID NO: 321558 - DNA, 327 bp, Artificial Sequence
  derived and/or modified sequence
atgccactttgggtcttcttctttgttatcctcacattatcaaatagttcacactgctccccaccgccaccccttacgcttaggatgaggaggtatgcagacgccatctttaccaacagttaccgcaaggtcctggggcagctgagtgccaggaaacttctgcaagatattatgtcacgccagcaaggtgaaagtaaccaggaacggggagcacgggcacgtctcggcaggcaggtggacagtatgtgggcagagcagaagcaaatggagctggaaagtatcctagtggcgctactccagaagcacagcagaaattcccagggctag

SEQ ID NO: 321559 - DNA, 327 bp, Artificial Sequence
  derived and/or modified sequence
atgccactgtgggtcttcttttttgtcattctgacactgtcaaatagttcccactgtagtcctccgccaccattaacactgcggatgcgacggtacgcggatgcaatattcacaaactcttatcggaaggtgctgggacagctgtccgccaggaagctccttcaggatataatgtccagacaacaaggtgaaagtaaccaggaaaggggagccagggcccgattaggcagacaagtagattcaatgtgggccgagcagaagcaaatggagctcgaatctatcctggtcgccctgctccagaagcatagcaggaactcacagggatag

SEQ ID NO: 321560 - DNA, 327 bp, Artificial Sequence
  derived and/or modified sequence
atgcccctgtgggtgttcttcttcgtgatcctgaccctgagcaacagcagccactgcagcccccccccccccctgaccctgagaatgagaagatacgccgacgccatcttcaccaacagctacagaaaggtgctgggccagctgagcgccagaaagctgctgcaggacatcatgagcagacagcagggcgagagcaaccaggagagaggcgccagagccagactgggcagacaggtggacagcatgtgggccgagcagaagcagatggagctggagagcatcctggtggccctgctgcagaagcacagcagaaacagccagggctag

SEQ ID NO: 321561 - protein, 107 aa, Artificial Sequence
  derived and/or modified sequence
MPLWVFFFVILTLSNSSHCSPPPPLTLRMRRYADAIFTNSYRKVLGQLSARKLLQDIMSRQQGESNQERGARARLGRQVDSMWAEQKQMELESILVALLQKHRNSQG

SEQ ID NO: 321562 - DNA, 324 bp, Artificial Sequence
  derived and/or modified sequence
atgccattgtgggtgtttttctttgttatcctgaccctttccaattcatctcactgctcaccacctcctccactcacactccgtatgagaaggtatgcagacgcaatctttacaaactcatatcgaaaggtgctaggacaactgtccgcccgcaagttgctacaggatattatgtctagacagcagggcgaaagcaaccaggaacgcggcgctcgtgcgagacttggcagacaagtggatagtatgtgggccgaacaaaagcagatggagctcgagtctattctggtcgccctcctgcagaaacacagaaactcacaggggtag

SEQ ID NO: 321563 - DNA, 377 bp, Artificial Sequence
  derived and/or modified sequence
atgccactctgggtgttcttctttgtgatcctcaccctcagcaacagctcccactgctccccacctccccctttgaccctcaggatgcggcggtatgcagatgccatcttcaccaacagctaccggaaggtgctgggccagctgtccgcccgcaagctgctccaggacatcatgagcaggcagcagggagagagcaaccaagagcgaggagcaagggcacggcttggtcgtcaggtagacagcatgtgggcagaacaaaagcaaatggaattggagagcatcctggtggccctgctgcagaagcacaggaactcccagggatgaagattcctcctgtgacccgggctacctgtagccaaaatgcaactggatccagt

SEQ ID NO: 321564 - DNA, 324 bp, Artificial Sequence
  derived and/or modified sequence
atgcccctgtgggtgttcttcttcgtcatcctgaccctgagcaacagcagccactgcagccccccaccacccctgaccctgaggatgagaagatatgcagatgccatcttcaccaacagctacaggaaggtgctgggccagctgagcgccaggaagctgctgcaggacatcatgagccggcagcagggcgagagcaaccaggagcggggggcccgggcccggctgggccggcaggtggacagcatgtgggccgagcagaagcagatggagctggagagcatcctggtggccctgctgcagaagcacaggaacagccagggctag

SEQ ID NO: 321565 - DNA, 324 bp, Artificial Sequence
  derived and/or modified sequence
atgcccctgtgggtgttcttcttcgtgatcctgaccctgagcaacagtagccactgttcaccgcccccacctctcaccctgagaatgagacgctatgccgatgcaatttttacaaactcctacagaaaagtactgggccagttatctgcccgcaaactgctgcaggacattatgtcacgccagcagggggagtctaatcaggaaagaggggctcgtgcacgcctggggagacaggtagatagtatgtgggccgagcaaaagcagatggagcttgaatctattctggtggcattgctgcagaaacaccgcaattctcagggatag

SEQ ID NO: 321566 - DNA, 324 bp, Artificial Sequence
  derived and/or modified sequence
atgccattatgggtgtttttcttcgttatactgaccctctctaacagttcccactgcagcccccctccacctttgactctgcgaatgcgcagatatgcagacgcgatattcacaaacagttaccgaaaagtgcttggccagctgagcgcccgtaaactgctacaggacattatgagtagacaacaaggtgaatctaaccaggagaggggcgcaagggcaagattaggcagacaagtggattctatgtgggctgaacaaaaacagatggaactagaatctattctcgtggctctcttacaaaagcaccgcaattctcaaggctag

SEQ ID NO: 321567 - DNA, 324 bp, Artificial Sequence
  derived and/or modified sequence
atgcccctgtgggtgttcttcttcgtgatcctgaccctgagcaacagcagccactgcagcccccccccccccctgaccctgagaatgagaagatacgccgacgccatcttcaccaacagctacagaaaggtgctgggccagctgagcgccagaaagctgctgcaggacatcatgagcagacagcagggcgagagcaaccaggagagaggcgccagagccagactgggcagacaggtggacagcatgtgggccgagcagaagcagatggagctggagagcatcctggtggccctgctgcagaagcacagaaacagccagggctag

SEQ ID NO: 321568 - protein, 620 aa, Artificial Sequence
  derived and/or modified sequence
MPLHQLGDKPLTFPSPNSAMENGLDHTPPSRRASPGTPLSPGSLRSAAHSPLDTSKQPLCQLWAEKHGARGTHEVRYVSAGQSVACGWWAFAPPCLQVLNTPKGILFFLCAAAFLQGMTVNGFINTVITSLERRYDLHSYQSGLIASSYDIAACLCLTFVSYFGGSGHKPRWLGWGVLLMGTGSLVFALPHFTAGRYEVELDAGVRTCPANPGAVCADSTSGLSRYQLVFMLGQFLHGVGATPLYTLGVTYLDENVKSSCSPVYIAIFYTAAILGPAAGYLIGGALLNIYTEMGRRTELTTESPLWVGAWWVGFLGSGAAAFFTAVPILGYPRQLPGSQRYAVMRAAEMHQLKDSSRGEASNPDFGKTIRDLPLSIWLLLKNPTFILLCLAGATEATLITGMSTFSPKFLESQFSLSASEAATLFGYLVVPAGGGGTFLGGFFVNKLRLRGSAVIKFCLFCTVVSLLGILVFSLHCPSVPMAGVTASYGGSLLPEGHLNLTAPCNAACSCQPEHYSPVCGSDGLMYFSLCHAGCPAATETNVDGQKVSGAAAYRPCPPLDPGKGPPCLPLVIGAIVGLPRCTETVAVSLRIFPLVLAMPLQGNALQLVRESPSFWFSYSL

SEQ ID NO: 321569 - protein, 474 aa, Artificial Sequence
  derived and/or modified sequence
MATNWGSLLQDKQQLEELARQAVDRALAEGVLLRTSQEPTSSEVVSYAPFTLFPSLVPSALLEQAYAVQMDFNLLVDAVSQNAAFLEQTLSSTIKQDDFTARLFDIHKQVLKEGIAQTVFLGLNRSDYMFQRSADGSPALKQIEINTISASFGGLASRTPAVHRHVLSVLSKTKEAGKILSNNPSKGLALGIAKAWELYGSPNALVLLIAQEKERNIFDQRAIENELLARNIHVIRRTFEDISEKGSLDQDRRLFVDGQEIAVVYFRDGYMPRQYSLQNWEARLLLERSHAAKCPDIATQLAGTKKVQQELSRPGMLEMLLPGQPEAVARLRATFAGLYSLDVGEEGDQAIAEALAAPSRFVLKPQREGGGNNLYGEEMVQALKQLKDSEERASYILMEKIEPEPFENCLLRPGSPARVVQCISELGIFGVYVRQEKTLVMNKHVGHLLRTKAIEHADGGVAAGVAVLDNPYPV

SEQ ID NO: 321570 - protein, 363 aa, Artificial Sequence
  derived and/or modified sequence
MATNWGSLLQDKQQLEELARQAVDRALAEGVLLRTSQEPTSSEVVSYAPFTLFPSLVPSALLEQAYAVQMDFNLLVDAVSQNAAFLEQTLSSALVLLIAQEKERNIFDQRAIENELLARNIHVIRRTFEDISEKGSLDQDRRLFVDGQEIAVVYFRDGYMPRQYSLQNWEARLLLERSHAAKCPDIATQLAGTKKVQQELSRPGMLEMLLPGQPEAVARLRATFAGLYSLDVGEEGDQAIAEALAAPSRFVLKPQREGGGNNLYGEEMVQALKQLKDSEERASYILMEKIEPEPFENCLLRPGSPARVVQCISELGIFGVYVRQEKTLVMNKHVGHLLRTKAIEHADGGVAAGVAVLDNPYPV

SEQ ID NO: 321571 - protein, 346 aa, Artificial Sequence
  derived and/or modified sequence
MFQRSADGSPALKQIEINTISASFGGLASRTPAVHRHVLSVLSKTKEAGKILSNNPSKGLALGIAKAWELYGSPNALVLLIAQEKERNIFDQRAIENELLARNIHVIRRTFEDISEKGSLDQDRRLFVDGQEIAVVYFRDGYMPRQYSLQNWEARLLLERSHAAKCPDIATQLAGTKKVQQELSRPGMLEMLLPGQPEAVARLRATFAGLYSLDVGEEGDQAIAEALAAPSRFVLKPQREGGGNNLYGEEMVQALKQLKDSEERASYILMEKIEPEPFENCLLRPGSPARVVQCISELGIFGVYVRQEKTLVMNKHVGHLLRTKAIEHADGGVAAGVAVLDNPYPV

SEQ ID NO: 321572 - DNA, 1092 bp, Artificial Sequence
  derived and/or modified sequence
atggcgacgaattggggatctctcctacaggataagcagcagctggaggagcttgcgcggcaggcagtggacagagctttagcagagggtgtgcttctgcgaacttctcaggagccgacgagtagtgaagttgtgagctatgcgccttttaccctgttcccttctttggttccatccgcactgctggaacaggcatatgctgtacaaatggactttaatttgctcgtggatgcagtttcacagaacgcagcctttctggaacagacactgtcgagtgccctcgtcctgctaatagctcaggagaaagaacgaaacatctttgatcagagggctatcgaaaatgagttgctggctaggaacattcacgtgatccggaggactttcgaggatatctctgaaaaggggtccttagaccaggataggaggctgtttgtggacggacaggaaatcgcagtcgtgtactttagagatgggtacatgccccgtcagtactcactccagaattgggaagcccggttacttttggagagatctcacgccgccaagtgccctgacatcgctacccagttagccggcaccaaaaaagtgcagcaagagctcagccgccccggcatgctggaaatgctgttgccggggcagccggaggccgtagcccggctgcgggcaacttttgcaggactgtatagcttggacgttggcgaggaaggcgaccaggccatagccgaggcactcgccgcgccctcaagattcgttctgaagccacagagagaaggggggggtaacaacctatatggtgaggagatggtgcaggccttgaagcaattgaaagatagcgaggagcgcgcctcgtatatccttatggagaagatcgagccagaaccctttgagaattgcctcctgcgtccaggcagcccagcccgggttgtgcagtgcatttccgaattgggaatttttggtgtttacgtcagacaggagaaaaccctggtcatgaataaacacgtcggccacttattgcgaactaaagccattgagcacgctgatgggggtgttgcagccggagtggctgtgctcgataatccataccccgtctag

SEQ ID NO: 321573 - DNA, 1041 bp, Artificial Sequence
  derived and/or modified sequence
atgttccagaggagtgctgacgggtcccccgcgttgaagcagatcgaaatcaacacaatctcggcaagcttcggtgggctggcctcgcgcaccccagccgttcaccgacacgtgttgtcggtactctcgaaaacgaaagaggctgggaagattttgtccaataacccttccaagggattggctctaggcatcgccaaggcatgggagttatacggttctcctaacgctctcgtgttactcatagcccaggagaaagaacggaatatttttgaccagcgggccatagagaacgagcttctggcaaggaacattcatgttattcgtcgtacattcgaggacattagcgagaaaggcagcctggatcaggacaggagattgttcgtcgacggccaggagatcgcagttgtctactttcgggacggatacatgcccagacaatacagcctgcagaactgggaagctcgactactattggagaggagccacgctgccaagtgtcccgatatagctacccagctggcaggcaccaagaaagtgcagcaggagctgagcagacccggcatgctggagatgcttctgcccggccagcccgaggccgtagccagactcagggccacttttgcagggttatatagcttggacgttggggaagagggggatcaggctatcgctgaagccctggcagccccctcccgctttgtgctgaagcctcagagagaaggcggcgggaataatctctacggcgaggaaatggtccaggcacttaagcagttgaaggattctgaagaaagagcatcatatattctgatggagaaaatcgaacccgaaccgttcgagaattgtttgctacggccaggcagtcccgcgcgggtggtgcaatgcatctctgaactggggatatttggcgtgtatgtgcggcaggagaaaaccctggttatgaacaaacacgtggggcacctcctaagaactaaggcgattgagcatgctgatgggggagttgcggcaggtgtagccgttctcgacaacccatatcctgtgtag

SEQ ID NO: 321574 - DNA, 1919 bp, Artificial Sequence
  derived and/or modified sequence
aagcgcactgggtcgcatcgaggccccgccccctgagcctgggtagcggcgcgagggccgggagaaccgttcgcggaggaaaggcgaactagtgttgggatggccaccaactgggggagcctcttgcaggataaacagcagctagaggagctggcacggcaggccgtggaccgggccctggctgagggagtattgctgaggacctcacaggagcccacttcctcggaggtggtgagctatgccccattcacgctcttcccctcactggtccccagtgccctgctggagcaagcctatgctgtgcagatggacttcaacctgctagtggatgctgtcagccagaacgctgccttcctggagcaaactctttccagcaccatcaaacaggatgactttaccgctcgtctctttgacatccacaagcaagtcctaaaagagggcattgcccagactgtgttcctgggcctgaatcgctcagactacatgttccagcgcagcgcagatggctccccagccctgaaacagatcgaaatcaacaccatctctgccagctttgggggcctggcctcccggaccccagctgtgcaccgacatgttctcagtgtcctgagtaagaccaaagaagctggcaagatcctctctaataatcccagcaagggactggccctgggaattgccaaagcctgggagctctacggctcacccaatgctctggtgctactgattgctcaagagaaggaaagaaacatatttgaccagcgtgccatagagaatgagctactggccaggaacatccatgtgatccgacgaacatttgaagatatctctgaaaaggggtctctggaccaagaccgaaggctgtttgtggatggccaggaaattgctgtggtttacttccgggatggctacatgcctcgtcagtacagtctacagaattgggaagcacgtctactgctggagaggtcacatgctgccaagtgcccagacattgccacccagctggctgggactaagaaggtgcagcaggagctaagcaggccgggcatgctggagatgttgctccctggccagcctgaggctgtggcccgcctccgcgccacctttgctggcctctactcactggatgtgggtgaagaaggggaccaggccatcgccgaggcccttgctgcccctagccggtttgtgctaaagccccagagagagggtggaggtaacaacctatatggggaggaaatggtacaggccctgaaacagctgaaggacagtgaggagagggcctcctacatcctcatggagaagatcgaacctgagccttttgagaattgcctgctacggcctggcagccctgcccgagtggtccagtgcatttcagagctgggcatctttggggtctatgtcaggcaggaaaagacactcgtgatgaacaagcacgtggggcatctacttcgaaccaaagccatcgagcatgcagatggtggtgtggcagcgggagtggcagtcctggacaacccataccctgtgtgagggcacaaccaggccacgggaccttctatcctctgtatttgtcattcctctcctagccctcctgaggggtatcctcctaaagacctccaaagtttttatggaagggtaaatactggtaccttcccccagctttccatctgaggaccagaaaagttgtgtctcccttagatgagatctagacgcccccaaatccttgagatgtgggtatagctcagggtaagctgctctgaggtaaaggtccatgaaccctgccccactcctgtcagcccctcatcagccttttcagcaggttccagtgcctgacttgggataggactgagtggtaggaggagggggagtggaggggcatagcctttccctaattctgccttaaataaaactgcattgctgattca

SEQ ID NO: 321575 - DNA, 1092 bp, Artificial Sequence
  derived and/or modified sequence
atggccaccaactgggggagcctcttgcaggataaacagcagctagaggagctggcacggcaggccgtggaccgggccctggctgagggagtattgctgaggacctcacaggagcccacttcctcggaggtggtgagctatgccccattcacgctcttcccctcactggtccccagtgccctgctggagcaagcctatgctgtgcagatggacttcaacctgctagtggatgctgtcagccagaacgctgccttcctggagcaaactctttccagtgctctggtgctactgattgctcaagagaaggaaagaaacatatttgaccagcgtgccatagagaatgagctactggccaggaacatccatgtgatccgacgaacatttgaagatatctctgaaaaggggtctctggaccaagaccgaaggctgtttgtggatggccaggaaattgctgtggtttacttccgggatggctacatgcctcgtcagtacagtctacagaattgggaagcacgtctactgctggagaggtcacatgctgccaagtgcccagacattgccacccagctggctgggactaagaaggtgcagcaggagctaagcaggccgggcatgctggagatgttgctccctggccagcctgaggctgtggcccgcctccgcgccacctttgctggcctctactcactggatgtgggtgaagaaggggaccaggccatcgccgaggcccttgctgcccctagccggtttgtgctaaagccccagagagagggtggaggtaacaacctatatggggaggaaatggtacaggccctgaaacagctgaaggacagtgaggagagggcctcctacatcctcatggagaagatcgaacctgagccttttgagaattgcctgctacggcctggcagccctgcccgagtggtccagtgcatttcagagctgggcatctttggggtctatgtcaggcaggaaaagacactcgtgatgaacaagcacgtggggcatctacttcgaaccaaagccatcgagcatgcagatggtggtgtggcagcgggagtggcagtcctggacaacccataccctgtgtga

SEQ ID NO: 321576 - DNA, 1780 bp, Artificial Sequence
  derived and/or modified sequence
agtaaccaaatcaaaatcaaaaggcaaggaaactggagtgtgagctcctgatgcatggaagggcctgggcttgaacatcaaccagcaaggagcaggcttccatgtggtgagctatgccccattcacgctcttcccctcactggtccccagtgccctgctggagcaagcctatgctgtgcagatggacttcaacctgctagtggatgctgtcagccagaacgctgccttcctggagcaaactctttccagcaccatcaaacaggatgactttaccgctcgtctctttgacatccacaagcaagtcctaaaagagggcattgcccaggtaaccattcccagccctactccagtctgtaacctgtccctcccatctctgtttgttttctgttttgcttgaagaatttggtccaggccctcagctcatgggaatctgcctctcactggtcctcactgggtttatcccagtgaccaattctaggatgaccagaagaatgattccactgggcttgggagtgtttgctggtacctctaatctctgtgtagagttcatggtacctgtgtgctctgtggctaggtcctcagagtcagtccctgggcaggtactgtcagccttcagttttccccacagactgtgttcctgggcctgaatcgctcagactacatgttccagcgcagcgcagatggctccccagccctgaaacagatcgaaatcaacaccatctctgccagctttgggggcctggcctcccggaccccagctgtgcaccgacatgttctcagtgtcctgagtaagaccaaagaagctggcaagatcctctctaataatcccagcaagggactggccctgggaattgccaaagcctgggagctctacggctcacccaatgctctggtgctactgattgctcaagagaaggaaagaaacatatttgaccagcgtgccatagagaatgagctactggccaggaacatccatgtgatccgacgaacatttgaagatatctctgaaaaggggtctctggaccaagaccgaaggctgtttgtggatggccaggaaattgctgtggtttacttccgggatggctacatgcctcgtcagtacagtctacagaattgggaagcacgtctactgctggagaggtcacatgctgccaagtgcccagacattgccacccagctggctgggactaagaaggtgcagcaggagctaagcaggccgggcatgctggagatgttgctccctggccagcctgaggctgtggcccgcctccgcgccacctttgctggcctctactcactggatgtgggtgaagaaggggaccaggccatcgccgaggcccttgctgcccctagccggtttgtgctaaagccccagagagagggtggaggtaacaacctatatggggaggaaatggtacaggccctgaaacagctgaaggacagtgaggagagggcctcctacatcctcatggagaagatcgaacctgagccttttgagaattgcctgctacggcctggcagccctgcccgagtggtccagtgcatttcagagctgggcatctttggggtctatgtcaggcaggaaaagacactcgtgatgaacaagcacgtggggcatctacttcgaaccaaagccatcgagcatgcagatggtggtgtggcagcgggagtggcagtcctggacaacccataccctgtgtgagggcacaaccaggccacgggaccttctatcctctgtatttgtcattcctctcctagccctcctgaggggtatcctcct

SEQ ID NO: 321577 - DNA, 1425 bp, Artificial Sequence
  derived and/or modified sequence
atggctaccaactggggaagtttactgcaggataagcaacaactcgaggaactcgctagacaggcagtggatagagccctggccgagggagtgctgctccggacgtcccaagagccaacttcatcagaggtcgtgtcttacgctccgttcacgctgtttccttccctggtcccctcggccttgctggaacaagcttacgcggtgcagatggactttaacctccttgtggatgccgtgtctcaaaatgctgctttcctggagcaaactttgagtagcacaattaaacaggacgatttcaccgctagactttttgatatccataagcaggtgctaaaagagggaatcgcccagactgtattcctgggcttaaatcgaagcgattatatgttccagaggtccgctgacgggagtcccgctcttaagcagatagaaatcaacaccatcagcgctagttttgggggtctggcatcgagaacccccgctgtacacagacacgtgctctctgtgctcagcaagacaaaagaagccggtaagattttgagtaacaatccttctaagggtctcgctctggggatcgcgaaggcttgggagctttacggatcccccaacgccctggtcctcttgatcgctcaggagaaggagcgcaatattttcgatcagcgagcgatcgagaacgagctgctagcccgcaacattcacgtcattaggcgcacattcgaagacatctccgagaagggatccctggatcaggacaggcgcctctttgttgatggccaggagatcgccgtcgtctacttcagagacggttatatgcctcgccagtacagcttacagaactgggaggcccgcttactccttgagaggagtcatgcagcgaaatgcccggacatcgcaacgcaacttgctggaacgaagaaggttcagcaggaactgagtagaccgggtatgttggagatgctcctcccaggccagcctgaggctgtggccagactcagggctaccttcgctggcctgtacagtttggatgtgggcgaggagggcgatcaggcaatcgctgaagcattggccgccccatccagatttgtgttgaaacctcagagagaaggagggggtaacaatctatatggggaggagatggtgcaggcacttaaacagctgaaggactccgaagagagagctagctatatactgatggaaaaaatcgaacctgaaccttttgaaaactgcctgctacggcccggatcgcccgctcgcgttgtgcaatgtatctcggaactgggcatcttcggcgtttatgtaagacaggagaagactttggtcatgaataaacatgtggggcacttactgcggaccaaagctatcgaacatgcagatggaggcgtagcagccggcgtcgccgttttggataacccctacccagtctag

SEQ ID NO: 321578 - DNA, 1092 bp, Artificial Sequence
  derived and/or modified sequence
atggccaccaactggggcagcctgctgcaggacaagcagcagctggaggagctggcccggcaggccgtggaccgggccctggccgagggcgtgctgctgcggaccagccaggagcccaccagcagcgaggtggtgtcctatgcccccttcaccctcttccccagcctggtgcccagcgccctgctggagcaggcctatgctgtgcagatggacttcaacctgctggtggatgctgtgtcccagaatgctgccttcctggagcagaccctgagcagcgccctggtgctgctgattgcccaggagaaggagaggaacatctttgaccagagggccattgaaaatgagctgctggccaggaacatccacgtgatccggaggacctttgaggacatcagcgagaagggcagcctggaccaggacagaagactctttgtggatggccaggagattgctgtggtgtacttcagagatggctacatgccccggcagtacagcctgcagaactgggaggcccggctgctgctggagaggagccacgccgccaagtgcccagacatcgccacccagctggccggcaccaagaaggtgcagcaggagctgagcaggcctggcatgctggagatgctgctgcccggccagcctgaggccgtggcccggctgcgggccacctttgctggcctgtacagcctggatgtgggggaggagggggaccaggccatcgccgaggccctggccgcccccagcagatttgtgctgaagccccagcgggagggcggcggcaacaacctgtatggagaggagatggtgcaggccctgaagcagctgaaggacagcgaggagcgggccagctacatcctgatggagaagattgagcctgagccctttgagaactgcctgctgcggcccggcagccctgcccgggtggtgcagtgcatcagcgagctgggcatcttcggcgtgtatgtgcggcaggagaagaccctggtgatgaacaagcacgtgggccacctgctgcggaccaaggccattgaacatgctgatggaggagtggccgccggcgtggccgtgctggacaacccctaccctgtgtag

SEQ ID NO: 321579 - DNA, 1041 bp, Artificial Sequence
  derived and/or modified sequence
atgttccagaggtctgcagatggcagccctgccctgaagcagatcgagatcaacaccatcagcgccagctttggaggcctggccagcaggaccccagctgtgcacagacatgtgctgtctgtgctgagcaagaccaaggaggccggcaagatcctgagcaacaaccccagcaagggcctggccctgggcatcgccaaggcctgggagctgtatggcagccccaatgccctggtgctgctgattgcccaggagaaggagaggaacatctttgaccagagggccattgaaaatgagctgctggccaggaacatccacgtgatccggaggacctttgaggacatcagcgagaagggcagcctggaccaggaccggcggctgtttgtggatggccaggagattgctgtggtgtacttcagagatggctacatgccccggcagtacagcctgcagaactgggaggcccggctgctgctggagaggagccatgctgccaagtgcccagacatcgccacccagctggccggcaccaagaaggtgcagcaggagctgagccggcccggcatgctggagatgctgctgcccggccagcctgaggccgtggcccggctgcgggccacctttgctggcctgtacagcctggatgtgggggaggagggggaccaggccatcgccgaggccctggccgcccccagcagatttgtgctgaagccccagcgggagggcggcggcaacaacctgtatggagaggagatggtgcaggccctgaagcagctgaaggacagcgaggagcgggccagctacatcctgatggagaagattgagcctgagccctttgagaactgcctgctgcggcccggcagccctgcccgggtggtgcagtgcatcagcgagctgggcatctttggagtgtatgtgcggcaggagaagaccctggtgatgaacaagcacgtgggccacctgctgcggaccaaggccatcgagcacgcagatggcggcgtggccgccggcgtggccgtgctggacaacccctaccctgtgtag

SEQ ID NO: 321580 - DNA, 1425 bp, Artificial Sequence
  derived and/or modified sequence
atggccaccaactggggcagcctgctgcaggacaagcagcagctggaggagctggcccggcaggccgtggaccgggccctggccgagggcgtgctgctgcggaccagccaggagcccaccagcagcgaggtggtgtcctatgcccccttcaccctcttccccagcctggtgcccagcgccctgctggagcaggcctatgctgtgcagatggacttcaacctgctggtggatgctgtgtcccagaatgctgccttcctggagcagaccctgagcagcaccatcaagcaggatgacttcaccgcccggctgtttgacatccacaagcaggtgctgaaggagggcatcgcccagaccgtcttcctgggcctgaacagaagtgactacatgttccagaggtctgcagatggcagccctgccctgaagcagatcgagatcaacaccatcagcgccagctttggaggcctggccagcaggaccccagctgtgcacagacatgtgctgtctgtgctgagcaagaccaaggaggccggcaagatcctgagcaacaaccccagcaagggcctggccctgggcatcgccaaggcctgggagctgtatggcagccccaatgccctggtgctgctgattgcccaggagaaggagaggaacatctttgaccagagggccattgaaaatgagctgctggccaggaacatccacgtgatccggaggacctttgaggacatcagcgagaagggcagcctggaccaggaccggcggctgtttgtggatggccaggagattgctgtggtgtacttcagagatggctacatgccccggcagtacagcctgcagaactgggaggcccggctgctgctggagaggagccatgctgccaagtgcccagacatcgccacccagctggccggcaccaagaaggtgcagcaggagctgagccggcccggcatgctggagatgctgctgcccggccagcctgaggccgtggcccggctgcgggccacctttgctggcctgtacagcctggatgtgggggaggagggggaccaggccatcgccgaggccctggccgcccccagcagatttgtgctgaagccccagcgggagggcggcggcaacaacctgtatggagaggagatggtgcaggccctgaagcagctgaaggacagcgaggagcgggccagctacatcctgatggagaagattgagcctgagccctttgagaactgcctgctgcggcccggcagccctgcccgggtggtgcagtgcatcagcgagctgggcatctttggagtgtatgtgcggcaggagaagaccctggtgatgaacaagcacgtgggccacctgctgcggaccaaggccatcgagcacgcagatggcggcgtggccgccggcgtggccgtgctggacaacccctaccctgtgtag

SEQ ID NO: 321581 - DNA, 1092 bp, Artificial Sequence
  derived and/or modified sequence
atggccaccaactggggcagcctgctgcaggacaagcagcagctggaagagctagcacgtcaagcggtggaccgcgcgctcgcggaaggggtcctgctgagaacctcccaagagcctacctccagcgaagtcgtcagttatgccccatttaccttgttcccatctttggtaccttcagctctgctggagcaggcttacgccgttcagatggacttcaatttgcttgttgatgcagtctctcagaacgctgcttttcttgaacagactctctctagtgcgttagtgcttttaattgcacaggaaaaagaacgtaacatcttcgatcagcgggcaatagagaacgaactgctcgccagaaatatccatgtcatccgaagaacttttgaggatattagtgagaaaggctctctcgatcaggacagaaggttgttcgtcgacggtcaggaaatcgccgtggtgtacttcagagatgggtacatgcccaggcaatattccctgcagaattgggaggctcgactgctgctggaacgaagtcacgccgccaaatgcccggatatagcaactcagctcgccgggaccaaaaaggttcagcaggaactgagccgccctggaatgctggaaatgctgctacccgggcagcctgaagcagtggcccgccttcgagctactttcgctggcctgtattctttggacgtgggagaggagggcgatcaggccatcgccgaagctctggccgcccctagcagattcgtgctgaagcctcagcgcgagggaggtgggaacaacttgtatggtgaggagatggtgcaggcattgaagcagttaaaagattccgaggaaagagcctcctacattctcatggagaagatagaacctgagcccttcgagaactgtctactgcggcccgggtcacccgccagggtggtgcaatgtataagcgagttagggatctttggcgtctacgtccgtcaggaaaagactctagtcatgaataagcatgtgggacatctcctgcgtaccaaagccattgagcatgccgatggcggggttgccgcgggggtggccgtgttggataatccctatcctgtgtag

SEQ ID NO: 321582 - DNA, 1041 bp, Artificial Sequence
  derived and/or modified sequence
atgttccagcggagcgccgacggcagccccgccctgaagcagatcgagatcaacacaatctccgcatcctttggggggctggcgtcccgtactccagctgtccatagacatgttctgagcgtgttatccaaaacaaaagaggcagggaagatcctgtcaaacaacccttccaagggtctggcactcgggatcgccaaggcttgggagctatacggttccccaaacgccttagttctgctgattgcccaggaaaaggagcgcaacatatttgatcagcgagccatcgaaaacgagctgttggcccggaatatccatgtcatccggcgaacatttgaggacatcagcgagaaaggctcactcgatcaggatagacgcctcttcgtggatgggcaagaaattgcggtggtatacttcagagacggttacatgcccagacagtactctcttcagaattgggaggcaaggcttctgttggaaagaagtcatgccgctaagtgtccggacatcgccacccaactggccggcaccaagaaagtgcagcaggaactgtcgaggcctggcatgttagaaatgctgctgcctggacagcccgaggcggtggccagattacgtgccacctttgctgggctctatagcttggacgtgggagaggagggtgaccaggctattgccgaagctttagccgcacccagcagattcgttctaaaaccccagagagaaggaggcggaaataacctgtatggtgaagaaatggtacaggcactcaagcagttgaaggattcagaggagagggcaagctacattctgatggagaagattgagcctgaaccattcgaaaactgtcttttgcgtcctggcagtcccgccagggttgtgcaatgcatctcggaattaggaatatttggcgtgtacgttcgacaggagaaaactcttgttatgaacaaacacgttggtcacctcttgcggacaaaagctattgagcatgccgacggcggcgtggcagccggagttgcggttctagacaatccataccctgtgtag

SEQ ID NO: 321583 - DNA, 1425 bp, Artificial Sequence
  derived and/or modified sequence
atggccaccaactggggcagcctgctgcaggacaagcagcagctggaagaactggcgcggcaggcagtggacagagcgttggctgagggtgtcctcctcagaacgtctcaggagcccacttcctcggaagtggtcagctacgctcccttcacactcttcccaagcctggtgcctagcgctttactggagcaggcctacgccgtgcagatggacttcaatctgctggtcgatgcagtctcacaaaatgcagcctttctggagcagactctgagcagtacgatcaagcaggacgacttcaccgcgcggctgttcgacattcacaagcaggtactcaaagaaggcatcgctcagaccgtttttctaggtctaaataggtcagactatatgttccaacgcagcgccgacggatctcccgcactaaaacagatagaaattaatactattagcgccagttttggaggcctggcttcaagaacaccagccgttcacaggcacgttttgtccgtactctctaaaacgaaggaggccgggaaaatactgtctaataacccctccaaaggcctcgccctcggtattgcaaaggcatgggagctgtacggctctcccaacgcactcgtgctgttaatagcccaggagaaagaaagaaatatattcgatcaaagagccattgagaacgaattgcttgcgcgtaatatccacgttattcgcaggacctttgaggatattagtgagaagggcagccttgaccaagatcgacgactgtttgtcgacggccaagagattgcagtcgtgtactttcgcgatgggtatatgccaagacaatattcactacaaaattgggaggcacgtctgctgttagagaggtcacacgctgccaagtgccccgacattgccacgcagttggcaggcacaaagaaggtgcagcaggaactgagtagacccggaatgcttgaaatgcttcttcccgggcagcccgaagctgtcgccaggctccgggcgacgttcgccggactgtactccttagacgtcggggaagaaggcgaccaagctattgctgaagcgcttgccgccccttcccgattcgttctcaagcctcagcgggagggcggaggaaacaatctgtacggcgaagaaatggttcaggccttaaaacaactcaaagactcagaggagcgtgccagctatatactgatggaaaaaattgagcccgagccctttgaaaactgtctgctacgacccgggtcccctgcacgggtcgtgcagtgtataagcgagttgggaattttcggggtgtacgtcagacaggagaaaacgctcgtgatgaataaacacgtgggccatttattgcggaccaaggccattgagcacgcggatggaggtgtcgcagccggggtcgccgttctggataacccttaccccgtttag

SEQ ID NO: 321584 - DNA, 1092 bp, Artificial Sequence
  derived and/or modified sequence
atggccacaaattggggaagcctgctccaggacaaacaacagctggaagagctggccaggcaggccgtcgacagggccctggctgaaggagtgctgctgaggactagccaggaaccaacaagctcagaggttgtaagttacgcccctttcaccctcttcccttccttagtgccctcagcccttctggagcaggcatatgctgtccaaatggatttcaacttattggttgacgctgttagccaaaacgctgcttttcttgagcagacactgtctagcgcactcgttctactgatagcccaggagaaggagcgaaatatatttgatcaacgcgcaattgagaatgagttactggctcgcaacatccacgtaattagaaggaccttcgaggacatttctgagaagggtagcctggatcaagaccgaagattattcgtggacggccaggaaattgctgtggtgtatttcagagacgggtatatgcccaggcaatattccctccagaactgggaggctcgtctacttctcgaacgttcgcatgccgcaaaatgtcctgacattgcaactcagctggctggcactaaaaaagtgcagcaggagctgtcacggcctggcatgctagagatgctgttgccaggccagccagaggctgtcgctcgccttagggccacatttgctggcctgtactctttagacgttggtgaggagggggatcaggcaatcgccgaagccctggctgccccatcccgtttcgttctcaaaccccagcgcgaaggaggcggtaataatttgtatggagaggagatggtgcaggctctaaagcagctgaaagactctgaagagagggcttcctacatcctcatggagaaaatagagcctgagccttttgagaactgccttctgcgacccggatcccctgcaagagtggttcagtgcattagcgagctcggaatattcggcgtatacgtgagacaagaaaagaccttagtgatgaataaacacgttggacatctcctgagaactaaagccatagaacatgctgacggtggtgtcgccgctggagtcgcagtgctcgataatccataccccgtttag

SEQ ID NO: 321585 - DNA, 1041 bp, Artificial Sequence
  derived and/or modified sequence
atgttccagcgatccgccgatggaagccccgctctgaagcagatagagatcaataccatatctgcttcgtttggcggacttgcatcaagaacaccagctgtgcacaggcacgtcctcagcgtcctgagcaagacaaaggaggccggtaagatcctgagcaacaatcccagcaaggggctagcacttggcatcgccaaggcctgggagctgtatggctcacctaacgctctggtgctcctaattgcacaggagaaggaaaggaacatattcgaccagagggctatcgaaaatgagcttcttgctagaaatattcacgttatccgcaggacattcgaggatattagtgagaagggaagcttggaccaggacaggcggctcttcgtggacgggcaagaaatcgccgtcgtctatttcagggatggctacatgcctagacagtattcattgcagaactgggaggctcggctcctattggaacgcagtcacgctgctaaatgcccagacatcgcaacccaactagccggaactaagaaggttcagcaagaactgagccggccagggatgttagagatgctcctgcctggccagccagaggcggtcgcgcgattgcgagcgacatttgcaggactttatagcttagatgtcggggaagagggggaccaggcaattgcagaagctctggctgccccatccagattcgtgctgaaacctcagagagaagggggtggcaacaacctctacggtgaggaaatggtgcaggcgcttaagcaactgaaggattccgaggaacgagcgtcatacatactgatggagaaaatagagccagagccttttgaaaactgcctcctcagaccaggatccccagccagggtggtccaatgcatttctgaacttgggatttttggcgtatacgtccggcaggaaaaaactctggtgatgaacaaacacgttggacaccttctgcgaaccaaggcaattgagcacgcggacggtggcgtagcggctggggtggcagtgttggacaatccttaccctgtgtag

SEQ ID NO: 321586 - DNA, 1425 bp, Artificial Sequence
  derived and/or modified sequence
atggccaccaattgggggagcctgctgcaggacaaacaacaactggaagagcttgctagacaggccgtcgaccgggcacttgctgagggtgtgttgctgagaacaagccaagaacccacgtcatcggaagtcgtgagctatgctccattcacattgttcccgagtctagtgccctcagcactcttggagcaagcatacgccgtgcagatggacttcaacctgctcgtggatgcggtaagccagaacgctgcgtttctggagcagaccctgagtagcaccatcaaacaagatgactttacagcccgattgtttgacatacacaagcaggtgttgaaggaaggtatcgcccagactgtgtttctgggcctcaaccggtccgactatatgtttcagcggagcgccgacggctccccagcactcaaacagattgagattaacaccatctctgcatcctttggcggacttgcgagccggaccccggcagttcacaggcacgtgctctccgttctgagtaagacgaaggaggcaggaaaaattctaagcaacaacccctctaagggattagccctcgggattgcgaaggcatgggagttgtatggttccccaaacgccctggtgctgcttatagcacaggaaaaggagcgcaatatttttgatcagcgcgcaatcgagaatgaactgctcgctaggaacatccatgtgatccggaggacttttgaggacatctcagaaaagggaagcttggatcaggacaggcggctgttcgttgatggccaggaaatcgccgttgtctattttagggacgggtatatgccaaggcagtactcactgcaaaactgggaagccagactgctgctcgaaagaagccacgctgctaaatgtcctgacatcgccacccaattggcaggcaccaagaaagtacagcaggaattgtctaggcctggtatgctggagatgctccttccgggacagccagaggctgtcgctagacttagagccacgttcgccggactgtacagcctggatgtgggagaagagggtgatcaagctatagcagaggctctggccgctccatctcgattcgtgttgaagcctcaaagggagggtgggggaaataatctgtatggagaagagatggtccaagctctgaagcagcttaaggactcagaggaacgagcttcttatatcttgatggaaaagatagagcctgagccttttgagaattgcctcctgaggccgggaagcccagcgagagtcgtacaatgcatttcggagctggggatttttggcgtgtatgttagacaagaaaagaccttggtgatgaataagcatgtcggccatctgctcaggacaaaggcaatagagcacgccgacggcggtgtcgcggctggcgtcgccgtgctcgacaacccttatccagtctag

SEQ ID NO: 321587 - DNA, 1092 bp, Artificial Sequence
  derived and/or modified sequence
atggccaccaactggggcagcctgctgcaggacaagcagcagctggaggagctggccagacaggccgtggacagagccctggccgagggcgtgctgctgagaaccagccaggagcccaccagcagcgaggtggtgagctacgcccccttcaccctgttccccagcctggtgcccagcgccctgctggagcaggcctacgccgtgcagatggacttcaacctgctggtggacgccgtgagccagaacgccgccttcctggagcagaccctgagcagcgccctggtgctgctgatcgcccaggagaaggagagaaacatcttcgaccagagagccatcgagaacgagctgctggccagaaacatccacgtgatcagaagaaccttcgaggacatcagcgagaagggcagcctggaccaggacagaagactgttcgtggacggccaggagatcgccgtggtgtacttcagagacggctacatgcccagacagtacagcctgcagaactgggaggccagactgctgctggagagaagccacgccgccaagtgccccgacatcgccacccagctggccggcaccaagaaggtgcagcaggagctgagcagacccggcatgctggagatgctgctgcccggccagcccgaggccgtggccagactgagagccaccttcgccggcctgtacagcctggacgtgggcgaggagggcgaccaggccatcgccgaggccctggccgcccccagcagattcgtgctgaagccccagagagagggcggcggcaacaacctgtacggcgaggagatggtgcaggccctgaagcagctgaaggacagcgaggagagagccagctacatcctgatggagaagatcgagcccgagcccttcgagaactgcctgctgagacccggcagccccgccagagtggtgcagtgcatcagcgagctgggcatcttcggcgtgtacgtgagacaggagaagaccctggtgatgaacaagcacgtgggccacctgctgagaaccaaggccatcgagcacgccgacggcggcgtggccgccggcgtggccgtgctggacaacccctaccccgtgtag

SEQ ID NO: 321588 - DNA, 1041 bp, Artificial Sequence
  derived and/or modified sequence
atgttccagagaagcgccgacggcagccccgccctgaagcagatcgagatcaacaccatcagcgccagcttcggcggcctggccagcagaacccccgccgtgcacagacacgtgctgagcgtgctgagcaagaccaaggaggccggcaagatcctgagcaacaaccccagcaagggcctggccctgggcatcgccaaggcctgggagctgtacggcagccccaacgccctggtgctgctgatcgcccaggagaaggagagaaacatcttcgaccagagagccatcgagaacgagctgctggccagaaacatccacgtgatcagaagaaccttcgaggacatcagcgagaagggcagcctggaccaggacagaagactgttcgtggacggccaggagatcgccgtggtgtacttcagagacggctacatgcccagacagtacagcctgcagaactgggaggccagactgctgctggagagaagccacgccgccaagtgccccgacatcgccacccagctggccggcaccaagaaggtgcagcaggagctgagcagacccggcatgctggagatgctgctgcccggccagcccgaggccgtggccagactgagagccaccttcgccggcctgtacagcctggacgtgggcgaggagggcgaccaggccatcgccgaggccctggccgcccccagcagattcgtgctgaagccccagagagagggcggcggcaacaacctgtacggcgaggagatggtgcaggccctgaagcagctgaaggacagcgaggagagagccagctacatcctgatggagaagatcgagcccgagcccttcgagaactgcctgctgagacccggcagccccgccagagtggtgcagtgcatcagcgagctgggcatcttcggcgtgtacgtgagacaggagaagaccctggtgatgaacaagcacgtgggccacctgctgagaaccaaggccatcgagcacgccgacggcggcgtggccgccggcgtggccgtgctggacaacccctaccccgtgtag

SEQ ID NO: 321589 - DNA, 1425 bp, Artificial Sequence
  derived and/or modified sequence
atggccaccaactggggcagcctgctgcaggacaagcagcagctggaggagctggccagacaggccgtggacagagccctggccgagggcgtgctgctgagaaccagccaggagcccaccagcagcgaggtggtgagctacgcccccttcaccctgttccccagcctggtgcccagcgccctgctggagcaggcctacgccgtgcagatggacttcaacctgctggtggacgccgtgagccagaacgccgccttcctggagcagaccctgagcagcaccatcaagcaggacgacttcaccgccagactgttcgacatccacaagcaggtgctgaaggagggcatcgcccagaccgtgttcctgggcctgaacagaagcgactacatgttccagagaagcgccgacggcagccccgccctgaagcagatcgagatcaacaccatcagcgccagcttcggcggcctggccagcagaacccccgccgtgcacagacacgtgctgagcgtgctgagcaagaccaaggaggccggcaagatcctgagcaacaaccccagcaagggcctggccctgggcatcgccaaggcctgggagctgtacggcagccccaacgccctggtgctgctgatcgcccaggagaaggagagaaacatcttcgaccagagagccatcgagaacgagctgctggccagaaacatccacgtgatcagaagaaccttcgaggacatcagcgagaagggcagcctggaccaggacagaagactgttcgtggacggccaggagatcgccgtggtgtacttcagagacggctacatgcccagacagtacagcctgcagaactgggaggccagactgctgctggagagaagccacgccgccaagtgccccgacatcgccacccagctggccggcaccaagaaggtgcagcaggagctgagcagacccggcatgctggagatgctgctgcccggccagcccgaggccgtggccagactgagagccaccttcgccggcctgtacagcctggacgtgggcgaggagggcgaccaggccatcgccgaggccctggccgcccccagcagattcgtgctgaagccccagagagagggcggcggcaacaacctgtacggcgaggagatggtgcaggccctgaagcagctgaaggacagcgaggagagagccagctacatcctgatggagaagatcgagcccgagcccttcgagaactgcctgctgagacccggcagccccgccagagtggtgcagtgcatcagcgagctgggcatcttcggcgtgtacgtgagacaggagaagaccctggtgatgaacaagcacgtgggccacctgctgagaaccaaggccatcgagcacgccgacggcggcgtggccgccggcgtggccgtgctggacaacccctaccccgtgtag

SEQ ID NO: 321590 - protein, 858 aa, Artificial Sequence [sequence omitted]

SEQ ID NO: 321591 - protein, 813 aa, Artificial Sequence
  derived and/or modified sequence
RDGGEKTAVTRLGKLRDCNTHDSLLEVCDDYSLDDNEYFFDRHPGAFTSILNFYRTGRLHMMEEMCALSFSQELDYWGIDEIYLESCCQARYHQKKEQMNEELKREAETLREREGEEFDNTCCAEKRKKLWDLLEKPNSSVAAKILAIISIMFIVLSTIALSLNTLPELQSLDEFGQSTDNPQLAHVEAVCIAWFTMEYLLRFLSSPKKWKFFKGPLNAIDLLAILPYYVTIFLTESNKSVLQFQNVRRVVQIFRIMRILRILKLARHSTGLQSLGFTLRRSYNELGLLILFLAMGIMIFSSLVFFAEKDEDDTKFKSIPASFWWATITMTTVGYGDIYPKTLLGKIVGGLCCIAGVLVIALPIPIIVNNFSEFYKEQKRQEKAIKRREALERAKRNGSIVSMNMKDAFARSIEMMDIVVEKNGENMGKKDKVQDNHLSPNKWKWTKRTLSETSSSKSFETKEQGSPEKARSSSSPQHLNVQQLEDMYNKMAKTQSQPILNTKESAAQSKPKEELEMESIPSPVAPLPTRTEGVIDMRSMSSIDSFISCATDFPEATRFSHSPLTSLPSKTGGSTAPEVGWRGALGASGGRFVEANPSPDASQHSSFFIESPKSSMKTNNPLKLRALKVNFMEGDPSPLLPVLGMYHDPLRNRGSAAAAVAGLECATLLDKAVLSPESSIYTTASAKTPPRSPEKHTAIAFNFEAGVHQYIDADTDDEGQLLYSVDSSPPKSLPGSTSPKFSTGTRSEKNHFESSPLPTSPKFLRQNCIYSTEALTGKGPSGQEKCKLENHISPDVRVLPGGGAHGSTRDQSI

SEQ ID NO: 321592 - DNA, 2577 bp, Artificial Sequence
  derived and/or modified sequence
atgccggccggtatgacaaagcatggcagccgttcaacctcaagcctgccccctgaacccatggaaatagtgaggtctaaggcctgcagcagacgcgtgcggttgaacgtaggcgggctggcgcacgaggtactgtggagaactctggacagactgccacggacacgcctggggaagttgcgggattgtaatacacacgacagcctgctggaggtgtgtgacgattatagcctggacgataacgaatattttttcgatcggcacccgggagccttcacctcgatcttaaacttctaccggaccgggcgtctgcacatgatggaggagatgtgcgcactcagcttctcgcaggagctggattattggggcattgatgagatctatctggaatcctgttgccaggcccggtaccaccaaaaaaaagagcaaatgaatgaagagcttaagagagaggcagagactctgagagagagagaaggtgaagagtttgataatacttgttgtgccgagaagagaaagaagctgtgggacctgctggaaaagccgaatagctcggtggcagccaagattctggctataatttctataatgttcattgtgctctccacaattgccttatcattaaacactctgccggagcttcagagtttagatgaattcgggcagtctacagacaacccccagctggctcatgtcgaggcagtgtgtatcgcctggttcacaatggagtatcttttgcggtttctttcatctcccaaaaagtggaaattttttaaaggtcctttgaacgctatagatctgctcgccatcctcccctattatgtaaccatctttcttacggaatccaataagagcgtgctgcaatttcaaaacgtgcgtagggtggtacagattttccggataatgcgcattctgcgcatcctcaagctggcccgccattcaacagggctgcaatccctgggttttaccctgcggcgctcctacaatgaactggggctcttgatattgttcctcgccatgggcattatgattttttctagcctggtgttctttgcagaaaaggacgaggacgatacaaagtttaaatcaatccctgccagcttctggtgggctaccataactatgaccactgtggggtacggcgacatctaccctaagaccctgctgggaaagattgtggggggtctgtgttgcatcgccggcgtcttggtgatagctttgcctatcccgattatagtgaacaatttttccgagttctataaggaacagaagcgtcaggaaaaagctattaagagaagggaggcattggaaagggcaaagcggaacggcagcattgtatctatgaacatgaaggacgctttcgcgagaagtatagagatgatggacatcgtagttgaaaagaacggagagaacatgggcaagaaggacaaggtacaggataaccacttgtctccgaataagtggaaatggacgaagcgtaccctctccgagacttcctcaagcaaatcatttgaaaccaaggagcaggggagccctgagaaggctaggagctcaagctccccgcagcatctgaatgtgcagcaactcgaggacatgtataataaaatggccaagacccagtcgcaaccgatcctgaataccaaggagagtgcagcgcaaagtaagcctaaggaggagctggagatggaatctatcccctcccccgttgccccattacccacccggacagagggagtcatcgatatgcgatccatgtccagcatcgacagctttatctcctgtgctacggacttcccagaagccactcggttctctcactccccactcacgagcctgcctagcaagacagggggatccacggcgcccgaggtggggtggcggggcgctcttggcgcctctgggggtagattcgtggaagccaacccatccccagacgcctcccaacattcctcatttttcatagagtcacctaaatcctctatgaaaactaacaatcccctcaagctgcgagccctgaaggtgaacttcatggaaggcgacccatcacccctgctgccagtattggggatgtaccatgaccccttgaggaaccgggggagcgcagccgccgcggtcgcaggcctggaatgcgcaactctgctggataaggcggtgctgagcccagaaagcagcatctacaccaccgcatcagccaagactccacctagatcacctgagaaacacaccgcaatcgccttcaactttgaggcaggcgtccaccagtatatcgacgctgacacagacgatgaaggccagttgctgtacagcgtggacagctccccacccaagtctctgcctggcagcacctctccaaaattcagtacaggcaccaggagcgagaagaatcattttgaatcgagtccactgcctacctcccccaagtttcttcggcaaaattgtatttattcgacagaggccctgaccgggaagggcccgagcggtcaggagaagtgtaagttggaaaaccacattagtcccgatgttcgcgttttaccaggcggaggcgctcacggaagcactcgagaccagagcatttag

SEQ ID NO: 321593 - DNA, 2442 bp, Artificial Sequence
  derived and/or modified sequence
cgggacggaggggaaaaaactgcagtcaccagactgggtaaactgcgggattgtaatacccacgacagcctcctcgaggtgtgtgacgattactctctggacgataacgagtacttctttgacaggcaccccggcgcattcacttcaatcctaaacttctatcgtactggccgccttcatatgatggaggaaatgtgtgcactgagcttttctcaggaactggattactgggggatagacgagatttacctggagtcatgttgtcaggccaggtaccatcagaagaaggaacaaatgaacgaggagctgaagagggaggcagagacactgcgcgaaagggagggagaggagtttgacaatacctgttgtgcagaaaagcgaaagaagctttgggacctgctggaaaagccaaattcctccgttgccgcgaaaatcctggctatcatcagcatcatgtttatagtacttagtacgatcgccctctcgttaaatacacttcctgaactgcaatcccttgatgagtttggccagagtactgacaatccacaactggcccatgtcgaggcggtctgtattgcatggtttactatggaataccttctgcggtttttgagctcgccaaaaaaatggaagttcttcaagggccctctcaatgctatagacctgctggcaatcttaccgtattatgtaaccatctttttgacggagtccaataaatctgtcctacagtttcagaacgtcagaagggttgttcagatctttcgcattatgcggatcctgaggatcctaaaactggcccgtcactcaacgggacttcagagcctgggtttcaccctacgccgaagttataacgagttggggctcctgattctgttccttgccatgggcatcatgatcttttcatcccttgttttttttgcggaaaaggacgaagacgacaccaagtttaaatcaatcccggctagcttttggtgggccacgatcactatgaccaccgtcggttacggcgacatttatcccaaaaccttgcttggcaagatcgtgggagggctttgctgtattgccggcgtactagtgatagctctcccgatacctattatcgtgaataatttttctgaattttacaaagagcagaagcgacaagagaaggcgatcaagcgccgcgaagcactcgagagagctaaacgcaacggtagcatcgtttcaatgaatatgaaggatgcttttgcgaggtcaatcgaaatgatggacattgtcgtagagaagaatggagaaaacatggggaagaaggataaggttcaagacaatcacctgagccctaataagtggaaatggacaaaacgcacactcagcgagacttcttcttccaaaagtttcgagacaaaagagcagggatccccagagaaagctaggagtagcagttcgccccagcacctcaatgtgcagcagctggaggatatgtacaataagatggcaaagactcagagccagccaattttgaataccaaggagagcgcagcccaatcaaaaccgaaggaagagttagaaatggaatccattcctagtccagtggcccccctgcctacacggactgaaggagtcatcgatatgagaagcatgtcctctattgacagtttcatatcgtgcgccacagatttccctgaagcaacgaggttttcccactcacccctgacaagtctcccatctaaaacaggaggtagcacagcccccgaagtgggttggcgtggggcccttggggcctcgggagggagattcgtggaggctaatccgagccccgacgcgtcacagcattcctcattctttattgaaagtcctaagagctccatgaaaacgaataatcccttgaaactgagagctctgaaagtcaattttatggaaggagacccttcacctctgctccccgtcttgggtatgtaccacgatccgctgcggaatagaggctccgctgctgctgccgtggcgggcttagagtgcgctactctgctggataaagccgtgctttctcctgagtcaagcatctacaccaccgcatcagcaaagacaccaccccgtagtccagagaagcacacggccattgctttcaactttgaggccggagtgcaccaatacattgacgccgatactgacgacgagggtcagttgctgtactcggtggattcatctcccccaaaaagcctccccggctcgaccagcccaaaattcagcaccggaacacgcagtgagaaaaaccattttgagtcaagtcctctgccaacatccccaaagttcctacgccagaactgcatttattctactgaggctctgaccggcaagggccctagcggccaagagaaatgtaaactggaaaaccacatcagcccagacgtcagggtgctgcctggagggggcgcccacggctctacgagggaccagtctatctag

SEQ ID NO: 321594 - DNA, 2577 bp, Artificial Sequence
  derived and/or modified sequence
atgcctgctggcatgaccaagcacggcagccgcagcaccagcagcctgcccccagagcccatggagatcgtgcgcagcaaggcctgcagcagaagagtgcggctgaatgtgggcggcctggcccacgaggtgctgtggaggaccctggaccggctgcccaggacccggctgggcaagctgcgggactgcaacacccatgacagcctgctggaggtgtgtgatgactacagcctggatgacaatgagtacttctttgacagacaccctggggccttcaccagcatcctgaacttctacagaacaggccgcctgcacatgatggaggagatgtgtgccctgtccttcagccaggagctggactactggggcattgatgagatctacctggagagctgctgccaggcccgctaccaccagaagaaggagcagatgaatgaggagctgaagcgggaggccgagaccctgcgggagcgggagggggaggagtttgacaacacctgctgtgccgagaagaggaagaagctgtgggacctgctggagaagcccaacagctctgtggccgccaagatcctggccatcatcagcatcatgtttattgtgctgagcaccatcgccctgagcctgaacaccctgcctgagctgcagagcctggatgaatttggccagagcacagacaacccccagctggcccacgtggaggccgtgtgcatcgcctggttcaccatggagtacctgctgcgcttcctgagcagccccaagaagtggaagttcttcaagggccccctgaatgccatcgacctgctggccatcctgccctactacgtgaccatcttcctgacagagagcaacaagtctgtgctgcagttccagaatgtgagaagagtggtgcagatcttccgcatcatgaggatcctgcgcatcctgaagctggcccggcacagcacaggcctgcagagcctgggcttcaccctgcggcgcagctacaatgagctgggcctgctgatcctcttcctggccatgggcatcatgatcttcagcagcctggtgttctttgctgagaaggatgaagatgacaccaagttcaagagcatcccagccagcttctggtgggccaccatcaccatgaccaccgtgggctacggggacatctaccccaagaccctgctgggcaagatcgtgggcggcctgtgctgcatcgccggcgtgctggtgattgccctgcccatccccatcatcgtgaacaacttcagcgagttctacaaggagcagaagaggcaggagaaggccatcaagaggcgggaggccctggagcgggccaagagaaatggcagcatcgtgtccatgaacatgaaggatgcctttgcccggagcattgagatgatggacatcgtggtggagaagaatggagagaacatgggcaagaaggacaaggtgcaggacaaccacctgagccccaacaagtggaagtggaccaagaggaccctgtctgagaccagcagcagcaagagctttgagaccaaggagcagggcagccctgagaaggcccggagcagcagcagcccccagcacctgaatgtgcagcagctggaggacatgtacaacaagatggccaagacccagagccagcccatcctgaacaccaaggagagcgctgcccagagcaagcccaaggaggagctggagatggagagcatccccagccctgtggcccccctgcccaccaggacagagggcgtcatcgacatgaggtccatgagcagcattgacagcttcatcagctgtgccacagacttccctgaggccacccgcttcagccacagccccctgaccagcctgcccagcaagacaggaggcagcacagcccctgaggtgggctggaggggggccctgggcgccagcggcggccgctttgtggaggccaaccccagcccagatgccagccagcacagcagcttcttcatcgagagccccaagagctccatgaagaccaacaaccccctgaagctgcgggccctgaaggtgaacttcatggagggggaccccagccccctgctgcctgtgctgggcatgtaccatgaccccctgaggaacagaggcagcgctgctgctgctgtggccggcctggagtgtgccaccctgctggacaaggctgtgctgagccctgagagcagcatctacaccacagccagcgccaagaccccacccaggagccctgagaagcacacagccatcgccttcaactttgaggccggcgtgcaccagtacattgatgctgacacagatgatgagggccagctgctgtacagcgtggacagcagcccccccaagagcctgcccggcagcaccagccccaagttcagcacaggcaccaggtctgagaagaaccactttgagagcagccccctgcccaccagccccaagttcctgcggcagaactgcatctacagcacagaggccctgaccgggaagggccccagcggccaggagaagtgcaagctggagaaccacatcagcccagatgtgcgggtgctgcccggcggcggggcccacggcagcacccgggaccagagcatctag

SEQ ID NO: 321595 - DNA, 2442 bp, Artificial Sequence
  derived and/or modified sequence
cgggatggaggagagaagacagctgtgacccggctgggcaagctgcgggactgcaacacccatgacagcctgctggaggtgtgtgatgactacagcctggatgacaatgagtacttctttgacagacaccctggggccttcaccagcatcctgaacttctacagaacaggccgcctgcacatgatggaggagatgtgtgccctgtccttcagccaggagctggactactggggcattgatgagatctacctggagagctgctgccaggcccgctaccaccagaagaaggagcagatgaatgaggagctgaagcgggaggccgagaccctgcgggagcgggagggggaggagtttgacaacacctgctgtgccgagaagaggaagaagctgtgggacctgctggagaagcccaacagctctgtggccgccaagatcctggccatcatcagcatcatgttcatcgtgctgagcaccatcgccctgagcctgaacaccctgcctgagctgcagagcctggatgaatttggccagagcacagacaacccccagctggcccacgtggaggccgtgtgcatcgcctggttcaccatggagtacctgctgcgcttcctgagcagccccaagaagtggaagttcttcaagggccccctgaatgccatcgacctgctggccatcctgccctactacgtgaccatcttcctgacagagagcaacaagtctgtgctgcagttccagaatgtgcggcgggtggtgcagatcttccgcatcatgaggatcctgcgcatcctgaagctggcccggcacagcacaggcctgcagagcctgggcttcaccctgcggcgcagctacaatgagctgggcctgctgatcctcttcctggccatgggcatcatgatcttcagcagcctggtgttctttgctgagaaggatgaagatgacaccaagttcaagagcatcccagccagcttctggtgggccaccatcaccatgaccaccgtgggctatggagacatctaccccaagaccctgctgggcaagatcgtgggcggcctgtgctgcatcgccggcgtgctggtgattgccctgcccatccccatcatcgtgaacaacttcagcgagttctacaaggagcagaagaggcaggagaaggccatcaagagaagagaggccctggagcgggccaagagaaatggcagcatcgtgtccatgaacatgaaggatgcctttgcccggagcattgagatgatggacatcgtggtggagaagaatggagagaacatgggcaagaaggacaaggtgcaggacaaccacctgagccccaacaagtggaagtggaccaagaggaccctgtctgagaccagcagcagcaagagctttgagaccaaggagcagggcagccctgagaaggcccggagcagcagcagcccccagcacctgaatgtgcagcagctggaggacatgtacaacaagatggccaagacccagagccagcccatcctgaacaccaaggagagcgctgcccagagcaagcccaaggaggagctggagatggagagcatccccagccctgtggcccccctgcccaccaggacagaaggagtgattgacatgaggtccatgagcagcattgacagcttcatcagctgtgccacagacttccctgaggccacccgcttcagccacagccccctgaccagcctgcccagcaagacaggaggcagcacagcccctgaggtgggctggaggggggccctgggcgccagcggcggccgctttgtggaggccaaccccagcccagatgccagccagcacagcagcttcttcatcgagagccccaagagctccatgaagaccaacaaccccctgaagctgcgggccctgaaggtgaacttcatggagggggaccccagccccctgctgcctgtgctgggcatgtaccatgaccccctgaggaacagaggcagcgctgctgctgctgtggccggcctggagtgtgccaccctgctggacaaggctgtgctgagccctgagagcagcatctacaccacagccagcgccaagaccccacccaggagccctgagaagcacacagccatcgccttcaactttgaagctggggtgcaccagtacattgatgctgacacagatgatgagggccagctgctgtacagcgtggacagcagcccccccaagagcctgcccggcagcaccagccccaagttcagcacaggcaccaggtctgagaagaaccactttgagagcagccccctgcccaccagccccaagttcctgcggcagaactgcatctacagcacagaggccctgaccgggaagggccccagcggccaggagaagtgcaagctggagaaccacatcagcccagatgtgcgggtgctgcccggcggcggggcccacggcagcacccgggaccagagcatctag

SEQ ID NO: 321596 - DNA, 2577 bp, Artificial Sequence
  derived and/or modified sequence
atgcccgccggcatgaccaagcacggcagccggagcaccagcagcttgcctcccgagcccatggagatagtccgaagtaaggcctgctcgaggagagtgcgcttgaatgtcggtgggctggcccacgaagtgctgtggcgaactctggatcgtctgccccggactcgcctgggcaaactgagagattgcaatacccatgactccttgctagaggtgtgcgatgattatagcctcgatgacaacgagtacttctttgaccgccatccaggggccttcacttcgatattgaacttttacaggaccggtcgcctacacatgatggaggagatgtgtgctttgagcttttctcaggaactggattactggggcattgacgagatctacctggaatcgtgctgccaagccagataccaccagaagaaagaacagatgaacgaggagcttaagcgcgaagcagagactcttagggagcgcgaaggcgaagagtttgataacacttgctgcgcagaaaaacggaagaagctgtgggacctgctggagaagcccaattccagtgtcgccgcaaaaatactggcaatcatcagcattatgtttatcgtcctgagcacaatcgctctgagtctgaacaccttaccggagctccagagtttggatgagtttggacagagcactgacaatccacagttggcccacgtagaagctgtttgcatcgcgtggtttaccatggagtaccttctgcgctttctctccagcccaaaaaagtggaagtttttcaaggggccgttaaatgccattgacctcctggccatacttccctattacgttaccattttccttactgaaagtaacaagtctgtgcttcagtttcagaacgtacgcagggtggttcagatctttcgcatcatgaggatccttaggatcctaaaacttgcacggcattcgacagggctccagagcctgggattcaccttaaggcgaagctataacgagttaggtctccttatcctcttcctcgctatgggtattatgatcttttccagtctggtgttttttgccgaaaaagatgaagacgacaccaagtttaagtctattcccgctagcttctggtgggctacaattaccatgactactgtcggctatggggatatctatcccaagactttgctggggaagatcgtaggaggactttgttgcattgcaggggttctcgtgatcgctcttcccatccccattattgtaaataatttctccgagttctataaggagcaaaaacggcaggagaaagcaatcaaacgtcgtgaggccctagaaagggccaaaaggaacggcagcatcgtgtccatgaacatgaaagacgcctttgccaggagcatcgaaatgatggatatcgtggtggagaagaacggcgagaacatgggtaagaaagataaggtgcaggataaccatctgagccccaataaatggaagtggactaaacggactctgtccgagacaagttcctctaaatccttcgaaaccaaggagcaaggctcgcccgaaaaggctcggtcctcctcatccccacagcacttaaatgtgcaacagctcgaagacatgtataacaagatggccaagactcagtcccagcccatcttgaacacgaaagaatctgccgctcagtcaaagcctaaagaagaactggagatggagagcatcccctcccctgtggcccccctccccacgcggactgaaggcgtgatcgatatgaggtctatgtccagcatcgattccttcattagctgtgctactgacttcccagaagccaccaggttttctcactcgcccctgacatccttgccttcaaagacgggtggctcgacagcacccgaggttggctggcgtggtgccctgggcgcctcaggggggcgattcgtcgaggctaacccatcacccgacgcaagccagcacagttccttcttcatcgaatcccccaaatcttcaatgaagacaaataacccactaaagcttcgggcactgaaggtgaattttatggagggggacccttccccccttctgccagtcttggggatgtatcatgaccccctgaggaacagagggtctgcggcggccgctgtggccggcctggagtgtgcgactctgttggacaaggccgtcctgtcccccgagtcctcaatttacacaaccgcttccgctaagacgccgccaagatcgcccgaaaagcatacggccatcgctttcaattttgaagcgggagtacatcagtacatagacgcggacacagacgacgaagggcaactgctgtacagcgtcgattcttccccgcctaaatccctccccggatcgaccagcccaaaattctccactggaacccgaagtgaaaagaatcacttcgaatcgtcgccgctcccaactagcccaaagttcttgaggcagaattgcatctactcaacggaggccttgacagggaaggggccgagtgggcaagaaaagtgtaagcttgagaatcatatctctccagatgtgagagtcctgccagggggaggcgctcatgggagcacacgggatcaaagcatctag

SEQ ID NO: 321597 - DNA, 2442 bp, Artificial Sequence
  derived and/or modified sequence
cgggacggcggcgagaagaccgccgtgacccggctgggcaagctgagggattgcaacacacacgacagtctgttggaggtctgtgacgattatagcctggacgataacgaatatttcttcgatcgacaccctggggcatttaccagcattttaaacttctaccggaccggccggctccatatgatggaagaaatgtgtgcgctcagttttagtcaggagttggactattggggcatcgacgagatctatctggaaagctgttgtcaagccagataccaccagaaaaaagagcaaatgaacgaggaattaaagagggaagccgagacattgagggaaagggagggggaggagtttgacaacacgtgctgcgccgagaagaggaagaagctatgggacctcctggaaaaacctaatagttcagtggctgctaaaatccttgccattatatccatcatgttcattgtcctgtctacaatcgcactatctctgaatactctccccgagttgcagtctctagacgagtttgggcagtccacagataaccctcagctggctcacgtggaagcagtgtgcattgcatggttcacgatggagtatctgctcaggtttctctcctcacctaaaaaatggaaattctttaagggacccctgaatgcaatcgacctgttggccatcctcccatactacgtgacaatatttctgaccgagagcaacaagagcgtacttcagttccagaacgtgcgaagagttgtgcagattttccgtatcatgagaatcctacggatcctgaaactggccagacattctaccgggctccagtccttaggctttactttgagacggtcttacaatgaattgggactcctgattttattcctggccatggggataatgatcttttcatcattagtcttctttgcagagaaggatgaagatgacacaaaattcaaatcgattcccgcctcattttggtgggccactataaccatgacaacagttgggtacggcgatatatatcctaagacacttctaggtaaaattgtaggtggtttgtgctgcattgccggagtactagtgattgccctgcccatccctatcatcgttaataacttctccgagttttataaagaacagaagcgtcaggaaaaagctattaaaagacgtgaggctctagagagggccaaacgcaacgggtctatcgtatccatgaatatgaaagatgcctttgctagatccatcgaaatgatggatattgtggtggagaaaaatggcgaaaacatgggcaagaaggacaaggtgcaggacaaccacctcagccctaataaatggaaatggaccaaaagaactctgtccgagacaagcagtagcaaaagcttcgaaaccaaagaacagggcagtccggagaaggctagatcatcaagtagcccgcagcacctaaatgtgcagcagctggaagatatgtacaataaaatggccaagactcagagccagcccattcttaataccaaagaaagcgctgcacagtccaagccgaaggaagaactggagatggagtccatcccttcccctgtggcgccgcttccaacccgcacagaaggcgtgatcgacatgagatctatgagctctattgactctttcatctcttgtgccaccgatttcccagaggctacacgattcagccactctcccttgacctcacttcctagcaagaccggcggctccaccgctccagaggtgggttggcgcggagcattgggggcttctggtggccgattcgtggaggcgaatccatcccccgacgctagtcagcacagtagcttcttcattgagtccccaaaatcgtccatgaagacaaacaaccccctcaagctgcgggccttgaaagtgaacttcatggagggcgaccctagccccctgctgccggtgctggggatgtaccacgacccactccggaacagagggtcagccgctgcagcggtggccggccttgagtgtgcaaccctccttgataaggcagtgcttagccctgagtcctcaatttacactactgcatctgctaaaacacccccgcggtcaccagagaaacacacggcgatcgcttttaacttcgaagccggggtacatcagtacatcgacgccgatacagacgacgaagggcaactgttgtatagtgtggacagctcgcctcctaagagccttcctggctcaacaagtcctaagttttcaaccgggacgaggagcgagaaaaatcacttcgagtcttcccctctccccactagtcccaagttcctgcgacagaactgcatctatagcacagaagcgctcactgggaagggtccctcggggcaagagaagtgcaaactggaaaatcatatttccccagatgtccgtgtgctccctggcggtggcgcacatgggtccacacgtgatcaatctatctag

SEQ ID NO: 321598 - DNA, 7318 bp, Artificial Sequence
  derived and/or modified sequence
gccgtcgggatggaggtgagaagacggccgtgacgcgcgcccgcggggccccctgcacccccagcagcccacagcgctccctgcccccctcccccgcagcagcgggccttgccgtcgagtgacagcggcctgggggggcagggggggcgggggcggccggatcagcgatgccggcgggcatgacgaagcatggctcccgctccaccagctcgctgccgcccgagcccatggagatcgtgcgcagcaaggcgtgctctcggcgggtccgcctcaacgtcggggggctggcgcacgaggtactctggcgtaccctggaccgcctgccccgcacgcggctgggcaagctccgcgactgcaacacgcacgactcgctgctcgaggtgtgcgatgactacagcctcgacgacaacgagtacttctttgaccgccacccgggcgccttcacctccatcctcaacttctaccgcactgggcgactgcacatgatggaggagatgtgcgcgctcagcttcagccaagagctcgactactggggcatcgacgagatctacctggagtcctgctgccaggcccgctaccaccagaagaaagagcagatgaacgaggagctcaagcgtgaggccgagaccctacgggagcgggaaggcgaggagttcgataacacgtgctgcgcagagaagaggaaaaaactctgggacctactggagaagcccaattcctctgtggctgccaagatccttgccataatttccatcatgttcatcgtcctctccaccattgccctgtccctcaacacgctgcctgagctacagagcctcgatgagttcggccagtccacagacaacccccagctggcccacgtggaggccgtgtgcatcgcatggttcaccatggagtacctgctgaggttcctctcctcgcccaagaagtggaagttcttcaagggcccactcaatgccattgacttgttggccattctgccatactatgtcaccattttcctcaccgaatccaacaagagcgtgctgcaattccagaatgtccgccgcgtggtccagatcttccgcatcatgcgaattctccgcatccttaagcttgcacgccactccactggcctccagtctctgggcttcactttgcggaggagctacaatgagttgggcttgctcatcctcttccttgccatgggcattatgatcttctccagccttgtcttctttgctgagaaggatgaggacgacaccaagttcaaaagcatcccagcctctttctggtgggccaccatcaccatgactactgttgggtatggagacatctaccccaagactctcctggggaaaattgttgggggactctgctgcattgcaggagtcctggtgattgctcttcccatccccatcatcgtcaataacttctctgagttctataaggagcagaagagacaggagaaagcaatcaaacggcgagaggctctggagagagccaagaggaatggcagcatcgtatccatgaacatgaaggatgcttttgcccggagcattgagatgatggacattgtggttgagaaaaatggggagaatatgggtaagaaagacaaagtacaagataaccacttgtctcctaacaaatggaaatggacaaagaggacactgtctgaaaccagctcaagtaagtcctttgaaaccaaggaacagggatcccctgaaaaagccagatcgtcttctagtcctcagcacctgaacgttcagcagttggaagacatgtacaataagatggccaagacccaatcccaacccatcctcaataccaaggagtcagcagcacagagcaaaccaaaggaagaacttgaaatggagagtatccccagccccgtagcccctctgcccactcgcacagaaggggtcattgacatgcgaagtatgtcaagcattgatagtttcattagctgtgccacagacttccctgaggccaccagattctcccacagccctttgacatcactccccagcaagactgggggcagcacagccccagaagtgggctggcggggagctctgggtgccagtggtggtaggtttgtggaggccaaccccagccctgatgccagccagcactctagtttcttcatcgagagccccaagagttccatgaaaactaacaaccctttgaagctccgagcacttaaagtcaacttcatggagggtgaccccagtccactcctccccgttctagggatgtaccatgaccctctcaggaaccgggggagtgctgcggctgctgtcgctggactggagtgtgccacgcttttggacaaggctgtgctgagcccagagtcctccatctacaccacagcaagtgctaagacacccccccggtctcctgagaaacacacagcaatagcgttcaactttgaggcgggtgtccaccagtacattgacgcagacacagatgatgagggacagctgctctacagtgtggactccagcccccccaaaagcctccctgggagcaccagtccgaagttcagcacggggacaagatcggagaaaaaccactttgaaagctcccctttacccacctcccctaagttcttaaggcagaactgtatttactccacagaagcattgactggaaaaggccccagtggtcaggaaaagtgcaaacttgagaaccacatctcccctgacgtccgtgtgttgccagggggaggagcccatggaagcacacgagatcagagcatctgaactgccctgccttggaggagagacttttgggtgaggtccaaagaggagagctgttcagcttacctgccacagagcttttctgcatgaactctggaacagaaaggccctgtaaagccctcagagagaagagagactccagagaaggctccctaagaccttgagagccatgacaggtccatcagcatgaagttggccaagccatagggcacagcacctccttgtaacaactctatagccctctttgggagatgacatgagtggaactcacagccaccactaccaccactttagacaggaccgaggccacatactccccattctctcgtggctttccatctcagcctcggagggcaacattgacagtcctcctggcttcagctagagaaggatgctggaacaagcggctggtgttgaaagagtgggttgaccaatttggtattgaatgttgcccagccacccctaggaacacctgtccatcacctcctggatggattccactgttagacagctacagggaatgattggtcatggggaagtctctgcgccataagccacgatcccagcgcaaaacccttactcaaatgtcttcattgacttcggtatttcatagtacctgagattttattttgagataccatcagggtgagttgcaccacttgtactcaattctaattgccccctggcaatctgggaagggttcagaaggtgggcacccagccaacagcatgaactcagagcattgttttagggttggaggaggaacacgctttctttacatcactagtgtagactcaaaagatatgcaagtgtcaaatatgcaaaagaaatagtttattcaaagagactgtgtgttactgaagaacagcataaaaatatgatttttttacttgcaaaaatgaaaggaaaaaaataccacgcattgaaatgcccagttcagactgaataattcctgctgcagcaaggaaagtacctactataatagaaattctgttttgttttctgtggttttcaagttaaaaaaaaaaaagttaaaataaaaagcactttatgtttttcaaaaataggttctgccagggacagtgtcaacatcttgcactttaaaataagcactatttcccatagcccaattgttgggactgtagttggattgttgctacctgcccatttctggccagcatgggtaatattgtgctggtattactgtctgccatatcaaagtctgtgggctccttccctgcccctctgaaaccttcccttaaccctcatgggtcaggaggggttcttgccccttgggtggggcctctcatgaagtcaagtatacaggagacatgcacatctcaaaaggacacagtgacagttggacattgggtgttttactctgttctctttcttgtcaaccagctattggtttttcagtgtcactgtctgtactaaaagctcaactctccttcctgcagccatcgatgcagccagtacagacaaaagcaataagtatttgtgtgcatcctgagtggttctggtgtatttcttggtgttggttttcctgtcctcgtttgatgacctggcattgtcctgcctgcttttagtccaacagcatggtgttgttggccattcctcagtacagtggcattaggttgaaccactgatgaatacaatgctatagtgttggctcacctgtcagtaaagatgacatgttattggtctgcctgtctgtagtacaatggaacaatgttgttctcttaatgtaatgttgatggatgatgtcccaagtacaatagtgtagttctgtctatcctcaatacagtaacaggcatatgtcttcccagtggaagaaagatatggtattggttcacctagtcttaagtctcaatatcatctgttgctggtctgcctgttagtacaatggcatgatccacctctcagtacacaaatatcatggagctgttctgcctgctcttcatacataaggcataaggttgagccacctgccacacatatgatgagatgggatcattccaccacccttaaaaatatgtcttctctgctgtatacaaacccaattcataacacttctcagcatctccagagactgtagatccccccaagagggtgcagtcctgttctttgccgcattaacagagaaaacgagaacgtcactcttcctaggtatcttcagagtattcgcgcagcaactgcaaagggacttaggggcagggagagtgtgaggtcatcccgtgccaggcagaggaagcagcactcccaaaacactttgctgaacacgcagtctgagctgggggcctcttgaggaatgactgtgggacagttctccgccgaccatctcacatgtctcttctttgttttcatcaccattaatgtccaccatcagcacaaatgtgaaaattcagggaaaaaaacaaatgctttttgataaaagtaaatagttgtgatttccaattcagatatttttagagctgatgctatctgtaaaaaataataataataataatatagtctattttacatatcaggaaagtgaacatgtttcaatatagccatatatattgagaaggaacttaccaccccttcttccaatcgaggcatttcatttgttggttgaagcagatgagaactgtacagattgaaaatgatttgtttttttttttttttaaaaaaaacgaaaaccaattggtgcaactctccttgtaaccaaaggccctttctgccttctgtggtcatgtaggacctggcccttccttccttgtgtattttgtccaaccgtaaagtagcattttattgagtcacttttgaaggacgaattcagaagtatcattaagaacctaccttttcaggcttcatagccagagtcctatagagttcttatagaaacagaataattgaaattcagcatatactatgcttagaaagtattttgtttgggtttgattgggtttttttttcttttacttgtgtgtgtatgtactgggggagtatagcttttattctgtgctcaattcgaaagagagtattataagttttcccagcccatccacccgctaaaaaagaacatatccaaattttaatatgtatacacccaacctgtacctatgtacgtgaatatacatgcactgggaaatctacttaagagtcttcactgagaagttcactcgatagaaaggtcttgatagagaagagaagaggaaagcaatggtctgaaggcaaatcctgctttaacttggtggtccatttcccattcattcctgaaccaatgagagcagaaagaaacaagtcaacccaaacaagcaaactaggggctggacgcggcgaatggatgctggtcagtttggcaaattcactgaaactcatcaagaacccagctgaacttgcattccaacttccacaattatctgaaagggctagggaccaggtagccatgtgtcccaatcacacgggggagagtctgccaccggcggtgagagaggtggggaagctttggaggagacagtatattcacctttttatctttgggtaaaagaaaccaacaggactttggtgcagtagatttctcagtgccttctttaggaattctatcttaagcacacttcaaggggaaagaaaaaaggaggagagaacatttgttcccgtgaagtccctttctccaaaggactggggatcaagaaggaagaagagtaagaaggaaaaacaacaaaatcctgaggaggccatttcttttaacccacccagcttgcccctgaaaactgctggtgatacaaactttttcaaactgacttccagcttctccatgtgtcttggtaactgtagcctcgtctctgccctttctcctaataagatccatgtttctaaggagaaaaacaaaacagtattctcttctgtaaaactgtaatgtattgttgatatttgtaactattgtatatttctgtcttgctccagtcccagctggagtgtctagttccatggacaaggggatatttaaaattcaccacggacaagagccactaaagccaggtctctatcgctaatctctctcctattcttatttctctaccaactaatctcaagtaacaataccccaggctttttttcagcctcaattcaagtaactttgaatcaaaagagagcaaggcaaaaagcctccggacatgcttctttgggaaaggactttttctgtagctgcagagtgggcaggagggagaaggggctcccctgagaccccggcaggacaatggaaagcttccagccccgagctgatgtttcctcacctatcactgcttataggacagcatccaaatgctttcatgtcactcagcccaggcaacccaaaccagtcctggctacacccagaaataagagttacctctgcattttctgttgccatttttctggctctagaagtatctgatgcgcgactatgtcatagaatgtccacgcatctcagagtagtctatttttctgttcagataaaatatatatatatatgtatttttagcaaatttataatagggcaattgagtctaatttcttcttttgtaatacagaacaatatcttaggagtttca

SEQ ID NO: 321599 - DNA, 3457 bp, Artificial Sequence
  derived and/or modified sequence
cgggatggaggtgagaagacggccgtgacgcggctgggcaagctccgcgactgcaacacgcacgactcgctgctcgaggtgtgcgatgactacagcctcgacgacaacgagtacttctttgaccgccacccgggcgccttcacctccatcctcaacttctaccgcactgggcgactgcacatgatggaggagatgtgcgcgctcagcttcagccaagagctcgactactggggcatcgacgagatctacctggagtcctgctgccaggcccgctaccaccagaagaaagagcagatgaacgaggagctcaagcgtgaggccgagaccctacgggagcgggaaggcgaggagttcgataacacgtgctgcgcagagaagaggaaaaaactctgggacctactggagaagcccaattcctctgtggctgccaagatccttgccataatttccatcatgttcatcgtcctctccaccattgccctgtccctcaacacgctgcctgagctacagagcctcgatgagttcggccagtccacagacaacccccagctggcccacgtggaggccgtgtgcatcgcatggttcaccatggagtacctgctgaggttcctctcctcgcccaagaagtggaagttcttcaagggcccactcaatgccattgacttgttggccattctgccatactatgtcaccattttcctcaccgaatccaacaagagcgtgctgcaattccagaatgtccgccgcgtggtccagatcttccgcatcatgcgaattctccgcatccttaagcttgcacgccactccactggcctccagtctctgggcttcactttgcggaggagctacaatgagttgggcttgctcatcctcttccttgccatgggcattatgatcttctccagccttgtcttctttgctgagaaggatgaggacgacaccaagttcaaaagcatcccagcctctttctggtgggccaccatcaccatgactactgttgggtatggagacatctaccccaagactctcctggggaaaattgttgggggactctgctgcattgcaggagtcctggtgattgctcttcccatccccatcatcgtcaataacttctctgagttctataaggagcagaagagacaggagaaagcaatcaaacggcgagaggctctggagagagccaagaggaatggcagcatcgtatccatgaacatgaaggatgcttttgcccggagcattgagatgatggacattgtggttgagaaaaatggggagaatatgggtaagaaagacaaagtacaagataaccacttgtctcctaacaaatggaaatggacaaagaggacactgtctgaaaccagctcaagtaagtcctttgaaaccaaggaacagggatcccctgaaaaagccagatcgtcttctagtcctcagcacctgaacgttcagcagttggaagacatgtacaataagatggccaagacccaatcccaacccatcctcaataccaaggagtcagcagcacagagcaaaccaaaggaagaacttgaaatggagagtatccccagccccgtagcccctctgcccactcgcacagaaggggtcattgacatgcgaagtatgtcaagcattgatagtttcattagctgtgccacagacttccctgaggccaccagattctcccacagccctttgacatcactccccagcaagactgggggcagcacagccccagaagtgggctggcggggagctctgggtgccagtggtggtaggtttgtggaggccaaccccagccctgatgccagccagcactctagtttcttcatcgagagccccaagagttccatgaaaactaacaaccctttgaagctccgagcacttaaagtcaacttcatggagggtgaccccagtccactcctccccgttctagggatgtaccatgaccctctcaggaaccgggggagtgctgcggctgctgtcgctggactggagtgtgccacgcttttggacaaggctgtgctgagcccagagtcctccatctacaccacagcaagtgctaagacacccccccggtctcctgagaaacacacagcaatagcgttcaactttgaggcgggtgtccaccagtacattgacgcagacacagatgatgagggacagctgctctacagtgtggactccagcccccccaaaagcctccctgggagcaccagtccgaagttcagcacggggacaagatcggagaaaaaccactttgaaagctcccctttacccacctcccctaagttcttaaggcagaactgtatttactccacagaagcattgactggaaaaggccccagtggtcaggaaaagtgcaaacttgagaaccacatctcccctgacgtccgtgtgttgccagggggaggagcccatggaagcacacgagatcagagcatctgaactgccctgccttggaggagagacttttgggtgaggtccaaagaggagagctgttcagcttacctgccacagagcttttctgcatgaactctggaacagaaaggccctgtaaagccctcagagagaagagagactccagagaaggctccctaagaccttgagagccatgacaggtccatcagcatgaagttggccaagccatagggcacagcacctccttgtaacaactctatagccctctttgggagatgacatgagtggaactcacagccaccactaccaccactttagacaggaccgaggccacatactccccattctctcgtggctttccatctcagcctcggagggcaacattgacagtcctcctggcttcagctagagaaggatgctggaacaagcggctggtgttgaaagagtgggttgaccaatttggtattgaatgttgcccagccacccctaggaacacctgtccatcacctcctggatggattccactgttagacagctacagggaatgattggtcatggggaagtctctgcgccataagccacgatcccagcgcaaaacccttactcaaatgtcttcattgacttcggtatttcatagtacctgagattttattttgagataccatcagggtgagttgcaccacttgtactcaattctaattgccccctggcaatctgggaagggttcagaaggtgggcacccagccaacagcatgaactcagagcattgttttagggttggaggaggaacacgctttctttacatcactagtgtagactcaaaagatatgcaagtgtcaaatatgcaaaagaaatagtttattcaaagagactgtgtgttactgaagaacagcataaaaatatgatttttttacttgcaaaaatgaaaggaaaaaaataccacgcattgaaatgcccagttcagactgaataattcctgctgcagcaaggaaagtacctactataatagaaattctgttttgttttctgtggttttcaagtt

SEQ ID NO: 321600 - DNA, 2577 bp, Artificial Sequence
  derived and/or modified sequence
atgcctgccggaatgacaaaacacggaagccgatctacatctagcctacccccagagccaatggagatagtccgctcgaaagcttgctctagaagagtccgactgaatgtaggcggacttgcccacgaagtattgtggcgcaccttggaccgtctgccacgcacacgactggggaagctgagggattgcaatacacacgattcgttgttggaagtctgtgatgactacagccttgacgacaatgaatacttttttgaccgccatccaggagccttcacctctatacttaacttctacaggactgggaggctgcacatgatggaagagatgtgcgccttatcatttagccaggagttagactactggggtatcgacgagatttatctggagtcttgttgtcaggccaggtatcaccagaagaaggaacagatgaacgaggaacttaagagggaggctgaaactctccgcgagagggaaggcgaagagttcgacaacacctgttgcgccgagaaacgaaagaagctgtgggacctgctagagaagccaaatagctctgtcgcggctaagatactggcaatcattagtatcatgtttattgtgctgtccacaatcgcactgtcactaaacaccctacctgaattgcagagtcttgatgagtttggccagtctacagataatccccagcttgctcacgtggaggcagtctgtattgcctggttcaccatggaatacttgttacggttcctctccagcccaaagaaatggaagtttttcaaaggacctctaaatgccatcgatcttcttgctattcttccttactatgtgacaatttttttgacggagagcaacaaatcggtactgcaattccagaatgtcagaagggtggtgcagatcttcaggatcatgaggatcctgagaatcttgaaactggctcggcattctaccgggcttcaatcattggggtttacacttagacgcagctacaacgaactgggcctcttaatcctcttcttagccatggggatcatgattttttcaagtctggtatttttcgcagaaaaggatgaggatgataccaaattcaagtccatccctgctagcttctggtgggcgactataacaatgacaacagttggatacggggacatttatcctaagacgttgttgggcaaaatagtcggcggactgtgctgcattgccggagttctcgtgatagcgctgcctatccctatcatcgtcaacaatttttctgagttttacaaagaacagaagcgccaagaaaaggcgatcaaaagaagggaggccttggaacgcgcaaagcgtaacggctctatcgtgtccatgaacatgaaagatgcctttgcaagatcgatcgagatgatggacatcgtggtagagaagaatggggagaatatgggcaagaaggacaaggttcaagacaatcacctgtctccaaacaagtggaagtggacaaagcggaccctgtccgaaacttcaagctcaaagtcgtttgagaccaaagagcagggctctcccgagaaggccaggtcatctagtagcccccaacacctcaatgtgcagcagctggaggacatgtataacaagatggccaaaacccagagccagcccatcttaaacactaaggaaagcgctgcccagtctaagccaaaggaggagctcgaaatggagtccataccatctccagtggcccctctgcctacaagaaccgaaggggtgatcgacatgcgctccatgtctagcatcgactctttcattagctgcgcaactgattttcctgaagcaaccagattctcacatagccccctcacaagtttgccgtccaaaaccggaggctccactgctcctgaagttgggtggcggggagcactcggggcatctggcggacgattcgtggaggctaacccaagcccagatgcaagccagcacagttccttcttcattgaatctcctaagtcctctatgaagactaacaaccctcttaaattgcgagctctgaaggttaatttcatggagggggatcccagtccactgctgcctgtactcgggatgtaccacgacccattgagaaaccgcggttcagctgccgcagctgtcgccggattagagtgcgcgacactgctggataaagccgtcctcagtcctgaatcaagcatttacactaccgcgtcggccaaaactccccctagatccccagaaaaacacactgctattgccttcaacttcgaggcaggcgtccatcagtatattgatgctgacactgatgacgaaggtcagctgctttattccgtcgattctagtccacctaagtcacttcctgggtcaacgtcaccaaaattctccaccgggacccgctctgagaagaaccatttcgagtcatccccgcttccaacctcacccaaatttctgcggcagaattgcatttatagtacagaggccttgacgggtaagggcccatcaggccaggagaaatgcaaactggaaaaccatatctcccccgatgtcagagtcctgcccggaggtggggcacacgggtctacaagagaccaaagtatctag

SEQ ID NO: 321601 - DNA, 2442 bp, Artificial Sequence
  derived and/or modified sequence
agggatggcggagagaagacggccgtcactaggcttggcaagctccgcgactgtaatacccacgacagtctgctggaggtctgtgacgactacagtctggatgacaatgagtattttttcgatcggcatcccggtgcttttacaagcatactgaacttctacagaaccgggagactgcacatgatggaagagatgtgcgctctgtcattttcacaggaactcgactactggggaattgacgagatttacttagaatcatgctgtcaggcaagataccaccagaagaaggagcagatgaacgaggaactgaagagggaggccgagactctcagggaacgcgaaggagaagagttcgataatacgtgctgcgcagaaaaacgaaaaaagctttgggatctgctggaaaagcctaactccagcgtggctgccaagatactcgccattatatcaatcatgtttatcgttctgagcactatcgcactgagcctgaacaccctgccagagctgcagtccctagacgagtttggccagtctactgataatccccagctggctcacgtagaggctgtttgtatcgcctggtttacaatggagtacctgctgagattcctgtctagcccaaagaagtggaagttttttaagggaccattgaacgcgattgatctgctggcaattcttccctactacgtgacaattttcctcacggagagtaacaagagtgtcctacagtttcagaacgtgcgcagagtggttcaaatcttccgaattatgcggattttacggattcttaaactggcacgacacagtaccggtctgcagtcactggggtttactctgcgaagatcatataacgaattggggctgctaattctcttcctcgccatgggcattatgattttctcttccctcgtatttttcgcggagaaagacgaggatgacactaagttcaaaagcattcctgcctcattctggtgggccactattacgatgactaccgtaggctacggggacatataccctaaaaccctgctgggaaagattgtgggcggattgtgttgtattgccggtgtactggttatcgctctcccaatacctattatcgtcaacaattttagcgagttctacaaagagcagaagcgtcaagagaaggccataaaaagaagagaagcactcgagcgcgctaagagaaacgggtccatcgtgtctatgaatatgaaggatgccttcgcccgtagcatcgaaatgatggatatcgtggtagagaagaatggtgagaacatggggaaaaaggacaaagttcaggataaccacctttcaccaaataagtggaagtggactaagcggacgctttcagagacctcttcaagcaagagctttgagaccaaggagcaggggtcacctgaaaaggccaggtcctctagctctcctcaacatttgaatgtccagcagctggaggatatgtataacaagatggctaagacacaatcacagccgatcctgaataccaaggagtctgcggctcagtctaagcccaaagaggagcttgagatggagtcaataccatctcccgttgccccactgccaaccaggactgagggagtgatcgatatgaggtccatgtcaagcatagactcattcattagctgcgccaccgatttcccagaggcaactagatttagccactctcccctgacatctcttccctccaaaaccggcggatccaccgctcccgaggtgggatggagaggcgcactgggtgccagcggaggccgtttcgtggaggcgaatcccagccctgatgcgtctcagcactcatcattctttattgaaagccctaaatcatccatgaagacaaataacccactaaagctgcgggcactgaaggtgaactttatggaaggtgacccctcccctcttctgcccgtgctgggtatgtatcatgacccgttgcgtaaccgcggaagcgcagccgctgcagtggctggcttagaatgtgctacactcctagacaaggcggtcctgtcccccgaatcttccatctacaccacagcctcagctaagaccccaccgagatccccagaaaaacatacggctattgctttcaacttcgaagcaggtgtgcatcagtatatcgacgcagacactgacgacgagggacagctgttgtacagcgtggattcctcccctccaaaatccctgcccggttccaccagtcccaaattctctacaggaacccgctccgaaaagaaccattttgaatctagtcctctccccacgagcccaaagttcctcaggcagaattgcatatatagcaccgaagcgttaactggaaagggaccttcaggccaagagaaatgtaagctggagaatcacattagtcccgacgtaagagttctccccggaggcggagctcacggtagcacccgcgaccagtctatctag

SEQ ID NO: 321602 - DNA, 2577 bp, Artificial Sequence
  derived and/or modified sequence
atgcccgccggcatgaccaagcacggcagcagaagcaccagcagcctgccccccgagcccatggagatcgtgagaagcaaggcctgcagcagaagagtgagactgaacgtgggcggcctggcccacgaggtgctgtggagaaccctggacagactgcccagaaccagactgggcaagctgagagactgcaacacccacgacagcctgctggaggtgtgcgacgactacagcctggacgacaacgagtacttcttcgacagacaccccggcgccttcaccagcatcctgaacttctacagaaccggcagactgcacatgatggaggagatgtgcgccctgagcttcagccaggagctggactactggggcatcgacgagatctacctggagagctgctgccaggccagataccaccagaagaaggagcagatgaacgaggagctgaagagagaggccgagaccctgagagagagagagggcgaggagttcgacaacacctgctgcgccgagaagagaaagaagctgtgggacctgctggagaagcccaacagcagcgtggccgccaagatcctggccatcatcagcatcatgttcatcgtgctgagcaccatcgccctgagcctgaacaccctgcccgagctgcagagcctggacgagttcggccagagcaccgacaacccccagctggcccacgtggaggccgtgtgcatcgcctggttcaccatggagtacctgctgagattcctgagcagccccaagaagtggaagttcttcaagggccccctgaacgccatcgacctgctggccatcctgccctactacgtgaccatcttcctgaccgagagcaacaagagcgtgctgcagttccagaacgtgagaagagtggtgcagatcttcagaatcatgagaatcctgagaatcctgaagctggccagacacagcaccggcctgcagagcctgggcttcaccctgagaagaagctacaacgagctgggcctgctgatcctgttcctggccatgggcatcatgatcttcagcagcctggtgttcttcgccgagaaggacgaggacgacaccaagttcaagagcatccccgccagcttctggtgggccaccatcaccatgaccaccgtgggctacggcgacatctaccccaagaccctgctgggcaagatcgtgggcggcctgtgctgcatcgccggcgtgctggtgatcgccctgcccatccccatcatcgtgaacaacttcagcgagttctacaaggagcagaagagacaggagaaggccatcaagagaagagaggccctggagagagccaagagaaacggcagcatcgtgagcatgaacatgaaggacgccttcgccagaagcatcgagatgatggacatcgtggtggagaagaacggcgagaacatgggcaagaaggacaaggtgcaggacaaccacctgagccccaacaagtggaagtggaccaagagaaccctgagcgagaccagcagcagcaagagcttcgagaccaaggagcagggcagccccgagaaggccagaagcagcagcagcccccagcacctgaacgtgcagcagctggaggacatgtacaacaagatggccaagacccagagccagcccatcctgaacaccaaggagagcgccgcccagagcaagcccaaggaggagctggagatggagagcatccccagccccgtggcccccctgcccaccagaaccgagggcgtgatcgacatgagaagcatgagcagcatcgacagcttcatcagctgcgccaccgacttccccgaggccaccagattcagccacagccccctgaccagcctgcccagcaagaccggcggcagcaccgcccccgaggtgggctggagaggcgccctgggcgccagcggcggcagattcgtggaggccaaccccagccccgacgccagccagcacagcagcttcttcatcgagagccccaagagcagcatgaagaccaacaaccccctgaagctgagagccctgaaggtgaacttcatggagggcgaccccagccccctgctgcccgtgctgggcatgtaccacgaccccctgagaaacagaggcagcgccgccgccgccgtggccggcctggagtgcgccaccctgctggacaaggccgtgctgagccccgagagcagcatctacaccaccgccagcgccaagaccccccccagaagccccgagaagcacaccgccatcgccttcaacttcgaggccggcgtgcaccagtacatcgacgccgacaccgacgacgagggccagctgctgtacagcgtggacagcagcccccccaagagcctgcccggcagcaccagccccaagttcagcaccggcaccagaagcgagaagaaccacttcgagagcagccccctgcccaccagccccaagttcctgagacagaactgcatctacagcaccgaggccctgaccggcaagggccccagcggccaggagaagtgcaagctggagaaccacatcagccccgacgtgagagtgctgcccggcggcggcgcccacggcagcaccagagaccagagcatctag

SEQ ID NO: 321603 - DNA, 2442 bp, Artificial Sequence
  derived and/or modified sequence
agagacggcggcgagaagaccgccgtgaccagactgggcaagctgagagactgcaacacccacgacagcctgctggaggtgtgcgacgactacagcctggacgacaacgagtacttcttcgacagacaccccggcgccttcaccagcatcctgaacttctacagaaccggcagactgcacatgatggaggagatgtgcgccctgagcttcagccaggagctggactactggggcatcgacgagatctacctggagagctgctgccaggccagataccaccagaagaaggagcagatgaacgaggagctgaagagagaggccgagaccctgagagagagagagggcgaggagttcgacaacacctgctgcgccgagaagagaaagaagctgtgggacctgctggagaagcccaacagcagcgtggccgccaagatcctggccatcatcagcatcatgttcatcgtgctgagcaccatcgccctgagcctgaacaccctgcccgagctgcagagcctggacgagttcggccagagcaccgacaacccccagctggcccacgtggaggccgtgtgcatcgcctggttcaccatggagtacctgctgagattcctgagcagccccaagaagtggaagttcttcaagggccccctgaacgccatcgacctgctggccatcctgccctactacgtgaccatcttcctgaccgagagcaacaagagcgtgctgcagttccagaacgtgagaagagtggtgcagatcttcagaatcatgagaatcctgagaatcctgaagctggccagacacagcaccggcctgcagagcctgggcttcaccctgagaagaagctacaacgagctgggcctgctgatcctgttcctggccatgggcatcatgatcttcagcagcctggtgttcttcgccgagaaggacgaggacgacaccaagttcaagagcatccccgccagcttctggtgggccaccatcaccatgaccaccgtgggctacggcgacatctaccccaagaccctgctgggcaagatcgtgggcggcctgtgctgcatcgccggcgtgctggtgatcgccctgcccatccccatcatcgtgaacaacttcagcgagttctacaaggagcagaagagacaggagaaggccatcaagagaagagaggccctggagagagccaagagaaacggcagcatcgtgagcatgaacatgaaggacgccttcgccagaagcatcgagatgatggacatcgtggtggagaagaacggcgagaacatgggcaagaaggacaaggtgcaggacaaccacctgagccccaacaagtggaagtggaccaagagaaccctgagcgagaccagcagcagcaagagcttcgagaccaaggagcagggcagccccgagaaggccagaagcagcagcagcccccagcacctgaacgtgcagcagctggaggacatgtacaacaagatggccaagacccagagccagcccatcctgaacaccaaggagagcgccgcccagagcaagcccaaggaggagctggagatggagagcatccccagccccgtggcccccctgcccaccagaaccgagggcgtgatcgacatgagaagcatgagcagcatcgacagcttcatcagctgcgccaccgacttccccgaggccaccagattcagccacagccccctgaccagcctgcccagcaagaccggcggcagcaccgcccccgaggtgggctggagaggcgccctgggcgccagcggcggcagattcgtggaggccaaccccagccccgacgccagccagcacagcagcttcttcatcgagagccccaagagcagcatgaagaccaacaaccccctgaagctgagagccctgaaggtgaacttcatggagggcgaccccagccccctgctgcccgtgctgggcatgtaccacgaccccctgagaaacagaggcagcgccgccgccgccgtggccggcctggagtgcgccaccctgctggacaaggccgtgctgagccccgagagcagcatctacaccaccgccagcgccaagaccccccccagaagccccgagaagcacaccgccatcgccttcaacttcgaggccggcgtgcaccagtacatcgacgccgacaccgacgacgagggccagctgctgtacagcgtggacagcagcccccccaagagcctgcccggcagcaccagccccaagttcagcaccggcaccagaagcgagaagaaccacttcgagagcagccccctgcccaccagccccaagttcctgagacagaactgcatctacagcaccgaggccctgaccggcaagggccccagcggccaggagaagtgcaagctggagaaccacatcagccccgacgtgagagtgctgcccggcggcggcgcccacggcagcaccagagaccagagcatctag

SEQ ID NO: 321604 - protein, 436 aa, Artificial Sequence
  derived and/or modified sequence
MVQKSRNGGVYPGPSGEKKLKVGFVGLDPGAPDSTRDGALLIAGSEAPKRGSILSKPRAGGAGAGKPPKRNAFYRKLQNFLYNVLERPRGWAFIYHAYVFLLVFSCLVLSVFSTIKEYEKSSEGALYILEIVTIVVFGVEYFVRIWAAGCCCRYRGWRGRLKFARKPFCVIDIMVLIASIAVLAAGSQGNVFATSALRSLRFLQILRMIRMDRRGGTWKLLGSVVYAHSKELVTAWYIGFLCLILASFLVYLAEKGENDHFDTYADALWWGLITLTTIGYGDKYPQTWNGRLLAATFTLIGVSFFALPAGILGSGFALKVQEQHRQKHFEKRRNPAAGLIQSAWRFYATNLSRTDLHSTWQYYERTVTVPMYRLIPPLNQLELLRNLKSKSGLAFRKDPPPEPSPRSVPPAATLVSAVCTAVWSLSHTCAQPVMEM

SEQ ID NO: 321605 - protein, 868 aa, Artificial Sequence
  derived and/or modified sequence
MVQKSRNGGVYPGPSGEKKLKVGFVGLDPGAPDSTRDGALLIAGSEAPKRGSILSKPRAGGAGAGKPPKRNAFYRKLQNFLYNVLERPRGWAFIYHAYVFLLVFSCLVLSVFSTIKEYEKSSEGALYILEIVTIVVFGVEYFVRIWAAGCCCRYRGWRGRLKFARKPFCVIDIMVLIASIAVLAAGSQGNVFATSALRSLRFLQILRMIRMDRRGGTWKLLGSVVYAHSKELVTAWYIGFLCLILASFLVYLAEKGENDHFDTYADALWWGLITLTTIGYGDKYPQTWNGRLLAATFTLIGVSFFALPAGILGSGFALKVQEQHRQKHFEKRRNPAAGLIQSAWRFYATNLSRTDLHSTWQYYERTVTVPMYRLIPPLNQLELLRNLKSKSGLAFRKDPPPEPSPSPRGVAAKGKGSPQAQTVRRSPSADQSLEDSPSKVPKSWSFGDRSRARQAFRIKGAASRQNSEEASLPGEDIVDDKSCPCEFVTEDLTPGLKVSIRAVCVMRFLVSKRKFKESLRPYDVMDVIEQYSAGHLDMLSRIKSLQSRIDMIVGPPPPSTPRHKKYPTKGPTAPPRESPQYSPRVDQIVGRGPAITDKDRTKGPAEAELPEDPSMMGRLGKVEKQVLSMEKKLDFLVNIYMQRMGIPPTETEAYFGAKEPEPAPPYHSPEDSREHVDRHGCIVKIVRSSSSTGQKNFSAPPAAPPVQCPPSTSWQPQSHPRQGHGTSPVGDHGSLVRIPPPPAHERSLSAYGGGNRASMEFLRQEDTPGCRPPEGNLRDSDTSISIPSVDHEELERSFSGFSISQSKENLDALNSCYAAVAPCAKVRPYIAEGESDTDSDLCTPCGPPPRSATGEGPFGDVGWAGPRK

SEQ ID NO: 321606 - protein, 880 aa, Artificial Sequence
  derived and/or modified sequence
MVQKSRNGGVYPGPSGEKKLKVGFVGLDPGAPDSTRDGALLIAGSEAPKRGSILSKPRAGGAGAGKPPKRNAFYRKLQNFLYNVLERPRGWAFIYHAYVFLLVFSCLVLSVFSTIKEYEKSSEGALYILEIVTIVVFGVEYFVRIWAAGCCCRYRGWRGRLKFARKPFCVIDIMVLIASIAVLAAGSQGNVFATSALRSLRFLQILRMIRMDRRGGTWKLLGSVVYAHSKELVTAWYIGFLCLILASFLVYLAEKGENDHFDTYADALWWGLITLTTIGYGDKYPQTWNGRLLAATFTLIGVSFFALPAGILGSGFALKVQEQHRQKHFEKRRNPAAGLIQSAWRFYATNLSRTDLHSTWQYYERTVTVPMYRLIPPLNQLELLRNLKSKSGLAFRKDPPPEPSPSQKVSLKDRVFSSPRGVAAKGKGSPQAQTVRRSPSADQSLEDSPSKVPKSWSFGDRSRARQAFRIKGAASRQNSEEASLPGEDIVDDKSCPCEFVTEDLTPGLKVSIRAVCVMRFLVSKRKFKESLRPYDVMDVIEQYSAGHLDMLSRIKSLQTGIDMIVGPPPPSTPRHKKYPTKGPTAPPRESPQYSPRVDQIVGRGPAITDKDRTKGPAEAELPEDPSMMGRLGKVEKQVLSMEKKLDFLVNIYMQRMGIPPTETEAYFGAKEPEPAPPYHSPEDSREHVDRHGCIVKIVRSSSSTGQKNFSAPPAAPPVQCPPSTSWQPQSHPRQGHGTSPVGDHGSLVRIPPPPAHERSLSAYGGGNRASMEFLRQEDTPGCRPPEGNLRDSDTSISIPSVDHEELERSFSGFSISQSKENLDALNSCYAAVAPCAKVRPYIAEGESDTDSDLCTPCGPPPRSATGEGPFGDVGWAGPRK

SEQ ID NO: 321607 - protein, 880 aa, Artificial Sequence
  derived and/or modified sequence
MVQKSRNGGVYPGPSGEKKLKVGFVGLDPGAPDSTRDGALLIAGSEAPKRGSILSKPRAGGAGAGKPPKRNAFYRKLQNFLYNVLERPRGWAFIYHAYVFLLVFSCLVLSVFSTIKEYEKSSEGALYILEIVTIVVFGVEYFVRIWAAGCCCRYRGWRGRLKFARKPFCVIDIMVLIASIAVLAAGSQGNVFATSALRSLRFLQILRMIRMDRRGGTWKLLGSVVYAHSKELVTAWYIGFLCLILASFLVYLAEKGENDHFDTYADALWWGLITLTTIGYGDKYPQTWNGRLLAATFTLIGVSFFALPAGILGSGFALKVQEQHRQKHFEKRRNPAAGLIQSAWRFYATNLSRTDLHSTWQYYERTVTVPMYRLIPPLNQLELLRNLKSKSGLAFRKDPPPEPSPSQKVSLKDRVFSSPRGVAAKGKGSPQAQTVRRSPSADQSLEDSPSKVPKSWSFGDRSRARQAFRIKGAASRQNSEEASLPGEDIVDDKSCPCEFVTEDLTPGLKVSIRAVCVMRFLVSKRKFKESLRPYDVMDVIEQYSAGHLDMLSRIKSLQSRIDMIVGPPPPSTPRHKKYPTKGPTAPPRESPQYSPRVDQIVGRGPAITDKDRTKGPAEAELPEDPSMMGRLGKVEKQVLSMEKKLDFLVNIYMQRMGIPPTETEAYFGAKEPEPAPPYHSPEDSREHVDRHGCIVKIVRSSSSTGQKNFSAPPAAPPVQCPPSTSWQPQSHPRQGHGTSPVGDHGSLVRIPPPPAHERSLSAYGGGNRASMEFLRQEDTPGCRPPEGNLRDSDTSISIPSVDHEELERSFSGFSISQSKENLDALNSCYAAVAPCAKVRPYIAEGESDTDSDLCTPCGPPPRSATGEGPFGDVGWAGPRK

SEQ ID NO: 321608 - DNA, 2607 bp, Artificial Sequence
  derived and/or modified sequence
atggtgcaaaagagtagaaacgggggggtttacccggggcctagtggtgagaagaaactgaaagtgggctttgtcggacttgatcccggcgcccctgatagtactcgcgatggtgccctactcattgctgggtcagaggctccgaagaggggcagcattcttagtaagcccagggccggcggcgccggcgctggaaagccacctaaaaggaatgccttctatcggaagttgcaaaactttctttacaacgtcctggagcgccccagaggttgggcatttatttatcatgcctacgtgtttctgctcgtgttcagctgcctggtgctttccgtgttctctactattaaagaatatgaaaaatcgagcgagggggctctctacatcctcgaaatcgtgaccatcgtggtgtttggcgtcgaatacttcgtcagaatttgggccgccggttgttgctgccgatatagagggtggcgaggtcggctgaaattcgcccggaagccattctgtgttattgacattatggtattaattgcctcaattgcagtgttggccgcaggttcacagggcaatgtctttgcaacttccgctctcagatcactgcggttcttacaaattctacggatgattcgcatggaccgaagaggtggcacctggaaactgctcgggagcgtcgtgtacgcacacagtaaggaactggtgaccgcttggtacattgggttcctttgcttgattctggccagctttctcgtttaccttgctgaaaaaggcgaaaatgatcactttgatacttatgcagacgctctttggtggggtctgattacactgacgacaatcggttatggcgataagtatccgcagacatggaacggtcggctgctggcagctacctttaccctcatcggcgtatccttttttgccctgccagccggcatccttgggagcggattcgccctgaaagttcaagagcagcacaggcaaaaacacttcgagaagcgccgtaaccccgcagctgggctcattcagagtgcatggcggttttacgccacaaacttatcccgtacagatctgcacagcacgtggcaatactatgaaagaacagtcacagtgcccatgtatcgattgatccctcctttgaaccagctcgagctgctgcggaacctgaagtcaaaaagcggtctggcctttcgaaaagatccccctcctgagccgtcgccttcaccccgaggagtcgccgcaaagggcaagggcagcccacaggcccaaaccgttcggcggagcccttccgccgatcagtccctggaggactccccctccaaggtgccaaagtcatggagtttcggggacagatcaagagcccggcaggcctttcgcatcaagggggccgcctcccggcaaaattctgaggaagccagtctgcctggggaagatatcgtcgatgacaagtcctgcccttgtgagtttgtgaccgaagacctcacacccgggttgaaagtgtcaatccgcgcggtctgcgtgatgcgcttcctggtgtccaagagaaagttcaaagaatctctacgaccatatgacgtgatggacgtgatcgagcagtacagcgccggccacctggacatgctgagcagaatcaagtctttacagagcaggattgatatgattgtaggtcccccccctccttctactcctcggcacaagaaatatcctacaaaggggccaactgctcctcctagagaaagccctcagtacagtcccagggtagatcagatcgttggcaggggtcccgccatcactgataaagatcgaacaaaagggcccgccgaggccgaactgccagaagatccatctatgatggggagactaggaaaagtggagaagcaggttctgtccatggaaaaaaaactcgactttctggtgaacatttatatgcagcgaatggggataccacccacggagaccgaggcctacttcggcgccaaggagccagagccagctcctccctaccactcgcctgaggatagcagggagcatgttgatagacatgggtgcattgtcaaaattgttcgcagttccagctccacagggcagaaaaacttttcagctccccctgccgcccccccggttcaatgtccaccgtccacaagctggcagcctcaaagtcaccctagacaaggtcatggcacctctcctgttggagaccacggttccctggtcagaatcccccctccccccgcacacgaacgcagtctgtcagcatatggaggcgggaatagggctagtatggagttcctgagacaggaggatactccagggtgccgccctcctgaagggaatctccgtgactctgacacatcaatttctattccctccgttgatcatgaggagctggagcggagtttctccggtttctccatctctcagtccaaggagaatttggacgcactgaactcctgttatgctgccgtggccccatgcgcgaaagtgaggccttacatcgcagaaggcgagagcgataccgactccgatctgtgcactccgtgtggaccacctcctaggagcgccacaggcgaaggtccttttggggatgtcggctgggcaggccctcgtaaatag

SEQ ID NO: 321609 - DNA, 2643 bp, Artificial Sequence
  derived and/or modified sequence
atggtccagaagtcacgcaacgggggagtctacccaggcccttcaggagaaaagaaattaaaagtggggttcgtgggtctggatcccggggctccggattccaccagagacggagctctgctgatcgccggaagcgaagcaccaaagagagggtcaattctcagcaagcctagggccggcggcgcaggcgctgggaagccaccaaaaagaaatgccttttatagaaaactgcagaacttcctatacaacgtcctcgagcgaccccgcggatgggcctttatttaccatgcctacgtgtttcttctggttttcagctgccttgtactcagtgtgttcagcaccatcaaggagtacgagaaatctagcgaaggcgccctgtatattctggagatagttacgattgtagtctttggagtcgagtactttgtgaggatctgggccgctggctgttgttgtcggtatagaggctggcggggccgtttgaagtttgctcgcaagccattctgcgtcatagacatcatggtccttatcgcaagcatagccgtcttggccgccggtagccagggtaatgtatttgccaccagtgccctacgatccctgagattcctgcagattcttcgcatgatccggatggatcgaaggggagggacatggaagcttttaggctccgtggtctacgcccacagcaaggagctggtgactgcttggtatataggcttcctgtgtttgatactagcgtcctttttggtgtatctggccgagaaaggagaaaatgatcatttcgatacctatgccgatgcactttggtggggactgatcacactgacaacgatcggatatggcgacaaatacccacagacctggaatggcaggcttcttgcagctacttttacattgataggcgtaagctttttcgcccttcccgctgggatactgggaagtgggttcgcccttaaggtgcaggaacagcaccgccagaagcattttgaaaagcggagaaaccctgctgccggacttatccagagcgcatggagattctacgcaactaacctgtccaggactgacttacattctacctggcaatactatgagagaacagttactgtgccaatgtatcgcctcatcccccccctcaaccaactagaactgttacgcaatcttaagtccaagtccggattagcgtttaggaaggatcctccaccagagccttctcccagccagaaagtgtcacttaaggaccgtgttttttcctctcccagaggggtggcagccaaggggaaaggatccccacaggcacagaccgtgcggagatctccaagcgccgaccagtcacttgaggacagccccagtaaggtccccaagtcttggagtttcggtgatagatcgcgggcccgccaagcatttagaatcaagggtgctgcttccaggcagaatagcgaagaagccagcctgcccggagaggatattgttgacgataagagctgtccctgtgaattcgtcaccgaagaccttacccccggcctgaaggtctcaataagggccgtgtgtgtcatgaggttcctggtctcaaagcgaaagttcaaggaatcactcagaccatacgacgtgatggatgttattgagcaatattcggctggccatctggacatgttgtctcggattaagtcattgcagacaggaatagatatgatcgtcggaccgccgccacccagcaccccgaggcacaagaaataccccaccaagggaccaacagctcctccccgcgaatctccacagtatagtccgcgggttgaccagattgttggaagaggacctgcaattaccgataaggataggactaaagggccagcggaggcggaactaccggaagatccctcgatgatggggagactgggaaaggttgaaaagcaggtgcttagtatggagaaaaagctggatttcttggtaaacatatacatgcagcggatgggaatcccacctacggagactgaagcctacttcggagcgaaggaaccagagcccgcccccccatatcatagcccggaggacagtcgagagcatgtggatagacacggctgcatagttaaaattgttcgctcctcgagcagcaccggacagaagaattttagcgcgccccctgccgcccccccagtccagtgccctccctccacatcctggcagcctcagtcccatccacgccagggccacggcacttctccagtcggcgatcacgggtccttggtgcgaattccccctccccctgcccacgagcgatcccttagcgcctacggcggggggaatagagcctccatggaatttctgcgtcaggaggatacgcccggatgtaggccgcccgaaggcaatctacgagacagcgacacctcaatttcgattcccagcgtagaccacgaggagctcgagcgatctttcagcggctttagcattagtcagtctaaagaaaacctggatgccttgaattcttgctatgccgcggtggcgccatgcgctaaggtgaggccatatattgcagagggcgagagcgataccgattccgatttatgtacaccctgcggccccccgccacgaagcgcaactggggaaggcccttttggggatgtggggtgggcgggacccagaaagtag

SEQ ID NO: 321610 - DNA, 2643 bp, Artificial Sequence
  derived and/or modified sequence
atggttcaaaaatctagaaacggtggcgtgtaccctggaccctcaggagagaagaagttgaaggttggatttgttggtttggatcccggcgcccccgatagcactcgtgatggtgccctgctgatcgctggcagcgaagctcctaagcggggctcgatcctgagtaagccaagggctggtggggctggggcgggcaaaccaccaaaaagaaatgccttctataggaaactgcaaaactttttgtacaatgtgcttgagcgcccccgcgggtgggctttcatttaccatgcgtacgtttttcttttagtgtttagctgcctcgtcctcagcgtgttctcgacaattaaagagtacgagaaaagttcggagggtgccctctacattctggaaatagtgacgatcgtggtctttggcgtcgagtacttcgtgaggatttgggctgcaggctgctgctgtcgctaccgcggctggcgcggccgcctgaagttcgcccgaaaacccttctgtgtaattgacattatggtccttattgctagcattgctgtcctggccgcgggttcccaggggaatgtgttcgcaacttccgctcttcgctctctgagatttctgcagatcctgagaatgatccgtatggatagaaggggcgggacatggaagctgctaggctcagtggtgtatgcacacagcaaagagctggtgacggcttggtacattggatttctgtgtctgatcctggcgtccttcctggtgtatctggccgaaaaaggcgagaatgatcacttcgatacctacgcagacgcactctggtgggggctgattacattgaccaccataggctacggggataaatacccccagacatggaacggacgcctgctggccgcaacatttaccctgatcggagtttcattttttgccctgcctgcgggcatactggggtcaggattcgcgctgaaagtccaagagcagcatcggcagaagcacttcgagaaaaggcggaaccctgccgcagggttaattcaatctgcctggcgtttttatgcaacaaatttgagcaggaccgatcttcacagtacatggcagtattacgagcgaacggtcaccgtcccaatgtaccggttaattccgccattgaaccagctggagctcctgcgcaacttgaaatctaaaagcggcttggcattccgaaaagatccccctcccgagccctcgccctctcaaaaagtgagccttaaggacagagtgttttctagcccaagaggggtggcagcaaaggggaagggctcccctcaggcacagactgtgcgtagaagcccatctgccgaccagagccttgaggatagtccctccaaagttcctaaaagttggtcattcggtgatcgttctcgagccagacaagccttcagaatcaagggcgctgctagcaggcagaattccgaagaggcctccctccctggggaggacatcgtggatgataagtcatgtccctgcgaattcgtgacggaggatcttacccccgggctcaaggtttctatccgggctgtttgcgtgatgcgcttcctggtctcaaagagaaagttcaaagaatcacttcgcccctacgacgtgatggacgtcatcgagcagtattctgccggacatctggacatgttatctaggattaaatctctccagagtaggattgacatgattgtgggacctcctccgccttccactcctaggcacaagaagtaccccaccaagggacctaccgcgccacccagagagagcccacagtactcacctagagtcgatcagatcgtcggacgtggacctgccattacagacaaggacagaactaagggtcccgccgaagccgagctccctgaggacccatccatgatgggaaggctgggaaaggtcgagaagcaagttctgtccatggagaaaaaactcgactttctggtgaatatttatatgcagcggatgggcatccctcctaccgagacagaagcatactttggcgctaaagagcccgagcccgcgccgccataccacagtccagaggattctagggagcacgtggacagacatggctgcattgtcaaaatcgtgaggtcttcgagttcaacgggacagaagaatttttccgctcccccggcagcaccgcccgttcaatgcccaccaagcacaagttggcaacctcagtctcaccccaggcaaggacacggtactagccccgtgggagatcatgggtctttggtccgaattccacccccccctgcacatgagagatcgttatccgcctacggtggagggaaccgcgcatcaatggagttcctgcgccaagaagatacgcctgggtgtcggccccccgaagggaatctccgagactccgacactagcatcagtatcccctccgtggatcatgaagagctggaacgaagctttagtggcttctctataagccagagtaaggagaatctcgatgctttgaactcttgttacgccgccgtggctccatgcgcaaaggtgcggccgtacatcgccgagggggagtccgataccgattctgacctttgtacgccctgtgggccaccacctagaagtgccactggcgaggggcccttcggtgatgtgggctgggccggaccacgcaagtag

SEQ ID NO: 321611 - DNA, 2607 bp, Artificial Sequence
  derived and/or modified sequence
atggtgcagaagagcagaaatggaggagtgtacccaggccccagcggggagaagaagctgaaggtgggctttgtgggcctggaccccggggccccagacagcaccagagatggagccctgctgattgctggcagcgaggcccccaagaggggcagcatcctgagcaagcccagggctggaggagctggggccggcaagccacccaagagaaatgccttctacaggaagctgcagaacttcctgtacaacgtgctggagcggccccggggctgggccttcatctaccacgcctacgtgttcctgctggtgttcagctgcctggtgctgagcgtcttcagcaccatcaaggagtatgagaagagcagcgagggcgccctgtacatcctggagatcgtgaccatcgtggtgtttggagtggagtactttgtgcgcatctgggccgccggctgctgctgccgctaccggggctggaggggccgcctgaagtttgccaggaagcccttctgtgtgattgacatcatggtgctgattgccagcattgctgtgctggccgccggcagccagggcaatgtgtttgccaccagcgccctgcggagcctgcgcttcctgcagatcctgaggatgatccgcatggacagaagaggaggcacctggaagctgctgggctctgtggtgtatgcccacagcaaggagctggtgacagcctggtacatcggcttcctgtgcctgatcctggccagcttcctggtgtacctggccgagaagggagaaaatgaccactttgacacctatgcagatgccctgtggtggggcctcatcaccctgaccaccatcggctacggggacaagtacccccagacctggaatggccgcctgctggccgccaccttcaccctcatcggcgtgtccttctttgccctgcctgctggcatcctgggcagcggctttgccctgaaggtgcaggagcagcaccggcagaagcactttgagaagagaagaaatcctgctgctggcctcatccagagcgcctggaggttctacgccaccaacctgagcaggacagacctgcacagcacctggcagtactatgaaagaacagtgacagtgcccatgtaccgcctcatcccccccctgaaccagctggagctgctgaggaacctgaagagcaagagcggcctggccttcaggaaggaccccccacctgagcccagccccagcccccggggcgtggccgccaagggcaagggcagcccccaggcccagacagtgcggcgcagccccagcgctgaccagagcctggaggacagccccagcaaggtgcccaagtcctggagctttggagacaggagccgggcccggcaggccttccgcatcaagggagctgccagccggcagaacagcgaggaggccagcctgcctggagaagatattgtggatgacaagagctgcccctgtgaatttgtgacagaggacctgaccccaggcctgaaggtgtccatccgggctgtgtgtgtgatgaggttcctggtgtccaagaggaagttcaaggagagcctgcggccctatgatgtgatggatgtgattgagcagtacagcgctggccacctggacatgctgagccgcatcaagagcctgcagagcagaattgacatgattgtgggccccccaccacccagcacccccaggcacaagaagtaccccaccaagggccccacagccccaccccgggagagcccccagtacagcccccgggtggaccagatcgtgggccggggccctgccatcacagacaaggacaggaccaagggccctgctgaggccgagctgcctgaggaccccagcatgatgggccgcctgggcaaggtggagaagcaggtgctgtccatggagaagaagctggacttcctggtgaacatctacatgcagaggatgggcatccccccaacagaaacagaggcctactttggagccaaggagcctgagcccgccccaccctaccacagccctgaggacagccgggagcacgtggacagacatggctgcatcgtgaagatcgtgcgcagcagcagcagcacaggccagaagaacttcagcgcccccccagctgcccctcctgtgcagtgcccccccagcacctcctggcagccccagagccacccccggcagggccacggcaccagccctgtgggggaccacggcagcctggtgcgcatccccccacctccagcccacgagaggagcctgagcgcctatggaggcggcaacagagcctccatggagttcctgcggcaggaggacaccccaggctgccggcccccagagggcaacctgcgggacagcgacaccagcatcagcatccccagcgtggaccacgaggagctggagaggagcttcagcggcttcagcatcagccagagcaaggagaacctggatgccctgaacagctgctacgccgctgtggccccctgtgccaaggtgcggccctacatcgccgagggggagagtgacacagacagcgacctgtgcaccccctgtggccccccacccaggtctgccactggagagggcccctttggagatgtgggctgggccggccccaggaagtag

SEQ ID NO: 321612 - DNA, 2643 bp, Artificial Sequence
  derived and/or modified sequence
atggtgcagaagagcagaaatggaggagtgtacccaggccccagcggggagaagaagctgaaggtgggctttgtgggcctggaccccggggccccagacagcaccagagatggagccctgctgattgctggcagcgaggcccccaagaggggcagcatcctgagcaagcccagggctggaggagctggggccggcaagccacccaagagaaatgccttctacaggaagctgcagaacttcctgtacaacgtgctggagcggccccggggctgggccttcatctaccacgcctacgtgttcctgctggtgttcagctgcctggtgctgagcgtcttcagcaccatcaaggagtatgagaagagcagcgagggcgccctgtacatcctggagatcgtgaccatcgtggtgtttggagtggagtactttgtgcgcatctgggccgccggctgctgctgccgctaccggggctggaggggccgcctgaagtttgccaggaagcccttctgtgtgattgacatcatggtgctgattgccagcattgctgtgctggccgccggcagccagggcaatgtgtttgccaccagcgccctgcggagcctgcgcttcctgcagatcctgaggatgatccgcatggacagaagaggaggcacctggaagctgctgggctctgtggtgtatgcccacagcaaggagctggtgacagcctggtacatcggcttcctgtgcctgatcctggccagcttcctggtgtacctggccgagaagggagaaaatgaccactttgacacctatgcagatgccctgtggtggggcctcatcaccctgaccaccatcggctacggggacaagtacccccagacctggaatggccgcctgctggccgccaccttcaccctcatcggcgtgtccttctttgccctgcctgctggcatcctgggcagcggctttgccctgaaggtgcaggagcagcaccggcagaagcactttgagaagagaagaaatcctgctgctggcctcatccagagcgcctggaggttctacgccaccaacctgagcaggacagacctgcacagcacctggcagtactatgaaagaacagtgacagtgcccatgtaccgcctcatcccccccctgaaccagctggagctgctgaggaacctgaagagcaagagcggcctggccttcaggaaggaccccccacctgagcccagccccagccagaaggtgtccctgaaggacagagtcttcagcagcccccggggcgtggccgccaagggcaagggcagcccccaggcccagacagtgcggcgcagccccagcgctgaccagagcctggaggacagccccagcaaggtgcccaagtcctggagctttggagacaggagccgggcccggcaggccttccgcatcaagggagctgccagccggcagaacagcgaggaggccagcctgcctggagaagatattgtggatgacaagagctgcccctgtgaatttgtgacagaggacctgaccccaggcctgaaggtgtccatccgggctgtgtgtgtgatgaggttcctggtgtccaagaggaagttcaaggagagcctgcggccctatgatgtgatggatgtgattgagcagtacagcgctggccacctggacatgctgagccgcatcaagagcctgcagacaggaattgacatgattgtgggccccccaccacccagcacccccaggcacaagaagtaccccaccaagggccccacagccccaccccgggagagcccccagtacagcccccgggtggaccagatcgtgggccggggccctgccatcacagacaaggacaggaccaagggccctgctgaggccgagctgcctgaggaccccagcatgatgggccgcctgggcaaggtggagaagcaggtgctgtccatggagaagaagctggacttcctggtgaacatctacatgcagaggatgggcatccccccaacagaaacagaggcctactttggagccaaggagcctgagcccgccccaccctaccacagccctgaggacagccgggagcacgtggacagacatggctgcatcgtgaagatcgtgcgcagcagcagcagcacaggccagaagaacttcagcgcccccccagctgcccctcctgtgcagtgcccccccagcacctcctggcagccccagagccacccccggcagggccacggcaccagccctgtgggggaccacggcagcctggtgcgcatccccccacctccagcccacgagaggagcctgagcgcctatggaggcggcaacagagcctccatggagttcctgcggcaggaggacaccccaggctgccggcccccagagggcaacctgcgggacagcgacaccagcatcagcatccccagcgtggaccacgaggagctggagaggagcttcagcggcttcagcatcagccagagcaaggagaacctggatgccctgaacagctgctacgccgctgtggccccctgtgccaaggtgcggccctacatcgccgagggggagagtgacacagacagcgacctgtgcaccccctgtggccccccacccaggtctgccactggagagggcccctttggagatgtgggctgggccggccccaggaagtag

SEQ ID NO: 321613 - DNA, 2643 bp, Artificial Sequence
  derived and/or modified sequence
atggtgcagaagagcagaaatggaggagtgtacccaggccccagcggggagaagaagctgaaggtgggctttgtgggcctggaccccggggccccagacagcaccagagatggagccctgctgattgctggcagcgaggcccccaagaggggcagcatcctgagcaagcccagggctggaggagctggggccggcaagccacccaagagaaatgccttctacaggaagctgcagaacttcctgtacaacgtgctggagcggccccggggctgggccttcatctaccacgcctacgtgttcctgctggtgttcagctgcctggtgctgagcgtcttcagcaccatcaaggagtatgagaagagcagcgagggcgccctgtacatcctggagatcgtgaccatcgtggtgtttggagtggagtactttgtgcgcatctgggccgccggctgctgctgccgctaccggggctggaggggccgcctgaagtttgccaggaagcccttctgtgtgattgacatcatggtgctgattgccagcattgctgtgctggccgccggcagccagggcaatgtgtttgccaccagcgccctgcggagcctgcgcttcctgcagatcctgaggatgatccgcatggacagaagaggaggcacctggaagctgctgggctctgtggtgtatgcccacagcaaggagctggtgacagcctggtacatcggcttcctgtgcctgatcctggccagcttcctggtgtacctggccgagaagggagaaaatgaccactttgacacctatgcagatgccctgtggtggggcctcatcaccctgaccaccatcggctacggggacaagtacccccagacctggaatggccgcctgctggccgccaccttcaccctcatcggcgtgtccttctttgccctgcctgctggcatcctgggcagcggctttgccctgaaggtgcaggagcagcaccggcagaagcactttgagaagagaagaaatcctgctgctggcctcatccagagcgcctggaggttctacgccaccaacctgagcaggacagacctgcacagcacctggcagtactatgaaagaacagtgacagtgcccatgtaccgcctcatcccccccctgaaccagctggagctgctgaggaacctgaagagcaagagcggcctggccttcaggaaggaccccccacctgagcccagccccagccagaaggtgtccctgaaggacagagtcttcagcagcccccggggcgtggccgccaagggcaagggcagcccccaggcccagacagtgcggcgcagccccagcgctgaccagagcctggaggacagccccagcaaggtgcccaagtcctggagctttggagacaggagccgggcccggcaggccttccgcatcaagggagctgccagccggcagaacagcgaggaggccagcctgcctggagaagatattgtggatgacaagagctgcccctgtgaatttgtgacagaggacctgaccccaggcctgaaggtgtccatccgggctgtgtgtgtgatgaggttcctggtgtccaagaggaagttcaaggagagcctgcggccctatgatgtgatggatgtgattgagcagtacagcgctggccacctggacatgctgagccgcatcaagagcctgcagagcagaattgacatgattgtgggccccccaccacccagcacccccaggcacaagaagtaccccaccaagggccccacagccccaccccgggagagcccccagtacagcccccgggtggaccagatcgtgggccggggccctgccatcacagacaaggacaggaccaagggccctgctgaggccgagctgcctgaggaccccagcatgatgggccgcctgggcaaggtggagaagcaggtgctgtccatggagaagaagctggacttcctggtgaacatctacatgcagaggatgggcatccccccaacagaaacagaggcctactttggagccaaggagcctgagcccgccccaccctaccacagccctgaggacagccgggagcacgtggacagacatggctgcatcgtgaagatcgtgcgcagcagcagcagcacaggccagaagaacttcagcgcccccccagctgcccctcctgtgcagtgcccccccagcacctcctggcagccccagagccacccccggcagggccacggcaccagccctgtgggggaccacggcagcctggtgcgcatccccccacctccagcccacgagaggagcctgagcgcctatggaggcggcaacagagcctccatggagttcctgcggcaggaggacaccccaggctgccggcccccagagggcaacctgcgggacagcgacaccagcatcagcatccccagcgtggaccacgaggagctggagaggagcttcagcggcttcagcatcagccagagcaaggagaacctggatgccctgaacagctgctacgccgctgtggccccctgtgccaaggtgcggccctacatcgccgagggggagagtgacacagacagcgacctgtgcaccccctgtggccccccacccaggtctgccactggagagggcccctttggagatgtgggctgggccggccccaggaagtag

SEQ ID NO: 321614 - DNA, 2607 bp, Artificial Sequence
  derived and/or modified sequence
atggtgcagaagagccggaacggcggcgtgtaccccggccccagcggtgaaaaaaagctaaaggttggattcgtgggcctggacccaggcgctccagattcaactagagacggcgccctgctgattgccgggtctgaagcccctaagaggggatcaatcctgagtaagccacgggccgggggcgcaggcgccgggaaacccccgaagcgtaatgcattttatcgcaaacttcagaatttcttatataacgtactggagcgccctaggggctgggccttcatctaccacgcttacgtcttcctcctggttttttcctgtctggtgctgtccgtcttttccactatcaaggagtacgagaaatcctctgaaggcgcactgtacatcctggagatagtgacgatcgtggtctttggcgtagagtactttgtgcgcatctgggccgcggggtgctgctgtagataccggggttggcgaggacgcctgaagtttgcccgtaagcctttctgtgtgatagacataatggttctcatcgccagcatcgctgtcctcgcagccggatctcaggggaatgtgttcgcgacctccgccttgcgcagtctccggttcctccagattctgcgaatgatccggatggaccggcggggtggtacatggaaactgcttgggagcgtagtttatgctcattcaaaggaacttgttacagcgtggtacatcgggtttctgtgcctgatcctggcttcttttctggtttatctggcagagaaaggggaaaatgaccattttgatacgtacgctgacgctctgtggtggggactgatcactctgaccactataggctacggggacaaataccctcaaacctggaacggccgtctgctggctgctacgtttaccctgattggcgtgtcattcttcgcactgcctgcagggatactgggctcggggttcgcactaaaagtacaggagcagcacagacaaaagcatttcgagaagcggcggaaccccgccgccggcctaattcaatctgcctggcgcttctacgcaaccaatctcagtcgaacagacctgcactcaacatggcaatactacgaacggactgtgacggttccgatgtaccgccttattcctcctctgaatcagctcgagctactgagaaacttgaaatctaaaagcggcctcgcattccggaaagaccccccccctgagccttctcctagcccacgaggcgttgctgcaaagggcaagggcagcccgcaagcccagacagtgaggaggtctccctctgcagatcagtccctggaggattccccctccaaagtgcctaagtcctggagctttggtgacagatcccgggccaggcaggctttccgcatcaagggagccgcgtccaggcaaaactccgaggaggccagcctccccggagaggatatagtcgatgataaatcctgcccatgtgaatttgtcaccgaggacctgactcccgggctgaaagtgagcataagggccgtgtgtgttatgcgctttctggtgtcaaagcggaagttcaaagagtccctcagaccgtacgatgtgatggacgtgatagagcaatactccgccgggcacctggatatgctctcaaggatcaaaagcctgcaatccaggatcgatatgatagtggggccgccccccccctctacgccacggcataaaaagtatcctaccaaaggacccactgctcccccacgggaatctccacagtattcccctcgagttgatcagattgtcggccggggcccagcgattacggataaggaccgaaccaagggccctgccgaagctgagttacccgaggacccctccatgatggggaggctcggcaaagtggagaaacaggtcctgagcatggagaagaagcttgattttctcgtgaacatttacatgcagcggatgggcattccaccaaccgagaccgaagcatacttcggcgcgaaggaacccgagcctgctcctccataccatagccctgaagacagcagagaacacgttgatcgccatggctgtatcgtgaaaattgtgagatcaagtagcagtaccgggcagaaaaattttagtgcccctcctgctgctccacctgtgcaatgtcctccttccacatcttggcagcctcagtctcaccctcgtcagggtcatggaaccagccccgtcggagaccacggtagcctcgtccgcatccctcccccacccgctcatgagaggagcctgtctgcctacggagggggcaacagagcttccatggagttccttagacaggaggataccccaggttgtcgtccaccagagggcaacttgcgcgattctgacacctccatctctattccaagtgtcgatcatgaggaacttgagagatccttttctggcttttccatttcgcagtctaaagagaatcttgacgcactgaattcttgttatgccgctgtggcgccatgtgctaaggtgcgcccttatatcgctgaaggggaaagtgacaccgactccgacctttgtacaccatgcggtcccccacctcggtcagcaaccggggaaggcccttttggcgatgtgggttgggccggacctcgaaaatag

SEQ ID NO: 321615 - DNA, 2643 bp, Artificial Sequence
  derived and/or modified sequence
atggtgcagaagagccggaacggcggcgtgtaccccggccccagcggagaaaagaaattaaaggtcggtttcgtgggcctggaccctggagcacccgactcaactagggacggcgccctccttatcgctggatccgaggcacccaaacgaggctcaattcttagtaagcctcgagcggggggagccggcgcaggaaagcccccaaaacggaatgcattttatcgaaagctgcagaactttttatacaacgtcctggagcgtccccggggttgggcgttcatttatcacgcctacgtttttctgctagtgttttcatgcctggtgctgagtgtgttctctactattaaggagtacgaaaagtccagcgaaggcgccttatacatattggagattgtgacaatagtggttttcggcgttgagtacttcgtccgcatctgggcagctggttgttgttgtagataccggggttggcgcgggcgcttgaaatttgcacgaaaacctttctgtgtcattgacattatggtgctcatcgcttcaatcgctgtgctggccgccggcagccaaggaaatgtttttgccacgagtgctctgcgatcactccggtttctccagatccttaggatgattagaatggatcggaggggcggaacctggaagttgttgggctccgtagtctacgctcatagcaaggaacttgtcaccgcctggtatatcggcttcttgtgtttaatcctggcctcgttcttggtttacttagcggagaagggggaaaacgaccacttcgacacgtatgcagacgccctgtggtggggcctgatcactttgacaactatcgggtatggggacaaatatccccagacttggaatggccggctgttggccgctacgtttactctaatcggcgtgtcattcttcgcactgcccgcaggcatactaggatccggatttgccctaaaagttcaggagcagcaccgccagaaacatttcgaaaagaggcgtaatcctgccgcgggtttaattcaaagtgcctggcggttctatgctactaatctgtctagaacagacttacatagtacatggcagtactacgaacgcaccgtaacagtgccaatgtaccgattgataccaccattgaaccaactggagttgcttcggaacttgaagagcaaatcagggctcgccttccgcaaagacccccctcctgaaccctccccgtcccagaaggtgagcctgaaggatcgggttttctctagtccacggggcgttgccgctaaaggcaaagggagcccccaagcacaaaccgttaggcgctccccctcagccgatcagtctctcgaagatagcccgtccaaagtccctaagtcatggtcctttggggataggtcaagagcaaggcaggcgtttcgaattaagggggctgcctcccggcagaattctgaagaagcatcactgccaggtgaggatattgtggatgataaatcgtgtccttgtgagttcgtgacagaagatttaacaccgggacttaaagtgtctatcagagctgtatgcgtcatgagattccttgtgagcaagcggaagttcaaggagtccttgaggccatatgatgtgatggacgtgatcgaacagtactccgctgggcacctggatatgctgtctagaattaagtcacttcagactggcattgacatgattgtggggccccccccaccttcaaccccccgccataagaagtatccaacgaagggcccaactgccccacctagggagtccccacagtactctcctcgggttgatcagattgtgggacggggccccgccatcaccgacaaagatcgcaccaagggtccagcggaggccgagcttcccgaggatccatctatgatggggagactaggcaaggtcgagaagcaagttctctccatggaaaagaagctggacttcctggtaaatatatacatgcagcgcatgggtattccgcccacggagaccgaagcctatttcggcgcaaaggagcctgaaccagcccccccatatcattccccagaagacagtcgtgagcatgtggaccgccatggctgtatcgtgaaaattgtgaggagctctagctccaccggccagaaaaatttttccgctcctcctgcggccccacccgtccagtgcccgccctcaacttcatggcagccacagtcacatccccgacagggccacggtacctccccagtgggcgaccacgggtcactcgtgagaatcccccccccacctgcacacgagaggagcctctccgcatatgggggcggaaaccgagcttcaatggaatttcttcgacaggaggacacaccagggtgcaggcccccggagggaaatctgagagatagcgatacgagcataagcataccctcagttgatcatgaagaactggagaggtccttttccgggttctctattagccaaagcaaggaaaatttggacgctctgaactcttgttacgctgctgtggctccctgcgcaaaagtcaggccctacattgccgaaggggagtctgacactgactctgatttgtgcacaccttgcgggccgcccccacgatcggcgactggcgagggaccctttggcgacgtaggatgggcagggcctcggaagtag

SEQ ID NO: 321616 - DNA, 2643 bp, Artificial Sequence
  derived and/or modified sequence
atggtgcagaagagccggaacggcggcgtgtaccccggccccagcggggaaaaaaaactgaaagtaggctttgtgggtctggatccaggggctcctgactctacccgcgatggcgcccttctgatagccggtagtgaggccccaaagcgggggagcatcctttcaaaacccagggccggcggcgctggtgcaggcaagcctcccaaacgtaacgccttctatcggaagctgcaaaatttcctctacaatgtcttggagcgcccccgcggttgggcgttcatataccacgcgtacgtcttcctcctcgtctttagctgcctcgtgctctctgtcttctcaaccatcaaggagtacgaaaagagttcagagggcgccttatacatcttagagattgtgaccatagtcgtattcggggtggagtactttgtacggatctgggctgcagggtgctgctgcagatatcgaggttggagaggccgccttaaattcgcgaggaagccattttgcgtcattgatataatggtcttgatcgctagtatcgccgtgctggccgcaggaagccaaggaaacgtatttgcaacttccgcgctcaggtcgctcaggtttttacagattctaaggatgattaggatggaccgcaggggtgggacctggaagcttcttggctcagtggtgtatgcgcattccaaagagctggtgaccgcctggtatattggatttttgtgcttgatcttagcttctttcctggtgtaccttgccgaaaagggggaaaacgaccacttcgacacatacgccgacgctctgtggtgggggttgattacgctgactacaattgggtatggggataagtacccccagacgtggaatggcagactgctggctgctacattcacactgattggagttagcttcttcgcgctgccagctggcatcctcggttcgggcttcgctctcaaggtccaggaacagcatcggcagaagcatttcgaaaagcggagaaatcccgctgccggccttatccaatccgcctggcggttttatgctaccaacctgtctagaactgacctgcactctacttggcagtactacgagaggacagtgaccgtgcctatgtacagactcattccaccccttaaccaattggagcttctgcgcaatctgaagagcaaatccgggctggcatttcggaaagacccccccccagagcctagcccttctcagaaggtgtctctcaaagaccgtgttttttcatctcctcggggggtcgcagccaaggggaaaggaagtccgcaagctcagactgttcgtagaagtccctcggctgaccagagcctagaggactccccttccaaggtgcccaaatcctggtcctttggcgacagaagtagggcacgccaggccttccgcattaagggagctgcctcacggcagaactcagaagaagcttctctccccggagaagacattgtcgacgacaagtcctgtccttgcgagtttgtcactgaagatctaactcctggtctcaaggtcagcatccgagcagtttgcgtgatgcgatttcttgttagcaaacgcaagttcaaggaaagtttgcgaccttatgacgttatggacgtgatcgaacagtattcagctggccaccttgacatgctgtcccgcatcaagtcattgcagtccaggatcgatatgattgtaggccccccaccccccagcaccccaagacacaagaagtacccaaccaaaggtcccaccgccccacccagggagagtccccaatacagtcctcgcgtcgatcagatcgtcgggcgcggcccagcaatcacagacaaggatcgtactaagggcccagcagaagcggagttgcccgaagacccaagcatgatggggcgcctcggaaaggtggaaaaacaggtgctatctatggagaaaaaacttgacttcctggtgaacatttacatgcaacgcatgggaataccccccacagaaaccgaggcctacttcggagccaaagaacccgaaccagctcccccataccacagtccagaagactcccgcgagcacgtggatcgccacggctgtatcgtgaagatcgtaagaagctcctcatcaaccggtcagaaaaatttttctgcgccacctgcagctccaccggttcagtgtcccccatcaacatcctggcagccgcagagtcatccccgccagggccatggaaccagccctgtgggagaccatgggagtctggttaggattccccccccccccgcccacgagcgctcactgtctgcctacggtggaggtaacagagcatctatggagtttctgcgccaagaggacacccccggatgtcgccccccagagggaaatctgagggattccgacactagcatatcgatcccaagtgtggatcatgaagagttggagcgaagttttagtgggtttagtattagtcaaagtaaggagaacctggacgcactgaacagctgctatgccgcagtggctccctgcgccaaggtgaggccctacattgccgaaggcgagtctgatactgactctgatctttgcacgccatgtgggccccccccacgtagcgcaacgggcgaggggccattcggggatgtgggatgggctgggcctagaaaatag

SEQ ID NO: 321617 - DNA, 2979 bp, Artificial Sequence
  derived and/or modified sequence
cggagcgaggtggccgcagcgtctccgcgcgcggcccaagcccggcaggagtgcggaaccgccgcctcggccatgcggctcccggccggggggcctgggctggggcccgcgccgccccccgcgctccgcccccgctgagcctgagcccgacccggggcgcctcccgccaggcaccatggtgcagaagtcgcgcaacggcggcgtataccccggcccgagcggggagaagaagctgaaggtgggcttcgtggggctggaccccggcgcgcccgactccacccgggacggggcgctgctgatcgccggctccgaggcccccaagcgcggcagcatcctcagcaaacctcgcgcgggcggcgcgggcgccgggaagccccccaagcgcaacgccttctaccgcaagctgcagaatttcctctacaacgtgctggagcggccgcgcggctgggcgttcatctaccacgcctacgtgttcctcctggttttctcctgcctcgtgctgtctgtgttttccaccatcaaggagtatgagaagagctcggagggggccctctacatcctggaaatcgtgactatcgtggtgtttggcgtggagtacttcgtgcggatctgggccgcaggctgctgctgccggtaccgtggctggagggggcggctcaagtttgcccggaaaccgttctgtgtgattgacatcatggtgctcatcgcctccattgcggtgctggccgccggctcccagggcaacgtctttgccacatctgcgctccggagcctgcgcttcctgcagattctgcggatgatccgcatggaccggcggggaggcacctggaagctgctgggctctgtggtctatgcccacagcaaggagctggtcactgcctggtacatcggcttcctttgtctcatcctggcctcgttcctggtgtacttggcagagaagggggagaacgaccactttgacacctacgcggatgcactctggtggggcctgatcacgctgaccaccattggctacggggacaagtacccccagacctggaacggcaggctccttgcggcaaccttcaccctcatcggtgtctccttcttcgcgctgcctgcaggcatcttggggtctgggtttgccctgaaggttcaggagcagcacaggcagaagcactttgagaagaggcggaacccggcagcaggcctgatccagtcggcctggagattctacgccaccaacctctcgcgcacagacctgcactccacgtggcagtactacgagcgaacggtcaccgtgcccatgtacagacttatccccccgctgaaccagctggagctgctgaggaacctcaagagtaaatctggactcgctttcaggaaggaccccccgccggagccgtctccaagcccccgaggcgtggctgccaaggggaaggggtccccgcaggcccagactgtgaggcggtcacccagcgccgaccagagcctcgaggacagccccagcaaggtgcccaagagctggagcttcggggaccgcagccgggcacgccaggctttccgcatcaagggtgccgcgtcacggcagaactcagaagaagcaagcctccccggagaggacattgtggatgacaagagctgcccctgcgagtttgtgaccgaggacctgaccccgggcctcaaagtcagcatcagagccgtgtgtgtcatgcggttcctggtgtccaagcggaagttcaaggagagcctgcggccctacgacgtgatggacgtcatcgagcagtactcagccggccacctggacatgctgtcccgaattaagagcctgcagtccaggatagatatgattgtgggtcccccgcccccttcaactccccggcacaagaagtaccccaccaaaggacccacggcccctccgagagagtcaccccagtactcacctagagtggaccagatcgtggggcggggcccagcgatcacggacaaggaccgcaccaagggcccggccgaggcggagctgcccgaggaccccagcatgatgggacggctcgggaaggtggagaagcaggtcttgtccatggagaagaagctggacttcctggtgaatatctacatgcagcggatgggcatccccccgacagagaccgaggcctactttggggccaaagagccggagccggcgccgccgtaccacagcccggaagacagccgggagcatgtcgacaggcacggctgcattgtcaagatcgtgcgctccagcagctccacgggccagaagaacttctcggcgcccccggccgcgccccctgtccagtgtccgccctccacctcctggcagccacagagccacccgcgccagggccacggcacctcccccgtgggggaccacggctccctggtgcgcatcccgccgccgcctgcccacgagcggtcgctgtccgcctacggcgggggcaaccgcgccagcatggagttcctgcggcaggaggacaccccgggctgcaggccccccgaggggaacctgcgggacagcgacacgtccatctccatcccgtccgtggaccacgaggagctggagcgttccttcagcggcttcagcatctcccagtccaaggagaacctggatgctctcaacagctgctacgcggccgtggcgccttgtgccaaagtcaggccctacattgcggagggagagtcagacaccgactccgacctctgtaccccgtgcgggcccccgccacgctcggccaccggcgagggtccctttggtgacgtgggctgggccgggcccaggaagtgaggcggcgctgggccagtggacccgcccgcggccctcctcagcacggtgcctccgaggttttgaggcgggaaccctctggggcccttttcttacagtaactgagtgtggcgggaagggtgggccctggaggggcccatgtgggctgaaggatgggggctcctggcagtgaccttttacaaaagttattttccaacagg

SEQ ID NO: 321618 - DNA, 3275 bp, Artificial Sequence
  derived and/or modified sequence
cgcggagcgaggtggccgcagcgtctccgcgcgcggcccaagcccggcaggagtgcggaaccgccgcctcggccatgcggctcccggccggggggcctgggctggggcccgcgccgccccccgcgctccgcccccgctgagcctgagcccgacccggggcgcctcccgccaggcaccatggtgcagaagtcgcgcaacggcggcgtataccccggcccgagcggggagaagaagctgaaggtgggcttcgtggggctggaccccggcgcgcccgactccacccgggacggggcgctgctgatcgccggctccgaggcccccaagcgcggcagcatcctcagcaaacctcgcgcgggcggcgcgggcgccgggaagccccccaagcgcaacgccttctaccgcaagctgcagaatttcctctacaacgtgctggagcggccgcgcggctgggcgttcatctaccacgcctacgtgttcctcctggttttctcctgcctcgtgctgtctgtgttttccaccatcaaggagtatgagaagagctcggagggggccctctacatcctggaaatcgtgactatcgtggtgtttggcgtggagtacttcgtgcggatctgggccgcaggctgctgctgccggtaccgtggctggagggggcggctcaagtttgcccggaaaccgttctgtgtgattgacatcatggtgctcatcgcctccattgcggtgctggccgccggctcccagggcaacgtctttgccacatctgcgctccggagcctgcgcttcctgcagattctgcggatgatccgcatggaccggcggggaggcacctggaagctgctgggctctgtggtctatgcccacagcaaggagctggtcactgcctggtacatcggcttcctttgtctcatcctggcctcgttcctggtgtacttggcagagaagggggagaacgaccactttgacacctacgcggatgcactctggtggggcctgatcacgctgaccaccattggctacggggacaagtacccccagacctggaacggcaggctccttgcggcaaccttcaccctcatcggtgtctccttcttcgcgctgcctgcaggcatcttggggtctgggtttgccctgaaggttcaggagcagcacaggcagaagcactttgagaagaggcggaacccggcagcaggcctgatccagtcggcctggagattctacgccaccaacctctcgcgcacagacctgcactccacgtggcagtactacgagcgaacggtcaccgtgcccatgtacagacttatccccccgctgaaccagctggagctgctgaggaacctcaagagtaaatctggactcgctttcaggaaggaccccccgccggagccgtctccaagccagaaggtcagtttgaaagatcgtgtcttctccagcccccgaggcgtggctgccaaggggaaggggtccccgcaggcccagactgtgaggcggtcacccagcgccgaccagagcctcgaggacagccccagcaaggtgcccaagagctggagcttcggggaccgcagccgggcacgccaggctttccgcatcaagggtgccgcgtcacggcagaactcagaagaagcaagcctccccggagaggacattgtggatgacaagagctgcccctgcgagtttgtgaccgaggacctgaccccgggcctcaaagtcagcatcagagccgtgtgtgtcatgcggttcctggtgtccaagcggaagttcaaggagagcctgcggccctacgacgtgatggacgtcatcgagcagtactcagccggccacctggacatgctgtcccgaattaagagcctgcaaacggggatagatatgattgtgggtcccccgcccccttcaactccccggcacaagaagtaccccaccaaaggacccacggcccctccgagagagtcaccccagtactcacctagagtggaccagatcgtggggcggggcccagcgatcacggacaaggaccgcaccaagggcccggccgaggcggagctgcccgaggaccccagcatgatgggacggctcgggaaggtggagaagcaggtcttgtccatggagaagaagctggacttcctggtgaatatctacatgcagcggatgggcatccccccgacagagaccgaggcctactttggggccaaagagccggagccggcgccgccgtaccacagcccggaagacagccgggagcatgtcgacaggcacggctgcattgtcaagatcgtgcgctccagcagctccacgggccagaagaacttctcggcgcccccggccgcgccccctgtccagtgtccgccctccacctcctggcagccacagagccacccgcgccagggccacggcacctcccccgtgggggaccacggctccctggtgcgcatcccgccgccgcctgcccacgagcggtcgctgtccgcctacggcgggggcaaccgcgccagcatggagttcctgcggcaggaggacaccccgggctgcaggccccccgaggggaacctgcgggacagcgacacgtccatctccatcccgtccgtggaccacgaggagctggagcgttccttcagcggcttcagcatctcccagtccaaggagaacctggatgctctcaacagctgctacgcggccgtggcgccttgtgccaaagtcaggccctacattgcggagggagagtcagacaccgactccgacctctgtaccccgtgcgggcccccgccacgctcggccaccggcgagggtccctttggtgacgtgggctgggccgggcccaggaagtgaggcggcgctgggccagtggacccgcccgcggccctcctcagcacggtgcctccgaggttttgaggcgggaaccctctggggcccttttcttacagtaactgagtgtggcgggaagggtgggccctggaggggcccatgtgggctgaaggatgggggctcctggcagtgaccttttacaaaagttattttccaacaggggctggagggctgggcagggccctgtggctccaggagcagcgtgcaggagcaaggctgccctgtccactctgctcagggccgcggccgacatcagcccggtgtgaggaggggcgggagtgatgacggggtgttgccagcgtggcaacaggcggggggttgtctcagccgagcccaggggaggcacaaagggcaggcctgttccctgaggacctgcgcaaagggcgggcctgtttggtgaggacctgcggccttgggtc

SEQ ID NO: 321619 - DNA, 3015 bp, Artificial Sequence
  derived and/or modified sequence
cggagcgaggtggccgcagcgtctccgcgcgcggcccaagcccggcaggagtgcggaaccgccgcctcggccatgcggctcccggccggggggcctgggctggggcccgcgccgccccccgcgctccgcccccgctgagcctgagcccgacccggggcgcctcccgccaggcaccatggtgcagaagtcgcgcaacggcggcgtataccccggcccgagcggggagaagaagctgaaggtgggcttcgtggggctggaccccggcgcgcccgactccacccgggacggggcgctgctgatcgccggctccgaggcccccaagcgcggcagcatcctcagcaaacctcgcgcgggcggcgcgggcgccgggaagccccccaagcgcaacgccttctaccgcaagctgcagaatttcctctacaacgtgctggagcggccgcgcggctgggcgttcatctaccacgcctacgtgttcctcctggttttctcctgcctcgtgctgtctgtgttttccaccatcaaggagtatgagaagagctcggagggggccctctacatcctggaaatcgtgactatcgtggtgtttggcgtggagtacttcgtgcggatctgggccgcaggctgctgctgccggtaccgtggctggagggggcggctcaagtttgcccggaaaccgttctgtgtgattgacatcatggtgctcatcgcctccattgcggtgctggccgccggctcccagggcaacgtctttgccacatctgcgctccggagcctgcgcttcctgcagattctgcggatgatccgcatggaccggcggggaggcacctggaagctgctgggctctgtggtctatgcccacagcaaggagctggtcactgcctggtacatcggcttcctttgtctcatcctggcctcgttcctggtgtacttggcagagaagggggagaacgaccactttgacacctacgcggatgcactctggtggggcctgatcacgctgaccaccattggctacggggacaagtacccccagacctggaacggcaggctccttgcggcaaccttcaccctcatcggtgtctccttcttcgcgctgcctgcaggcatcttggggtctgggtttgccctgaaggttcaggagcagcacaggcagaagcactttgagaagaggcggaacccggcagcaggcctgatccagtcggcctggagattctacgccaccaacctctcgcgcacagacctgcactccacgtggcagtactacgagcgaacggtcaccgtgcccatgtacagacttatccccccgctgaaccagctggagctgctgaggaacctcaagagtaaatctggactcgctttcaggaaggaccccccgccggagccgtctccaagccagaaggtcagtttgaaagatcgtgtcttctccagcccccgaggcgtggctgccaaggggaaggggtccccgcaggcccagactgtgaggcggtcacccagcgccgaccagagcctcgaggacagccccagcaaggtgcccaagagctggagcttcggggaccgcagccgggcacgccaggctttccgcatcaagggtgccgcgtcacggcagaactcagaagaagcaagcctccccggagaggacattgtggatgacaagagctgcccctgcgagtttgtgaccgaggacctgaccccgggcctcaaagtcagcatcagagccgtgtgtgtcatgcggttcctggtgtccaagcggaagttcaaggagagcctgcggccctacgacgtgatggacgtcatcgagcagtactcagccggccacctggacatgctgtcccgaattaagagcctgcagtccaggatagatatgattgtgggtcccccgcccccttcaactccccggcacaagaagtaccccaccaaaggacccacggcccctccgagagagtcaccccagtactcacctagagtggaccagatcgtggggcggggcccagcgatcacggacaaggaccgcaccaagggcccggccgaggcggagctgcccgaggaccccagcatgatgggacggctcgggaaggtggagaagcaggtcttgtccatggagaagaagctggacttcctggtgaatatctacatgcagcggatgggcatccccccgacagagaccgaggcctactttggggccaaagagccggagccggcgccgccgtaccacagcccggaagacagccgggagcatgtcgacaggcacggctgcattgtcaagatcgtgcgctccagcagctccacgggccagaagaacttctcggcgcccccggccgcgccccctgtccagtgtccgccctccacctcctggcagccacagagccacccgcgccagggccacggcacctcccccgtgggggaccacggctccctggtgcgcatcccgccgccgcctgcccacgagcggtcgctgtccgcctacggcgggggcaaccgcgccagcatggagttcctgcggcaggaggacaccccgggctgcaggccccccgaggggaacctgcgggacagcgacacgtccatctccatcccgtccgtggaccacgaggagctggagcgttccttcagcggcttcagcatctcccagtccaaggagaacctggatgctctcaacagctgctacgcggccgtggcgccttgtgccaaagtcaggccctacattgcggagggagagtcagacaccgactccgacctctgtaccccgtgcgggcccccgccacgctcggccaccggcgagggtccctttggtgacgtgggctgggccgggcccaggaagtgaggcggcgctgggccagtggacccgcccgcggccctcctcagcacggtgcctccgaggttttgaggcgggaaccctctggggcccttttcttacagtaactgagtgtggcgggaagggtgggccctggaggggcccatgtgggctgaaggatgggggctcctggcagtgaccttttacaaaagttattttccaacagg

SEQ ID NO: 321620 - DNA, 2607 bp, Artificial Sequence
  derived and/or modified sequence
atggtccaaaaatcacggaacgggggagtttatccaggcccttccggggagaagaaactgaaggtaggattcgtgggcctcgatccaggggcaccagatagcaccagagacggcgctttgttgattgcgggttccgaggcccctaaacgaggcagcatcctgtccaagccaagggctggcggtgcaggagccggtaaaccgccaaaacggaatgccttttacaggaagcttcaaaactttctgtacaacgtgctcgagcgaccaagagggtgggcctttatctatcatgcttacgtctttctcctggtgtttagctgtcttgtgctcagtgttttctcaacgatcaaagagtacgagaaaagtagtgagggcgcactgtacatcctcgagattgtcacaatcgtggtgttcggtgtcgagtattttgtgcgaatctgggccgcagggtgttgctgtagataccggggatggcgtggccgtttgaagttcgccagaaagcccttctgcgttatcgacatcatggttctaatcgccagtatcgcggtgcttgccgcaggttctcaggggaatgtatttgcaacatcagcattaagaagcctccggtttcttcagatactaaggatgatcaggatggatagacgcggagggacgtggaagcttctgggtagcgtggtctacgctcactctaaagagttggtgacagcctggtacatcgggtttttgtgcctaattctggcctcatttctcgtgtacctggcagaaaagggcgaaaacgaccacttcgatacctatgcggatgctttgtggtgggggctcatcacactgaccaccatcgggtatggcgataaatatcctcagacctggaatggtcgcctgctagccgctactttcacactcattggcgtctcgttctttgccttgccagctggcattttgggctccggctttgccctcaaggtgcaggaacaacatagacaaaaacatttcgagaaaagacgtaaccctgcagcaggcctaattcagtccgcctggcggttttacgcgacaaacctctcccggactgacctgcacagtacctggcagtactacgaacgaactgtgacagtacccatgtacaggttaatcccgccacttaaccagttggagcttcttaggaacctgaagagcaagagcgggctggcgtttagaaaggatcctcccccagagcctagcccaagtccgcgtggcgtggccgctaaaggaaagggctctccacaggcccagaccgtaaggagatctccatcagccgatcaatccctagaggactcccctagcaaggttcccaagtcatggagttttggcgaccggtctagggccaggcaggcatttcggataaagggcgctgcgagtaggcagaattcggaggaagccagcttgcccggagaggacatcgtggacgacaaatcttgtccgtgtgagttcgtgactgaggatctgaccccagggctgaaggtatctattcgcgcagtatgcgtcatgcggttcctggtgtccaagaggaaatttaaagagtctctacgcccatacgacgtgatggatgtgattgagcagtattctgcaggccacctggacatgctgtctagaattaaatccctgcagagcaggatcgatatgatcgttggaccacctcccccttccacccctcgccataagaagtacccaacaaagggtccgactgcaccccctcgagagagtccccagtattccccccgagtggaccaaattgttggtagaggtccagccatcacagacaaagaccgaaccaagggtccagctgaagccgaactgcctgaggacccgagcatgatgggacgtctaggtaaggtggagaagcaagtgctaagtatggagaagaaactagacttcctggtgaatatatacatgcagcggatgggcatcccgccaaccgagacagaggcctactttggagctaaagagcctgaaccggctcccccttaccacagccctgaagattcccgagagcatgtcgaccgacatgggtgcattgtaaagattgtgaggagtagttccagcactggacagaagaacttttccgcccctcctgccgcacctcctgtacaatgccccccttcaactagctggcagcctcagagccatccacggcaaggccatgggacctcacccgtcggcgatcatggctcactggtgcggatcccacctccacctgctcacgaaagaagtctgagcgcctacgggggaggcaatcgtgcttcaatggagttcctcagacaggaagacactccaggttgtcgaccccctgagggcaatctccgagactctgacacatccatatcgataccatctgtagaccatgaggagctggagagaagcttctccggcttctctatcagccagtcgaaagaaaacctggacgccctcaatagttgttacgctgctgtggcaccatgcgccaaagtgcggccatacatcgcagagggtgagtcagacaccgattctgatctgtgcaccccctgcgggccaccgcctaggtcagccaccggggagggcccttttggcgatgtcgggtgggcgggacctagaaagtag

SEQ ID NO: 321621 - DNA, 2643 bp, Artificial Sequence
  derived and/or modified sequence
atggtccagaagtcccggaatggcggagtgtatcctgggccttcaggggaaaaaaagttgaaggttggtttcgtgggcttggaccctggtgcccctgatagtacacgcgacggagccctattgattgccggtagcgaggcccctaagcgtggtagtatcctttcaaagcctcgcgcagggggagccggagcaggtaaaccaccgaagcgtaacgccttctaccggaaacttcagaatttcctctataatgtgctcgagcgaccaaggggttgggcattcatctaccatgcatatgtgtttttgctagtgttttcctgcctcgtgctctcagtcttttccaccattaaagagtatgagaagagttctgagggggcattgtatatactggagatcgtgaccatcgtagttttcggagtggagtactttgtgcgcatctgggctgcaggttgctgttgtcgatacaggggctggaggggacgcttaaagtttgccaggaagcccttttgcgtcatcgatatcatggtgctgatcgcatccattgccgtcctcgctgccggaagccagggaaacgtgttcgcgacgtcagcgctgaggagcctgaggtttttacagatactgcggatgattaggatggatagaagggggggaacatggaaactgctggggtccgtcgtgtatgctcattcaaaagagttggtaacagcatggtatataggctttctctgcttgatcttggctagcttcttagtgtatcttgcagaaaagggggagaacgaccattttgatacatacgctgacgcattatggtggggccttattacgcttactactatcggttatggggacaagtatccgcaaacctggaatgggagactgctcgcagctacttttacactcattggggtgtcgtttttcgcccttcccgcaggtatactggggtctggcttcgccctaaaagttcaggaacagcaccgtcagaagcactttgaaaaaaggagaaaccccgcagccggactcatccagtcggcctggagattttacgcgacgaacttatccagaactgacctccacagtacctggcagtactatgagcgcactgtgacagtgcccatgtacagattaatcccaccattgaatcagttggaattacttcggaacctcaagagtaagagcgggctagcgtttcggaaagatccccctccggaaccgtcccctagccagaaagtttcactcaaagaccgcgtttttagcagtcccagaggcgtcgcggctaagggcaaagggagcccacaggcacagacagtgcggaggagcccaagtgctgaccaaagtctggaggactccccaagtaaggtgccgaagtcctggtcattcggtgatcgtagcagggcgaggcaggcttttagaattaagggcgcagcttctagacagaatagtgaggaggcctcactcccaggagaggacattgttgacgacaagagttgtccttgcgaattcgtgacagaggatctgaccccaggtttaaaagtctccatccgcgctgtctgtgtgatgcgtttcctggtgtctaagcgaaaattcaaagagagccttcgtccttatgacgtgatggacgtcatcgaacagtactcagccggtcacctggacatgttgagcagaatcaaatccctgcaaaccggaatcgatatgattgtcggccctccacctccctccacacctagacataagaagtacccaaccaagggtccgacagccccaccgagagagtctccccagtactcaccgcgagtggaccagatcgtcgggagaggccctgccataaccgacaaggataggaccaaagggccagctgaagccgaactgcccgaagatccatccatgatgggacggctgggcaaagtagaaaagcaggtgctgtctatggaaaagaagctggattttttggtcaacatttacatgcagcgcatgggtattcctccaactgaaaccgaagcgtatttcggggctaaagaaccggaacctgctccaccctaccatagccccgaagacagccgcgagcacgtggatcgacatggatgcattgttaagattgttagaagttcaagctcaacaggccagaaaaatttttcagcccctccagcagccccaccagtccagtgcccaccgagtacttcttggcagcctcaatctcacccgaggcaaggacatggaacttcgcccgttggcgatcacggatccctggtacgcatacctccccctcctgcccacgaacgcagcctatccgcttacgggggaggaaaccgcgcttccatggagttcttacgccaggaagacactccaggatgtaggccccctgaaggtaacttacgcgattcggatacatccatctctataccgagcgtagatcacgaggagcttgagcggtcttttagcggattctcaatctctcaaagcaaggagaatcttgatgcccttaattcttgctacgccgctgtcgctccatgtgccaaggtgcgcccttatatcgctgaaggggaaagcgataccgactctgatctgtgcacaccttgtggacctccccctcgctcggccacaggcgagggtcctttcggagatgtaggttgggctggcccacggaaatag

SEQ ID NO: 321622 - DNA, 2643 bp, Artificial Sequence
  derived and/or modified sequence
atggtccagaagagccggaatgggggagtgtaccccggacctagtggcgagaagaaactgaaagtgggctttgttggacttgacccgggtgccccagatagcacgagggacggagcactccttattgccggatctgaggctcctaaaagggggtcaatcctgtccaagcctcgagccggaggagccggtgccggaaagccaccaaagcgcaacgcattctatcgtaaactgcaaaatttcctgtacaacgtgctagagcgacctcgcggttgggcttttatctaccacgcctatgtattcctgctggtctttagctgcctcgtgcttagcgtcttttcgacaattaaagagtacgaaaagtcctcagagggagctttatacattctcgaaatcgtcactatagtggtcttcggtgttgagtattttgtcagaatctgggctgctggatgttgttgcagatacaggggttggcgcggacgtctgaaatttgcacgaaagcccttctgcgtaatcgatattatggtcctgattgcgtctatcgcggtgctggccgctggttcccaaggaaacgtgtttgcgaccagtgcactccgaagccttcgattcctccaaattttaagaatgatcaggatggaccgtcggggagggacgtggaagctccttggctccgtggtgtatgcacacagcaaggaactcgttaccgcatggtacatcgggttcctgtgcttgatcctcgccagcttcctggtgtatttagctgagaagggagagaatgatcacttcgatacctacgctgatgctctctggtggggcttgatcaccctcacaaccatcggatatggggataaatatccccaaacctggaatggacgactgttggccgctaccttcaccctcattggtgtctcgttcttcgccctccctgccggtatactaggatctgggtttgcccttaaggtacaggagcagcacaggcaaaagcacttcgagaagcgacggaatcccgcagctggtctaattcaaagtgcttggcggttctatgccacaaatctgtcacggactgacctacattcgacttggcaatactatgagaggactgttaccgtgccaatgtaccggctgatacccccactgaatcagctggagctgctccgaaacctgaagagcaaatctgggctagcattcagaaaagacccacccccagagccatctccttcccagaaggtgtctctcaaggaccgggtcttcagtagccctagaggtgtagctgccaagggcaagggctccccacaagctcaaacagtgcggagatccccaagcgctgaccaatcactcgaggatagcccctctaaagtcccaaagtcatggtctttcggggatagatcccgggctaggcaagccttccggatcaaaggagcagccagcaggcagaatagcgaagaagcttctctgcccggtgaagatattgtggacgataaatcctgcccctgcgaattcgtcacggaagatctgacgcccggactgaaagttagcatacgagctgtgtgcgtgatgagattcctggttagtaagagaaagtttaaagagagtctccgcccttacgacgtgatggacgtcatcgagcagtattccgccggtcatttggacatgctttcgcgcattaaaagtctccagtctcgtattgacatgatagtgggcccaccgcctccttctacccccaggcacaagaagtatccaacgaagggacccacggcgcctcctagggagtcgcctcagtattcccccagggtcgatcagatagtaggacgcggacctgccatcacggacaaggatcgaaccaaaggtcccgctgaggctgagctccccgaggacccttctatgatgggacgtcttggaaaggtagaaaaacaagtactatccatggaaaaaaaattggacttcctggtgaatatttatatgcaaaggatgggcatccctcccaccgaaaccgaagcatattttggtgctaaagagccagaacccgcacccccttaccattcccctgaggatagtcgagaacatgtggaccgacatggatgcatcgtcaagatcgttaggtcttcatctagcacggggcagaagaatttctctgcaccacctgctgccccaccggtccagtgcccaccctctacttcatggcagccacagagtcatcccagacagggtcacgggacctcaccagtgggtgatcacggatcactggttaggattccgcctccacctgcgcacgaaaggagcttatccgcttatggcggagggaatagagcttcaatggagtttttgaggcaggaagacactcccggatgcaggcccccagaggggaatcttcgagactcagacaccagcatttctattccttccgtggaccatgaggagcttgaacggagcttcagcggtttctctattagtcagagcaaggagaatctggatgccctgaacagttgctatgccgctgttgcaccttgtgccaaggtgcgcccttacatcgccgagggagaaagtgataccgactcagacctgtgcactccctgcggccctcctcccaggagcgccacgggtgaggggccatttggcgacgtcggctgggcaggcccaaggaagtag

SEQ ID NO: 321623 - DNA, 2607 bp, Artificial Sequence
  derived and/or modified sequence
atggtgcagaagagcagaaacggcggcgtgtaccccggccccagcggcgagaagaagctgaaggtgggcttcgtgggcctggaccccggcgcccccgacagcaccagagacggcgccctgctgatcgccggcagcgaggcccccaagagaggcagcatcctgagcaagcccagagccggcggcgccggcgccggcaagccccccaagagaaacgccttctacagaaagctgcagaacttcctgtacaacgtgctggagagacccagaggctgggccttcatctaccacgcctacgtgttcctgctggtgttcagctgcctggtgctgagcgtgttcagcaccatcaaggagtacgagaagagcagcgagggcgccctgtacatcctggagatcgtgaccatcgtggtgttcggcgtggagtacttcgtgagaatctgggccgccggctgctgctgcagatacagaggctggagaggcagactgaagttcgccagaaagcccttctgcgtgatcgacatcatggtgctgatcgccagcatcgccgtgctggccgccggcagccagggcaacgtgttcgccaccagcgccctgagaagcctgagattcctgcagatcctgagaatgatcagaatggacagaagaggcggcacctggaagctgctgggcagcgtggtgtacgcccacagcaaggagctggtgaccgcctggtacatcggcttcctgtgcctgatcctggccagcttcctggtgtacctggccgagaagggcgagaacgaccacttcgacacctacgccgacgccctgtggtggggcctgatcaccctgaccaccatcggctacggcgacaagtacccccagacctggaacggcagactgctggccgccaccttcaccctgatcggcgtgagcttcttcgccctgcccgccggcatcctgggcagcggcttcgccctgaaggtgcaggagcagcacagacagaagcacttcgagaagagaagaaaccccgccgccggcctgatccagagcgcctggagattctacgccaccaacctgagcagaaccgacctgcacagcacctggcagtactacgagagaaccgtgaccgtgcccatgtacagactgatcccccccctgaaccagctggagctgctgagaaacctgaagagcaagagcggcctggccttcagaaaggaccccccccccgagcccagccccagccccagaggcgtggccgccaagggcaagggcagcccccaggcccagaccgtgagaagaagccccagcgccgaccagagcctggaggacagccccagcaaggtgcccaagagctggagcttcggcgacagaagcagagccagacaggccttcagaatcaagggcgccgccagcagacagaacagcgaggaggccagcctgcccggcgaggacatcgtggacgacaagagctgcccctgcgagttcgtgaccgaggacctgacccccggcctgaaggtgagcatcagagccgtgtgcgtgatgagattcctggtgagcaagagaaagttcaaggagagcctgagaccctacgacgtgatggacgtgatcgagcagtacagcgccggccacctggacatgctgagcagaatcaagagcctgcagagcagaatcgacatgatcgtgggcccccccccccccagcacccccagacacaagaagtaccccaccaagggccccaccgccccccccagagagagcccccagtacagccccagagtggaccagatcgtgggcagaggccccgccatcaccgacaaggacagaaccaagggccccgccgaggccgagctgcccgaggaccccagcatgatgggcagactgggcaaggtggagaagcaggtgctgagcatggagaagaagctggacttcctggtgaacatctacatgcagagaatgggcatcccccccaccgagaccgaggcctacttcggcgccaaggagcccgagcccgcccccccctaccacagccccgaggacagcagagagcacgtggacagacacggctgcatcgtgaagatcgtgagaagcagcagcagcaccggccagaagaacttcagcgccccccccgccgccccccccgtgcagtgcccccccagcaccagctggcagccccagagccaccccagacagggccacggcaccagccccgtgggcgaccacggcagcctggtgagaatcccccccccccccgcccacgagagaagcctgagcgcctacggcggcggcaacagagccagcatggagttcctgagacaggaggacacccccggctgcagaccccccgagggcaacctgagagacagcgacaccagcatcagcatccccagcgtggaccacgaggagctggagagaagcttcagcggcttcagcatcagccagagcaaggagaacctggacgccctgaacagctgctacgccgccgtggccccctgcgccaaggtgagaccctacatcgccgagggcgagagcgacaccgacagcgacctgtgcaccccctgcggccccccccccagaagcgccaccggcgagggccccttcggcgacgtgggctgggccggccccagaaagtag

SEQ ID NO: 321624 - DNA, 2643 bp, Artificial Sequence
  derived and/or modified sequence
atggtgcagaagagcagaaacggcggcgtgtaccccggccccagcggcgagaagaagctgaaggtgggcttcgtgggcctggaccccggcgcccccgacagcaccagagacggcgccctgctgatcgccggcagcgaggcccccaagagaggcagcatcctgagcaagcccagagccggcggcgccggcgccggcaagccccccaagagaaacgccttctacagaaagctgcagaacttcctgtacaacgtgctggagagacccagaggctgggccttcatctaccacgcctacgtgttcctgctggtgttcagctgcctggtgctgagcgtgttcagcaccatcaaggagtacgagaagagcagcgagggcgccctgtacatcctggagatcgtgaccatcgtggtgttcggcgtggagtacttcgtgagaatctgggccgccggctgctgctgcagatacagaggctggagaggcagactgaagttcgccagaaagcccttctgcgtgatcgacatcatggtgctgatcgccagcatcgccgtgctggccgccggcagccagggcaacgtgttcgccaccagcgccctgagaagcctgagattcctgcagatcctgagaatgatcagaatggacagaagaggcggcacctggaagctgctgggcagcgtggtgtacgcccacagcaaggagctggtgaccgcctggtacatcggcttcctgtgcctgatcctggccagcttcctggtgtacctggccgagaagggcgagaacgaccacttcgacacctacgccgacgccctgtggtggggcctgatcaccctgaccaccatcggctacggcgacaagtacccccagacctggaacggcagactgctggccgccaccttcaccctgatcggcgtgagcttcttcgccctgcccgccggcatcctgggcagcggcttcgccctgaaggtgcaggagcagcacagacagaagcacttcgagaagagaagaaaccccgccgccggcctgatccagagcgcctggagattctacgccaccaacctgagcagaaccgacctgcacagcacctggcagtactacgagagaaccgtgaccgtgcccatgtacagactgatcccccccctgaaccagctggagctgctgagaaacctgaagagcaagagcggcctggccttcagaaaggaccccccccccgagcccagccccagccagaaggtgagcctgaaggacagagtgttcagcagccccagaggcgtggccgccaagggcaagggcagcccccaggcccagaccgtgagaagaagccccagcgccgaccagagcctggaggacagccccagcaaggtgcccaagagctggagcttcggcgacagaagcagagccagacaggccttcagaatcaagggcgccgccagcagacagaacagcgaggaggccagcctgcccggcgaggacatcgtggacgacaagagctgcccctgcgagttcgtgaccgaggacctgacccccggcctgaaggtgagcatcagagccgtgtgcgtgatgagattcctggtgagcaagagaaagttcaaggagagcctgagaccctacgacgtgatggacgtgatcgagcagtacagcgccggccacctggacatgctgagcagaatcaagagcctgcagaccggcatcgacatgatcgtgggcccccccccccccagcacccccagacacaagaagtaccccaccaagggccccaccgccccccccagagagagcccccagtacagccccagagtggaccagatcgtgggcagaggccccgccatcaccgacaaggacagaaccaagggccccgccgaggccgagctgcccgaggaccccagcatgatgggcagactgggcaaggtggagaagcaggtgctgagcatggagaagaagctggacttcctggtgaacatctacatgcagagaatgggcatcccccccaccgagaccgaggcctacttcggcgccaaggagcccgagcccgcccccccctaccacagccccgaggacagcagagagcacgtggacagacacggctgcatcgtgaagatcgtgagaagcagcagcagcaccggccagaagaacttcagcgccccccccgccgccccccccgtgcagtgcccccccagcaccagctggcagccccagagccaccccagacagggccacggcaccagccccgtgggcgaccacggcagcctggtgagaatcccccccccccccgcccacgagagaagcctgagcgcctacggcggcggcaacagagccagcatggagttcctgagacaggaggacacccccggctgcagaccccccgagggcaacctgagagacagcgacaccagcatcagcatccccagcgtggaccacgaggagctggagagaagcttcagcggcttcagcatcagccagagcaaggagaacctggacgccctgaacagctgctacgccgccgtggccccctgcgccaaggtgagaccctacatcgccgagggcgagagcgacaccgacagcgacctgtgcaccccctgcggccccccccccagaagcgccaccggcgagggccccttcggcgacgtgggctgggccggccccagaaagtag

SEQ ID NO: 321625 - DNA, 2643 bp, Artificial Sequence
  derived and/or modified sequence
atggtgcagaagagcagaaacggcggcgtgtaccccggccccagcggcgagaagaagctgaaggtgggcttcgtgggcctggaccccggcgcccccgacagcaccagagacggcgccctgctgatcgccggcagcgaggcccccaagagaggcagcatcctgagcaagcccagagccggcggcgccggcgccggcaagccccccaagagaaacgccttctacagaaagctgcagaacttcctgtacaacgtgctggagagacccagaggctgggccttcatctaccacgcctacgtgttcctgctggtgttcagctgcctggtgctgagcgtgttcagcaccatcaaggagtacgagaagagcagcgagggcgccctgtacatcctggagatcgtgaccatcgtggtgttcggcgtggagtacttcgtgagaatctgggccgccggctgctgctgcagatacagaggctggagaggcagactgaagttcgccagaaagcccttctgcgtgatcgacatcatggtgctgatcgccagcatcgccgtgctggccgccggcagccagggcaacgtgttcgccaccagcgccctgagaagcctgagattcctgcagatcctgagaatgatcagaatggacagaagaggcggcacctggaagctgctgggcagcgtggtgtacgcccacagcaaggagctggtgaccgcctggtacatcggcttcctgtgcctgatcctggccagcttcctggtgtacctggccgagaagggcgagaacgaccacttcgacacctacgccgacgccctgtggtggggcctgatcaccctgaccaccatcggctacggcgacaagtacccccagacctggaacggcagactgctggccgccaccttcaccctgatcggcgtgagcttcttcgccctgcccgccggcatcctgggcagcggcttcgccctgaaggtgcaggagcagcacagacagaagcacttcgagaagagaagaaaccccgccgccggcctgatccagagcgcctggagattctacgccaccaacctgagcagaaccgacctgcacagcacctggcagtactacgagagaaccgtgaccgtgcccatgtacagactgatcccccccctgaaccagctggagctgctgagaaacctgaagagcaagagcggcctggccttcagaaaggaccccccccccgagcccagccccagccagaaggtgagcctgaaggacagagtgttcagcagccccagaggcgtggccgccaagggcaagggcagcccccaggcccagaccgtgagaagaagccccagcgccgaccagagcctggaggacagccccagcaaggtgcccaagagctggagcttcggcgacagaagcagagccagacaggccttcagaatcaagggcgccgccagcagacagaacagcgaggaggccagcctgcccggcgaggacatcgtggacgacaagagctgcccctgcgagttcgtgaccgaggacctgacccccggcctgaaggtgagcatcagagccgtgtgcgtgatgagattcctggtgagcaagagaaagttcaaggagagcctgagaccctacgacgtgatggacgtgatcgagcagtacagcgccggccacctggacatgctgagcagaatcaagagcctgcagagcagaatcgacatgatcgtgggcccccccccccccagcacccccagacacaagaagtaccccaccaagggccccaccgccccccccagagagagcccccagtacagccccagagtggaccagatcgtgggcagaggccccgccatcaccgacaaggacagaaccaagggccccgccgaggccgagctgcccgaggaccccagcatgatgggcagactgggcaaggtggagaagcaggtgctgagcatggagaagaagctggacttcctggtgaacatctacatgcagagaatgggcatcccccccaccgagaccgaggcctacttcggcgccaaggagcccgagcccgcccccccctaccacagccccgaggacagcagagagcacgtggacagacacggctgcatcgtgaagatcgtgagaagcagcagcagcaccggccagaagaacttcagcgccccccccgccgccccccccgtgcagtgcccccccagcaccagctggcagccccagagccaccccagacagggccacggcaccagccccgtgggcgaccacggcagcctggtgagaatcccccccccccccgcccacgagagaagcctgagcgcctacggcggcggcaacagagccagcatggagttcctgagacaggaggacacccccggctgcagaccccccgagggcaacctgagagacagcgacaccagcatcagcatccccagcgtggaccacgaggagctggagagaagcttcagcggcttcagcatcagccagagcaaggagaacctggacgccctgaacagctgctacgccgccgtggccccctgcgccaaggtgagaccctacatcgccgagggcgagagcgacaccgacagcgacctgtgcaccccctgcggccccccccccagaagcgccaccggcgagggccccttcggcgacgtgggctgggccggccccagaaagtag

SEQ ID NO: 321626 - protein, 500 aa, Artificial Sequence
  derived and/or modified sequence
MAKRLCAGSALCVRGPRGPAPLLLVGLALLGAARAREEAGGGFSLHPPYFNLAEGARIAASATCGEEAPARGSPRPTEDLYCKLVGGPVAGGDPNQTIRGQYCDICTAANSNKAHPASNAIDGTERWWQSPPLSRGLEYNEVNVTLDLGQVFHVAYVLIKFANSPRPDLWVLERSMDFGRTYQPWQFFASSKRDCLERFGPQTLERITRDDAAICTTEYSRIVPLENGEIVVSLVNGRPGAMNFSYSPLLREFTKATNVRLRFLRTNTLLGHLMGKALRDPTVTRRYYYSIKDISIGGRCVCHGHADACDAKDPTDPFRLQCTCQHNTCGGTCDRCCPGFNQQPWKPATANSANECQSCNCYGHATDCYYDPEVDRRRASQSLDGTYQGGGVCIDCQHHTTGVNCERCLPGFYRSPNHPLDSPHVCRRCNCESDFTDGTCEDLTGRCYCRPNFSGERCDVCAEGFTGFPSCYPTPSSSNDTREQVLPAGQIVTNTKISWV

SEQ ID NO: 321627 - protein, 528 aa, Artificial Sequence
  derived and/or modified sequence
MAKRLCAGSALCVRGPRGPAPLLLVGLALLGAARAREEAGGGFSLHPPYFNLAEGARIAASATCGEEAPARGSPRPTEDLYCKLVGGPVAGGDPNQTIRGQYCDICTAANSNKAHPASNAIDGTERWWQSPPLSRGLEYNEVNVTLDLGQVFHVAYVLIKFANSPRPDLWVLERSMDFGRTYQPWQFFASSKRDCLERFGPQTLERITRDDAAICTTEYSRIVPLENGEIVVSLVNGRPGAMNFSYSPLLREFTKATNVRLRFLRTNTLLGHLMGKALRDPTVTRRYYYSIKDISIGGRCVCHGHADACDAKDPTDPFRLQCTCQHNTCGGTCDRCCPGFNQQPWKPATANSANECQSCNCYGHATDCYYDPEVDRRRASQSLDGTYQGGGVCIDCQHHTTGVNCERCLPGFYRSPNHPLDSPHVCRRCNCESDFTDGTCEDLTGRCYCRPNFSGERCDVCAEGFTGFPSCYPTPSSSNDTREQVLPAGQIVNGVSLCRPGWSAVARSRLTSTSASWVQAILLPQSPE

SEQ ID NO: 321628 - protein, 132 aa, Artificial Sequence
  derived and/or modified sequence
MDVTRLLLATLLVFLCFFTANSHLPPEEKLRDDRSLRSNSSVNLLDVPSVSIVALNKKSKQIGRKAAEKKRSSKKEASMKKVVRPRTPLSAPCVATRNSCKPPAPACCDPCASCQCRFFRSACSCRVLSLNC

SEQ ID NO: 321629 - DNA, 399 bp, Artificial Sequence
  derived and/or modified sequence
atggacgtcactcgcctgttacttgcaaccttgctcgtctttctgtgcttttttacagccaatagccatctgcctccagaagaaaagctccgggatgacagatctctgaggagtaacagctctgtgaacttactggatgttccatccgtctcgattgtggccctaaacaaaaagtccaaacagataggccgaaaagccgccgaaaaaaagcggtctagcaaaaaagaagcctccatgaagaaagtggttaggcctcggacgccattatcagcaccgtgtgttgctacccgcaacagctgtaaacctcctgcccccgcatgttgcgacccatgcgcttcatgtcagtgtaggttctttcgatcggcctgcagctgtagggtgctgagcctgaattgttag

SEQ ID NO: 321630 - DNA, 399 bp, Artificial Sequence
  derived and/or modified sequence
atggatgtgacccggctgctgctggccaccctgctggtgttcctgtgcttcttcaccgccaacagccacctgcccccagaggagaagctgagagatgacaggagcctgcggagcaacagctctgtgaacctgctggatgtgcccagcgtgtccatcgtggccctgaacaagaagagcaagcagatcggcaggaaggctgctgagaagaagaggagcagcaagaaggaggcctccatgaagaaggtggtgcggcccaggacccccctgagcgccccctgtgtggccaccaggaacagctgcaagcccccagccccagcctgctgtgacccctgtgccagctgccagtgccgcttcttccgcagcgcctgcagctgccgggtgctgagcctgaactgctag

SEQ ID NO: 321631 - DNA, 399 bp, Artificial Sequence
  derived and/or modified sequence
atggacgtgacccggctgctgctggccaccctgctggtgttcctgtgcttcttcactgccaacagtcatctgccacccgaggagaagcttcgcgacgatagaagcttgagaagtaattcatccgtaaaccttcttgacgtcccaagcgtgtcaatcgtggctttgaataaaaaatctaaacaaatcggcagaaaggcagctgaaaagaaacgaagcagtaagaaggaagccagcatgaagaaagtagtgcgccccaggacacccctatctgcaccatgtgtcgccaccagaaatagctgcaagcctccggcccccgcgtgttgcgacccgtgcgctagctgtcagtgtcggtttttccgatctgcttgttcgtgtagagtgctgagcctcaattgttag

SEQ ID NO: 321632 - DNA, 399 bp, Artificial Sequence
  derived and/or modified sequence
atggatgttactcgcctgctgctggctactctgttggtcttcctgtgcttcttcacagcaaactcccacctaccacccgaggaaaagttaagggacgatcgcagcctccgttcaaatagttccgtgaaccttctcgatgtgcctagcgtttctatcgtggctcttaacaaaaagtctaagcagattggcaggaaggccgctgagaaaaagcggtcctccaagaaagaggcgagcatgaaaaaggtggtgcggccaagaacgcccttgtctgccccttgtgtggcgactcgaaatagttgcaagccaccagccccagcctgttgcgatccatgcgctagttgccagtgtcgattctttagatctgcatgcagctgtcgagtactgtcccttaattgttag

SEQ ID NO: 321633 - DNA, 399 bp, Artificial Sequence
  derived and/or modified sequence
atggacgtgaccagactgctgctggccaccctgctggtgttcctgtgcttcttcaccgccaacagccacctgccccccgaggagaagctgagagacgacagaagcctgagaagcaacagcagcgtgaacctgctggacgtgcccagcgtgagcatcgtggccctgaacaagaagagcaagcagatcggcagaaaggccgccgagaagaagagaagcagcaagaaggaggccagcatgaagaaggtggtgagacccagaacccccctgagcgccccctgcgtggccaccagaaacagctgcaagccccccgcccccgcctgctgcgacccctgcgccagctgccagtgcagattcttcagaagcgcctgcagctgcagagtgctgagcctgaactgctag

SEQ ID NO: 321634 - protein, 370 aa, Artificial Sequence
  derived and/or modified sequence
MEPLFPAPFWEVIYGSHLQGNLSLLSPNHSLLPPHLLLNASHGAFLPLGLKVTIVGLYLAVCVGGLLGNCLVMYVILRHTKMKTATNIYIFNLALADTLVLLTLPFQGTDILLGFWPFGNALCKTVIAIDYYNMFTSTFTLTAMSVDRYVAICHPIRALDVRTSSKAQAVNVAIWALASVVGVPVAIMGSAQVEDEEIECLVEIPTPQDYWGPVFAICIFLFSFIVPVLVISVCYSLMIRRLRGVRLLSGSREKDRNLRRITRLVLVVVAVFVGCWTPVQVFVLAQGLGVQPSSETAVAILRFCTALGYVNSCLNPILYAFLDENFKACFRKFCCASALRRDVQVSDRVRSIAKDVALACKTSETVPRPA

SEQ ID NO: 321635 - DNA, 3321 bp, Artificial Sequence
  derived and/or modified sequence
acggagccgcacggtagtagatgggggtgtggccgtggcccccgactctgctcggcggggccgttcctgctttgccatccgtgtgggacttccacgacagtggaggcacgagagctgggccccatatgctgcttgcccagcttgggaaagaggaggctgctgcaaaggaccgatcggcggcttcgggctgccggctcactcggctgctgcgtctggtctggcgtctgctgagaagatcctcttctaccctgctctgcacctgtgctcgactgccagccggctgagggcgggggtctccacggtggtcccagctcccaaggaggttgcagaagtaccgtacagagtggatttgcagggcagtggcatggagcccctcttccccgcgccgttctgggaggttatctacggcagccaccttcagggcaacctgtccctcctgagccccaaccacagtctgctgcccccgcatctgctgctcaatgccagccacggcgccttcctgcccctcgggctcaaggtcaccatcgtggggctctacctggccgtgtgtgtcggagggctcctggggaactgccttgtcatgtacgtcatcctcaggcacaccaaaatgaagacagccaccaatatttacatctttaacctggccctggccgacactctggtcctgctgacgctgcccttccagggcacggacatcctcctgggcttctggccgtttgggaatgcgctgtgcaagacagtcattgccattgactactacaacatgttcaccagcaccttcaccctaactgccatgagtgtggatcgctatgtagccatctgccaccccatccgtgccctcgacgtccgcacgtccagcaaagcccaggctgtcaatgtggccatctgggccctggcctctgttgtcggtgttcccgttgccatcatgggctcggcacaggtcgaggatgaagagatcgagtgcctggtggagatccctacccctcaggattactggggcccggtgtttgccatctgcatcttcctcttctccttcatcgtccccgtgctcgtcatctctgtctgctacagcctcatgatccggcggctccgtggagtccgcctgctctcgggctcccgagagaaggaccggaacctgcggcgcatcactcggctggtgctggtggtagtggctgtgttcgtgggctgctggacgcctgtccaggtcttcgtgctggcccaagggctgggggttcagccgagcagcgagactgccgtggccattctgcgcttctgcacggccctgggctacgtcaacagctgcctcaaccccatcctctacgccttcctggatgagaacttcaaggcctgcttccgcaagttctgctgtgcatctgccctgcgccgggacgtgcaggtgtctgaccgcgtgcgcagcattgccaaggacgtggccctggcctgcaagacctctgagacggtaccgcggcccgcatgactaggcgtggacctgcccatggtgcctgtcagcccgcagagcccatctacgcccaacacagagctcacacaggtcactgctctctaggcggacacaccctgggccctgagcatccagagcctgggatgggcttttccctgtgggccagggatgctcggtcccagaggaggacctagtgacatcatgggacaggtcaaagcattagggccacctccatggccccagacagactaaagctgccctcctggtgcagggccgaggggacacaaggacctacctggaagcagctgacatgctggtggacggccgtgactggagcccgtgcccctccctccccgtgcttcatgtgactcttggcctctctgctgctgcgttggcagaaccctgggtgggcaggcacccggaggaggagcagcagctgtgtcatcctgtgccccccatgtgctgtgtgctgtttgcatggcagggctccagctgccttcagccctgtgacgtctcctcagggcagctggacaggcttggcactgcccgggaagtgcagcaggcagcttttctttggggtgggacttgccctgagcttggagctgccacctggaggacttgcctgttccgactccacctgtgcagccggggccaccccaggagaaagtgtccaggtgggggctggcagtccctggctgcagaccccgagctggccctgggccagccgcacctctgaaggttttctgtgtgctgcacggtgcaggcctcatccctgactgcagcttgactctgggcccaacccccatttcccttcaggagaccagcgagaggccctggcccattccctccagcggtgcaatgaactatcatgctgtggaccgtcaacccagccctgcttctcagtgtggggcaggtgtctcaggacgaaggcgccgcgtgaccacatgggcagctctgttcacaaagtggaggcctcgttttcctggtcttgactgctctgtttgggtgggagaagattctctgggggtccccacatcctcccaaggctcccctcacagcctctcctttgcttgaagccagaggtcagtggccgtgctgtgttgcgggggaagctgtgtggaaggagaagctggtggccacagcagagtcctgctctggggacgcctgcttcatttacaagcctcaagatggctctgtgtagggcctgagcttgctgcccaacgggaggatggcttcacagcagagccagcatgaggggtggggcctggcagggcttgcttgagccaaactgcaaaggctgtggtggctgtgaggacactgcgggggttggggggggggcgtctgtacctcaggggatgccccgctgtggtcacccagagaatcacccttcctggtctacagatggaagctgcaggttggtgactttgcaaatgcacttcctacagatgaactattaaaagacctgcaacattgaaaaaactcattttttccaccaaaaccttggccaggtaacctaccttaggcacctgcaaagaacaggaagtgatggctgtctcgcaacagagcctgggctgctcctcctgctctggggagtctaggccgtggggactgttctggggaggctcatgctgtctccatgacgtctgtggcaggagtccctgaggacgggagctgcctagctacagttttcttgccaaggcgaggtgttttgtgaatctgtgctgatgtaatgtgcaccttcacgtatttatgcatgtggcaagcgttacttcctgtgcacgtagccagccctgggtctgtctctggggtaatgaaaaaggaccctaataaacacctgctcactggctgggtattctttgtaa

SEQ ID NO: 321636 - DNA, 3369 bp, Artificial Sequence
  derived and/or modified sequence
cgaccaggtggggcgggtcgtggcggggggcagggtcccctccggagggccctgggttagagtctgggcgtggacgcgcccctcataggggtcattggggcatagaggcatagagccggcttctccagcttgggattcacgtgtttttcaagggctaacggaaatgctgagatctaaaagcatgtttattgctgccaaggcctgacgatgaaacttcaagtcaaattacttcgggctgccggctcactcggctgctgcgtctggtctggcgtctgctgagaagatcctcttctaccctgctctgcacctgtgctcgactgccagccggctgagggcgggggtctccacggtggtcccagctcccaaggaggttgcagaagtaccgtacagagtggatttgcagggcagtggcatggagcccctcttccccgcgccgttctgggaggttatctacggcagccaccttcagggcaacctgtccctcctgagccccaaccacagtctgctgcccccgcatctgctgctcaatgccagccacggcgccttcctgcccctcgggctcaaggtcaccatcgtggggctctacctggccgtgtgtgtcggagggctcctggggaactgccttgtcatgtacgtcatcctcaggcacaccaaaatgaagacagccaccaatatttacatctttaacctggccctggccgacactctggtcctgctgacgctgcccttccagggcacggacatcctcctgggcttctggccgtttgggaatgcgctgtgcaagacagtcattgccattgactactacaacatgttcaccagcaccttcaccctaactgccatgagtgtggatcgctatgtagccatctgccaccccatccgtgccctcgacgtccgcacgtccagcaaagcccaggctgtcaatgtggccatctgggccctggcctctgttgtcggtgttcccgttgccatcatgggctcggcacaggtcgaggatgaagagatcgagtgcctggtggagatccctacccctcaggattactggggcccggtgtttgccatctgcatcttcctcttctccttcatcgtccccgtgctcgtcatctctgtctgctacagcctcatgatccggcggctccgtggagtccgcctgctctcgggctcccgagagaaggaccggaacctgcggcgcatcactcggctggtgctggtggtagtggctgtgttcgtgggctgctggacgcctgtccaggtcttcgtgctggcccaagggctgggggttcagccgagcagcgagactgccgtggccattctgcgcttctgcacggccctgggctacgtcaacagctgcctcaaccccatcctctacgccttcctggatgagaacttcaaggcctgcttccgcaagttctgctgtgcatctgccctgcgccgggacgtgcaggtgtctgaccgcgtgcgcagcattgccaaggacgtggccctggcctgcaagacctctgagacggtaccgcggcccgcatgactaggcgtggacctgcccatggtgcctgtcagcccgcagagcccatctacgcccaacacagagctcacacaggtcactgctctctaggcggacacaccctgggccctgagcatccagagcctgggatgggcttttccctgtgggccagggatgctcggtcccagaggaggacctagtgacatcatgggacaggtcaaagcattagggccacctccatggccccagacagactaaagctgccctcctggtgcagggccgaggggacacaaggacctacctggaagcagctgacatgctggtggacggccgtgactggagcccgtgcccctccctccccgtgcttcatgtgactcttggcctctctgctgctgcgttggcagaaccctgggtgggcaggcacccggaggaggagcagcagctgtgtcatcctgtgccccccatgtgctgtgtgctgtttgcatggcagggctccagctgccttcagccctgtgacgtctcctcagggcagctggacaggcttggcactgcccgggaagtgcagcaggcagcttttctttggggtgggacttgccctgagcttggagctgccacctggaggacttgcctgttccgactccacctgtgcagccggggccaccccaggagaaagtgtccaggtgggggctggcagtccctggctgcagaccccgagctggccctgggccagccgcacctctgaaggttttctgtgtgctgcacggtgcaggcctcatccctgactgcagcttgactctgggcccaacccccatttcccttcaggagaccagcgagaggccctggcccattccctccagcggtgcaatgaactatcatgctgtggaccgtcaacccagccctgcttctcagtgtggggcaggtgtctcaggacgaaggcgccgcgtgaccacatgggcagctctgttcacaaagtggaggcctcgttttcctggtcttgactgctctgtttgggtgggagaagattctctgggggtccccacatcctcccaaggctcccctcacagcctctcctttgcttgaagccagaggtcagtggccgtgctgtgttgcgggggaagctgtgtggaaggagaagctggtggccacagcagagtcctgctctggggacgcctgcttcatttacaagcctcaagatggctctgtgtagggcctgagcttgctgcccaacgggaggatggcttcacagcagagccagcatgaggggtggggcctggcagggcttgcttgagccaaactgcaaaggctgtggtggctgtgaggacactgcgggggttggggggggggcgtctgtacctcaggggatgccccgctgtggtcacccagagaatcacccttcctggtctacagatggaagctgcaggttggtgactttgcaaatgcacttcctacagatgaactattaaaagacctgcaacattgaaaaaactcattttttccaccaaaaccttggccaggtaacctaccttaggcacctgcaaagaacaggaagtgatggctgtctcgcaacagagcctgggctgctcctcctgctctggggagtctaggccgtggggactgttctggggaggctcatgctgtctccatgacgtctgtggcaggagtccctgaggacgggagctgcctagctacagttttcttgccaaggcgaggtgttttgtgaatctgtgctgatgtaatgtgcaccttcacgtatttatgcatgtggcaagcgttacttcctgtgcacgtagccagccctgggtctgtctctggggtaatgaaaaaggaccctaataaacacctgctcactggctgggtattctttgtaa

SEQ ID NO: 321637 - DNA, 3147 bp, Artificial Sequence
  derived and/or modified sequence
ggggtgtggccgtggcccccgactctgctcggcggggccgttcctgctttgccatccgtgtgggacttccacgacagtggaggcacgagagctgggccccatatgctgcttgcccagcttgggaaagaggaggctgctgcaaaggaccgatcggcgggtaccgtacagagtggatttgcagggcagtggcatggagcccctcttccccgcgccgttctgggaggttatctacggcagccaccttcagggcaacctgtccctcctgagccccaaccacagtctgctgcccccgcatctgctgctcaatgccagccacggcgccttcctgcccctcgggctcaaggtcaccatcgtggggctctacctggccgtgtgtgtcggagggctcctggggaactgccttgtcatgtacgtcatcctcaggcacaccaaaatgaagacagccaccaatatttacatctttaacctggccctggccgacactctggtcctgctgacgctgcccttccagggcacggacatcctcctgggcttctggccgtttgggaatgcgctgtgcaagacagtcattgccattgactactacaacatgttcaccagcaccttcaccctaactgccatgagtgtggatcgctatgtagccatctgccaccccatccgtgccctcgacgtccgcacgtccagcaaagcccaggctgtcaatgtggccatctgggccctggcctctgttgtcggtgttcccgttgccatcatgggctcggcacaggtcgaggatgaagagatcgagtgcctggtggagatccctacccctcaggattactggggcccggtgtttgccatctgcatcttcctcttctccttcatcgtccccgtgctcgtcatctctgtctgctacagcctcatgatccggcggctccgtggagtccgcctgctctcgggctcccgagagaaggaccggaacctgcggcgcatcactcggctggtgctggtggtagtggctgtgttcgtgggctgctggacgcctgtccaggtcttcgtgctggcccaagggctgggggttcagccgagcagcgagactgccgtggccattctgcgcttctgcacggccctgggctacgtcaacagctgcctcaaccccatcctctacgccttcctggatgagaacttcaaggcctgcttccgcaagttctgctgtgcatctgccctgcgccgggacgtgcaggtgtctgaccgcgtgcgcagcattgccaaggacgtggccctggcctgcaagacctctgagacggtaccgcggcccgcatgactaggcgtggacctgcccatggtgcctgtcagcccgcagagcccatctacgcccaacacagagctcacacaggtcactgctctctaggcggacacaccctgggccctgagcatccagagcctgggatgggcttttccctgtgggccagggatgctcggtcccagaggaggacctagtgacatcatgggacaggtcaaagcattagggccacctccatggccccagacagactaaagctgccctcctggtgcagggccgaggggacacaaggacctacctggaagcagctgacatgctggtggacggccgtgactggagcccgtgcccctccctccccgtgcttcatgtgactcttggcctctctgctgctgcgttggcagaaccctgggtgggcaggcacccggaggaggagcagcagctgtgtcatcctgtgccccccatgtgctgtgtgctgtttgcatggcagggctccagctgccttcagccctgtgacgtctcctcagggcagctggacaggcttggcactgcccgggaagtgcagcaggcagcttttctttggggtgggacttgccctgagcttggagctgccacctggaggacttgcctgttccgactccacctgtgcagccggggccaccccaggagaaagtgtccaggtgggggctggcagtccctggctgcagaccccgagctggccctgggccagccgcacctctgaaggttttctgtgtgctgcacggtgcaggcctcatccctgactgcagcttgactctgggcccaacccccatttcccttcaggagaccagcgagaggccctggcccattccctccagcggtgcaatgaactatcatgctgtggaccgtcaacccagccctgcttctcagtgtggggcaggtgtctcaggacgaaggcgccgcgtgaccacatgggcagctctgttcacaaagtggaggcctcgttttcctggtcttgactgctctgtttgggtgggagaagattctctgggggtccccacatcctcccaaggctcccctcacagcctctcctttgcttgaagccagaggtcagtggccgtgctgtgttgcgggggaagctgtgtggaaggagaagctggtggccacagcagagtcctgctctggggacgcctgcttcatttacaagcctcaagatggctctgtgtagggcctgagcttgctgcccaacgggaggatggcttcacagcagagccagcatgaggggtggggcctggcagggcttgcttgagccaaactgcaaaggctgtggtggctgtgaggacactgcgggggttggggggggggcgtctgtacctcaggggatgccccgctgtggtcacccagagaatcacccttcctggtctacagatggaagctgcaggttggtgactttgcaaatgcacttcctacagatgaactattaaaagacctgcaacattgaaaaaactcattttttccaccaaaaccttggccaggtaacctaccttaggcacctgcaaagaacaggaagtgatggctgtctcgcaacagagcctgggctgctcctcctgctctggggagtctaggccgtggggactgttctggggaggctcatgctgtctccatgacgtctgtggcaggagtccctgaggacgggagctgcctagctacagttttcttgccaaggcgaggtgttttgtgaatctgtgctgatgtaatgtgcaccttcacgtatttatgcatgtggcaagcgttacttcctgtgcacgtagccagccctgggtctgtctctggggtaatgaaaaaggaccctaataaacacctgctcactggctgggtattctttgtaa

SEQ ID NO: 321638 - protein, 313 aa, Artificial Sequence
  derived and/or modified sequence
MTTGRTMYVIPFSMGPLGSPLSKIGIELTDSPYVVASMRIMTRMGTPVLEAVGDGEFVKCLHSVGCPLPLQKPLVNNWPCNPELTLIAHLPDRREIISFGSGYGGNSLLGKKCFALRMASRLAKEEGWLAEHMLILGITNPEGEKKYLAAAFPSACGKTNLAMMNPSLPGWKVECVGDDIAWMKFDAQGHLRAINPENGFFGVAPGTSVKTNPNAIKTIQKNTIFTNVAETSDGGVYWEGIDEPLASGVTITSWKNKEWSSEDGVSLPEALVCRAAGTACLSQALTSLSLSYRGTLCPPQLEVLHPCQPVPHH

SEQ ID NO: 321639 - DNA, 165 bp, Artificial Sequence
  derived and/or modified sequence
atggaatcaacatcaaacggaatcaaacggaattatcgaatggaatcgaagagaatcatcgaacggattcgaatggaatcatctaatggaatggaatggaagaatccatggactcgaatgcaatcatcagcgaatggaatcgaatggaatcatcgaatggactcg

SEQ ID NO: 321640 - DNA, 942 bp, Artificial Sequence
  derived and/or modified sequence
atgaccacggggaggacaatgtacgtgataccattttccatgggccccctggggtctcctttgtccaagatcggaatcgagttaacagatagcccctatgtcgtggcatcaatgaggattatgacacgtatgggcacacccgtccttgaggctgttggggatggggaattcgtgaagtgcctgcattccgtggggtgtcctctgcccctccaaaagccactcgtcaacaattggccctgtaacccggagcttactctgattgcacatctccccgacagacgggagatcatttcattcgggtctggatacggcggtaatagcctgctgggaaagaaatgcttcgccctccggatggcatcccggctagccaaagaggagggatggctagccgaacatatgctaattctgggaattactaatcccgagggcgaaaagaaatatctagccgccgcttttccaagcgcctgcggcaaaacaaacctggctatgatgaacccttccttacctgggtggaaagttgaatgcgtgggagacgacattgcctggatgaaattcgatgctcagggacacttacgagctataaatcccgaaaacgggttcttcggggtggctccaggcacttctgtcaaaacgaaccccaacgcaatcaaaaccattcagaaaaataccatctttacaaacgttgccgagacatctgacgggggggtgtactgggagggtatcgacgagcctttagctagcggtgtgaccattacgtcatggaaaaacaaagagtggtcgtcagaagatggggtttccttaccagaggccctggtatgcagagcagctgggaccgcctgcctgagccaggcgcttacatccctctcactcagctacagggggaccctctgcccgccgcaactcgaggtcctgcatccttgtcaaccagtgcctcaccattag

SEQ ID NO: 321641 - DNA, 915 bp, Artificial Sequence
  derived and/or modified sequence
accacgggtcatctgcgggctataaaccccgagaacgggtttttcggtgtcgccccagggacctcagtgaagactaatcctaacgcaataaaaaccattcaaaagaataccatctttacaaatgttgccgagaccagtgatggtggtgtatattgggagggcatcgacgaaccactcgcctccggagtcaccataacctcttggaagaacaaagaatggagtagcgaagacggtgaaccctgcgcccaccccaattctcggttctgtaccccagcttctcagtgtccaataattgacgccgcatgggagtcgcctgagggcgtcccaattgagggtattattttcggcggtaggaggcccgctggcgttcccctcgtgtacgaagctctgagttggcagcatggcgtcttcgttggtgccgcaatgaggtccgaggctacagccgctgctgagcacaagggaaaaattattatgcacgatccctttgccatgagacctttctttgggtacaacttcggtaaatacctggcacactggctgagcatggctcagcatcctgccgccaagctccccaagattttccacgtgaattggttccgtaaggataaagaaggcaagttcctttggcccgggttcggtgagaacagcagggtattggaatggatgttcaataggatcgacggaaaggcttcaacaaagcttacgcccatcgggtacataccaaaagaagacgccttgaatctcaagggcttgggccatatcaacatgatggagctattcagcatctctaaagagttctgggaaaaggaagtggaggatatcgaaaagtacttagaggaccaggttaatgcagacctgccttgcgagattgaacgggagattctggcgctgaaacagcgaattagccagatgtag

SEQ ID NO: 321642 - DNA, 918 bp, Artificial Sequence
  derived and/or modified sequence
atgacgactgggcacctgagagccattaatcctgagaacgggttcttcggagtagcacctggcacatctgtgaagacgaatccaaacgctatcaagactattcagaaaaacaccatatttacgaacgtagcggagactagtgacggtggtgtgtactgggaaggaatcgatgaaccactggcatccggtgtcacgattactagttggaagaacaaggaatggagttccgaagatggcgagccctgtgcccatccaaactcaaggttttgcacccccgccagtcagtgcccgataatcgatgcagcctgggaatccccggaaggagttcccattgaaggtatcatttttgggggtcgccgacccgccggcgtgcctctggtctacgaagcattgtcctggcaacatggtgtgttcgttggtgctgccatgagaagtgaagctactgctgccgcagagcacaagggtaagatcataatgcacgacccgtttgctatgcgccccttctttggctacaacttcgggaagtatctcgcccactggctcagtatggcccagcaccctgcagctaagctgccgaagatattccacgttaactggtttcgaaaagataaagagggaaagtttctgtggcctggcttcggggaaaacagccgagttctagaatggatgttcaatcgtatcgatggtaaggcctccaccaagctgactcccattggctacatcccgaaggaggacgccctcaacctcaaaggccttgggcatattaacatgatggagctcttttccatctccaaagaattttgggagaaagaagtggaagacatcgagaaatacttggaggaccaggtgaacgctgacttaccctgcgagattgagcgagagattttagctctgaaacagcgcatctcccagatgtag

SEQ ID NO: 321643 - DNA, 942 bp, Artificial Sequence
  derived and/or modified sequence
atgaccactggaagaaccatgtatgtgatccccttctccatgggccccctgggcagccccctgagcaagattggcatcgagctgacagacagcccctacgtggtggcctccatgaggatcatgaccaggatgggcacccctgtgctggaggccgtgggagatggagaatttgtgaagtgcctgcacagcgtgggctgccccctgcccctgcagaagcccctggtgaacaactggccctgcaaccctgagctgaccctgattgcccacctgcctgacagaagagagatcatcagctttggaagtggctatggaggcaacagcctgctgggcaagaagtgctttgccctgaggatggccagccggctggccaaggaggagggctggctggccgagcacatgctgatcctgggcatcaccaaccctgagggggagaagaagtacctggccgccgccttccccagcgcctgtgggaagaccaacctggccatgatgaaccccagcctgcccggctggaaggtggagtgtgtgggagatgacatcgcctggatgaagtttgatgcccagggccacctgcgggccatcaacccagaaaatggcttctttggagtggcccctggcacctctgtgaagaccaaccccaatgccatcaagaccatccagaagaacaccatcttcaccaacgtggccgagaccagtgatggaggagtgtactgggagggcattgatgagcccctggccagcggcgtgaccatcacctcctggaagaacaaggagtggagcagtgaagatggagtgtccctgcctgaggccctggtgtgcagagctgctggaacagcctgcctgagccaggccctgaccagcctgagcctgagctaccggggcaccctgtgccccccccagctggaggtgctgcacccctgccagcctgtgccccaccactag

SEQ ID NO: 321644 - DNA, 915 bp, Artificial Sequence
  derived and/or modified sequence
accaccggccacctgcgggccatcaacccagaaaatggcttctttggagtggcccctggcacctctgtgaagaccaaccccaatgccatcaagaccatccagaagaacaccatcttcaccaacgtggccgagaccagtgatggaggagtgtactgggagggcattgatgagcccctggccagcggcgtgaccatcacctcctggaagaacaaggagtggagcagtgaagatggagagccctgtgcccaccccaacagccgcttctgcaccccagccagccagtgccccatcattgatgctgcctgggagagccctgagggcgtgcccatcgagggcatcatctttggaggccggcggcctgctggggtgcccctggtgtatgaggccctgtcctggcagcacggcgtgtttgtgggcgccgccatgaggtctgaggccacagctgctgctgagcacaagggcaagatcatcatgcatgacccctttgccatgaggcccttcttcggctacaactttgggaagtacctggcccactggctgtccatggcccagcaccctgctgccaagctgcccaagatcttccacgtgaactggttcaggaaggacaaggagggcaagttcctgtggccaggctttggagagaacagccgggtgctggagtggatgttcaacagaattgatggcaaggccagcaccaagctgacccccatcggctacatccccaaggaggatgccctgaacctgaagggcctgggccacatcaacatgatggagctgttcagcatcagcaaggagttctgggagaaggaggtggaggacatcgagaagtacctggaggaccaggtgaatgctgacctgccctgtgaaattgaaagagagatcctggccctgaagcagaggatcagccagatgtag

SEQ ID NO: 321645 - DNA, 918 bp, Artificial Sequence
  derived and/or modified sequence
atgaccaccggccacctgcgggccatcaacccagaaaatggcttcttcggcgtggcccctggcacctctgtgaagaccaaccccaatgccatcaagaccatccagaagaacaccatcttcaccaacgtggccgagaccagtgatggcggcgtgtactgggagggcattgatgagcccctggccagcggcgtgaccatcacctcctggaagaacaaggagtggagcagtgaagatggagagccctgtgcccaccccaacagccgcttctgcaccccagccagccagtgccccatcattgatgctgcctgggagagccctgagggcgtgcccatcgagggcatcatctttggaggaagaagacctgctggggtgcccctggtgtatgaggccctgtcctggcagcacggcgtgtttgtgggcgccgccatgaggtctgaggccacagctgctgctgagcacaagggcaagatcatcatgcatgacccctttgccatgaggcccttcttcggctacaactttgggaagtacctggcccactggctgtccatggcccagcaccctgctgccaagctgcccaagatcttccacgtgaactggttcaggaaggacaaggagggcaagttcctgtggccaggctttggagagaacagccgggtgctggagtggatgttcaacagaattgatggcaaggccagcaccaagctgacccccatcggctacatccccaaggaggatgccctgaacctgaagggcctgggccacatcaacatgatggagctgttcagcatcagcaaggagttctgggagaaggaggtggaggacatcgagaagtacctggaggaccaggtgaatgctgacctgccctgtgaaattgagcgggagatcctggccctgaagcagaggatcagccagatgtag

SEQ ID NO: 321646 - DNA, 942 bp, Artificial Sequence
  derived and/or modified sequence
atgaccaccggccggaccatgtacgtgatccccttcagcatgggcccccttggttcccccctgagcaaaatagggattgaactgaccgattcaccctatgttgtggcctctatgcgcatcatgacacgaatgggtacacctgtgttggaagcagtgggcgacggcgaattcgtgaagtgcctgcacagtgttggctgtcccctacccctgcagaagcctttggttaataactggccatgcaaccctgagctgacccttatagctcatctgccggatcgcagggagataatttcattcggaagcgggtacggaggtaactcactgctgggtaaaaaatgttttgcactgcgcatggctagtcgcctcgccaaagaggagggctggctggcagagcacatgctcattcttggcattactaaccctgagggcgaaaagaaatatcttgcagccgccttcccaagcgcctgtgggaaaactaacctggctatgatgaaccccagcctcccaggctggaaagtagagtgtgtcggcgacgacatcgcctggatgaagtttgacgcccaagggcaccttcgcgcgataaatcctgaaaacggattcttcggtgtggcgccgggcacaagtgtgaagactaaccctaacgccatcaagaccatacaaaagaacacaatttttaccaatgtggccgagacttctgacggcggcgtctactgggaaggtatcgacgagccactcgcctctggcgttaccattacttcgtggaagaataaagagtggtcctctgaggacggggtaagtctgccagaagccttggtgtgtagggcggccggaactgcttgcttaagccaggccctcacttctctgtcactgtcatatcgaggtacactctgcccaccccagctcgaagtgctacatccgtgccagccagtcccccaccactag

SEQ ID NO: 321647 - DNA, 915 bp, Artificial Sequence
  derived and/or modified sequence
accaccggccacctgcgggccatcaaccccgagaacggcttcttcggtgttgcacccggcactagtgtaaagactaacccgaatgcaattaagactatacagaagaacaccatatttacgaacgtggcagagacttcagatggaggcgtgtactgggagggaatcgatgagcctctagccagtggtgtcacaattacttcatggaaaaataaggagtggtcatccgaagatggggaaccatgtgcccaccccaacagccgcttctgtacacctgcaagccagtgtccaatcattgatgcggcgtgggaatcaccagagggggttcccattgagggaattatatttgggggtaggcggcccgctggcgtaccactcgtgtatgaggcgctttcttggcagcacggggtattcgtgggtgctgcaatgaggtcagaggcgacagctgcagcagagcacaaaggtaagatcattatgcacgatccatttgctatgaggccttttttcgggtataacttcggcaagtaccttgcgcactggctgtccatggcccagcaccccgcggctaagctgcccaagatttttcatgttaactggtttaggaaggataaagaagggaagtttctttggccagggttcggagaaaatagtagagttctggagtggatgttcaatcggatcgatgggaaggcctccacaaagctgacccctattgggtacattcctaaggaggacgccctcaacctgaagggattgggacatattaatatgatggaattgttctccatttccaaggagttttgggagaaggaggtcgaggacattgagaagtatctcgaagaccaggtgaatgccgatttaccctgtgaaattgagcgggagatcctggctctcaagcaaaggattagccaaatgtag

SEQ ID NO: 321648 - DNA, 918 bp, Artificial Sequence
  derived and/or modified sequence
atgaccaccggccacctgcgggccatcaaccccgagaacggcttctttggcgtagcccccggcactagcgtgaagacgaatccaaatgccattaaaaccatccaaaaaaacacaatatttacaaatgtcgctgaaacttcagacggcggggtgtactgggagggcattgacgagccgctggcatcaggtgttaccatcaccagctggaagaataaagaatggagctctgaagacggagagccctgtgcccatccaaatagccggttttgcaccccagcatcacaatgccctattattgatgcagcctgggagagtcccgagggagtgccgatagagggcattatcttcggcgggagacgcccggcaggagtgcccttggtgtatgaagctttatcctggcagcacggcgtgtttgtgggagccgcaatgcgaagtgaggcaacagcagctgcagaacacaagggcaagataatcatgcatgatccgtttgccatgcgtccattcttcggatacaatttcggaaaatacctagcacattggctctcaatggcccaacatccagcagctaaactgcctaagatcttccacgtaaactggttcaggaaagacaaagagggcaaatttttatggccaggtttcggcgagaattcacgagtgcttgaatggatgtttaataggatcgacggcaaagcctctaccaagctgactccgatcgggtacatccccaaggaggatgccctgaacttgaagggcctggggcacattaatatgatggaattgttctccattagcaaggagttctgggagaaggaagtcgaggacatagaaaaatacctggaggatcaagtgaacgccgatctaccctgcgaaatcgaacgcgagattttagcgttgaagcagcggatatctcagatgtag

SEQ ID NO: 321649 - DNA, 1358 bp, Artificial Sequence
  derived and/or modified sequence
ctgagctgtgtcagcctgatcacatccacatctgtgacggctctgaggaggagaatgggcggcttctgggccagatggaggaagagggcatcctcaggcggctgaagaagtatgacaactggtcgcaccatgtacgtcatcccattcagcatggggccgctgggctcgcctctgtcaaagatcggcatcgagctgacggattcaccctacgtggtggccagcatgcggatcatgacgcggatgggcacgcccgtcctggaagcagtgggcgatggggagtttgtcaaatgcctccattctgtggggtgccctctgcctttacaaaagcctttggtcaacaactggccctgcaacccggagctgacgctcatcgcccacctgcctgaccgcagagagatcatctcctttggcagtgggtacggcgggaactcgctgctcgggaagaagtgctttgctctcaggatggccagccggctggccaaggaggaagggtggctggcagagcacatgctgattctgggtataaccaaccctgagggtgagaagaagtacctggcggccgcatttcccagcgcctgcgggaagaccaacctggccatgatgaaccccagcctccccgggtggaaggttgagtgcgtcggggatgacattgcctggatgaagtttgacgcacaaggtcatttaagggccatcaacccagaaaatggctttttcggtgtcgctcctgggacttcagtgaagaccaaccccaatgccatcaagaccatccagaagaacacaatctttaccaatgtggccgagaccagcgacgggggcgtttactgggaaggcattgatgagccgctagcttcaggtgtcaccatcacgtcctggaagaataaggagtggagctcagaggatggtgtgtccctgccagaggccttggtgtgccgggctgcagggactgcctgtttgagccaggcactcacgagcctttctctgtcttataggggaaccttgtgcccaccccaactcgaggttctgcacccctgccagccagtgccccatcattgatgctgcctgggagtctccggaaggtgttcccattgaaggcattatctttggaggccgtagacctgctggtgtccctctagtctatgaagctctcagctggcaacatggagtctttgtgggggcggccatgagatcagaggccacagcggctgcagaacataaaggcaaaatcatcatgcatgacccctttgccatgcggcccttctttggctacaacttcggcaaatacctggcccactggcttagcatggcccagcacccagcagccaaactgcccaagatcttccatgtcaactggttccgga

SEQ ID NO: 321650 - DNA, 915 bp, Artificial Sequence
  derived and/or modified sequence
acaacaggtcatttaagggccatcaacccagaaaatggctttttcggtgtcgctcctgggacttcagtgaagaccaaccccaatgccatcaagaccatccagaagaacacaatctttaccaatgtggccgagaccagcgacgggggcgtttactgggaaggcattgatgagccgctagcttcaggtgtcaccatcacgtcctggaagaataaggagtggagctcagaggatggggaaccttgtgcccaccccaactcgaggttctgcacccctgccagccagtgccccatcattgatgctgcctgggagtctccggaaggtgttcccattgaaggcattatctttggaggccgtagacctgctggtgtccctctagtctatgaagctctcagctggcaacatggagtctttgtgggggcggccatgagatcagaggccacagcggctgcagaacataaaggcaaaatcatcatgcatgacccctttgccatgcggcccttctttggctacaacttcggcaaatacctggcccactggcttagcatggcccagcacccagcagccaaactgcccaagatcttccatgtcaactggttccggaaggacaaggaaggcaaattcctctggccaggctttggagagaactccagggtgctggagtggatgttcaaccggatcgatggaaaagccagcaccaagctcacgcccataggctacatccccaaggaggatgccctgaacctgaaaggcctggggcacatcaacatgatggagcttttcagcatctccaaggaattctgggagaaggaggtggaagacatcgagaagtatctggaggatcaagtcaatgccgacctcccctgtgaaatcgagagagagatccttgccttgaagcaaagaataagccagatgtaa

SEQ ID NO: 321651 - DNA, 1439 bp, Artificial Sequence
  derived and/or modified sequence
acggccttcccactgggaacacaaacttgctggcgggaagagcccggaaagaaacctgtggatctcccttcgagatcatccaaagagaagaaaggtgacctcacattcgtgccccttagcagcactctgcagaaatgcctcctcagctgcaaaacggcctgaacctctcggccaaagttgtccagggaagcctggacagcctaccccaggcagtgagggagtttctcgagaataacgctgagctgtgtcagcctgatcacatccacatctgtgacggctctgaggaggagaatgggcggcttctgggccagatggaggaagagggcatcctcaggcggctgaagaagtatgacaactggtcatttaagggccatcaacccagaaaatggctttttcggtgtcgctcctgggacttcagtgaagaccaaccccaatgccatcaagaccatccagaagaacacaatctttaccaatgtggccgagaccagcgacgggggcgtttactgggaaggcattgatgagccgctagcttcaggtgtcaccatcacgtcctggaagaataaggagtggagctcagaggatggggaaccttgtgcccaccccaactcgaggttctgcacccctgccagccagtgccccatcattgatgctgcctgggagtctccggaaggtgttcccattgaaggcattatctttggaggccgtagacctgctggtgtccctctagtctatgaagctctcagctggcaacatggagtctttgtgggggcggccatgagatcagaggccacagcggctgcagaacataaaggcaaaatcatcatgcatgacccctttgccatgcggcccttctttggctacaacttcggcaaatacctggcccactggcttagcatggcccagcacccagcagccaaactgcccaagatcttccatgtcaactggttccggaaggacaaggaaggcaaattcctctggccaggctttggagagaactccagggtgctggagtggatgttcaaccggatcgatggaaaagccagcaccaagctcacgcccataggctacatccccaaggaggatgccctgaacctgaaaggcctggggcacatcaacatgatggagcttttcagcatctccaaggaattctgggagaaggaggtggaagacatcgagaagtatctggaggatcaagtcaatgccgacctcccctgtgaaatcgagagagagatccttgccttgaagcaaagaataagccagatgtaatcagggcctgagtgctttacctttaaaatcattccctttcccatccataaggtgcagtaggagcaagagagggcaagtgttcccaaattgacgccaccataataatcatcaccacaccgtgagcagatctgaaaggcacactttgatttttttaaggataagaaccacagaac

SEQ ID NO: 321652 - DNA, 942 bp, Artificial Sequence
  derived and/or modified sequence
atgactacgggcagaacgatgtatgtgatccccttctcaatggggccactggggtctcccctcagcaaaatcggtattgaactgaccgattccccatacgtggttgcttcaatgcgtataatgacacgcatgggcacccctgttctggaggcagtgggcgatggagaatttgtcaagtgtctgcattccgttggctgtccccttccactccagaagcctctggtcaataactggccgtgtaacccggagctaaccctgatcgcacatctgcccgataggcgcgaaattatatctttcgggtccgggtatggagggaactctttattagggaaaaaatgttttgccctccgtatggccagcaggctggcgaaggaagagggctggttggcagaacatatgctgatcttgggaatcaccaatcctgagggcgaaaagaaatacctggccgctgcatttcctagcgcgtgcggtaagacaaacctcgccatgatgaacccaagcctgcccggatggaaagttgagtgtgtcggagatgacattgcttggatgaagttcgatgcccagggacacctgcgtgctattaaccctgagaatggattcttcggagtcgccccaggaacaagcgtaaagacaaacccaaatgctattaagactatccagaaaaatactatcttcaccaacgtggcagaaacctccgacggtggggtgtactgggagggcatcgatgagcccttggcatcaggggtcaccatcacatcctggaaaaacaaggagtggagctcagaagatggcgttagcctcccggaggcattagtttgtcgtgctgcgggaaccgcctgtttatcccaggcactcacctcattgtccctttcttatagagggaccctttgccctccacagttagaggtgctgcacccttgccagccggtaccacatcattag

SEQ ID NO: 321653 - DNA, 915 bp, Artificial Sequence
  derived and/or modified sequence
acaactggccacctgagagccataaacccagaaaatggattcttcggcgtggcccctggcacatccgttaagaccaacccaaatgcgattaagacaattcaaaagaatacaatttttacaaacgtggctgaaacaagtgatggcggagtgtattgggaggggatcgacgagccactagctagtggcgtgactattacgagctggaagaacaaagaatggtccagtgaggatggcgaaccgtgcgcgcacccaaactcaagattctgtactcctgcctctcaatgcccgattatagacgccgcttgggaaagtcccgaaggtgtgcccatcgaagggataatcttcggcggacgccgtccagctggcgtgcctcttgtatatgaggccctctcctggcagcacggcgtttttgtgggtgcggctatgcgctccgaggccacggccgctgccgagcacaaaggtaaaataatcatgcacgacccattcgctatgcgccctttcttcggctataactttggaaaatacctggcacattggctcagcatggcccagcacccagcagctaagctgccaaaaatttttcatgtaaactggtttcgcaaagataaggagggcaaattcctgtggccagggttcggagagaattctcgggtcttggagtggatgtttaatcgcattgacggaaaagcgtcgactaaactgacccctataggttatatccctaaagaggatgcccttaacctcaagggactgggccacattaatatgatggaactcttcagcatatctaaagaattttgggagaaggaagtggaagacatcgagaaatatctggaggaccaggtaaacgccgatctcccttgcgagatcgaacgtgagatactggccctcaagcaacggatatcacagatgtag

SEQ ID NO: 321654 - DNA, 918 bp, Artificial Sequence
  derived and/or modified sequence
atgacaacggggcacctgcgggctattaacccagagaacggatttttcggtgtggcccctggcacctctgtcaagaccaaccccaacgcgatcaagactatacagaaaaatacaatctttactaacgtggctgaaacatcagacgggggtgtgtactgggagggtatcgatgagccactcgcatcaggcgtgactatcacaagctggaagaataaggaatggagcagcgaggacggggaaccatgcgcccatcctaattctcgcttctgcacgcctgcatctcagtgtcctattatcgacgccgcttgggagagcccagagggcgttcccatagagggtatcatattcgggggtagacgccctgccggagtgcccctagtatatgaggcactgtcttggcagcatggggttttcgtcggagccgctatgcgatccgaggcaactgcggctgccgagcacaaagggaaaatcatcatgcacgatcctttcgctatgagacccttttttggatataatttcggaaagtacctggcccactggctgagcatggctcaacaccccgcagctaagttgccaaaaatattccatgtcaattggtttcggaaggacaaggaagggaaattcttgtggcccggatttggcgaaaactctagagtcctggaatggatgtttaacaggattgacggtaaagctagcacaaagcttacccccatcggctacataccaaaggaggatgccctgaacctgaagggactcggacatatcaacatgatggagttgttctccatcagtaaggagttctgggagaaagaggtagaggacatcgagaagtacctagaggatcaggtgaacgcagacctaccctgcgaaattgagcgggagatactggccctgaagcagaggatctcccagatgtag

SEQ ID NO: 321655 - DNA, 942 bp, Artificial Sequence
  derived and/or modified sequence
atgaccaccggcagaaccatgtacgtgatccccttcagcatgggccccctgggcagccccctgagcaagatcggcatcgagctgaccgacagcccctacgtggtggccagcatgagaatcatgaccagaatgggcacccccgtgctggaggccgtgggcgacggcgagttcgtgaagtgcctgcacagcgtgggctgccccctgcccctgcagaagcccctggtgaacaactggccctgcaaccccgagctgaccctgatcgcccacctgcccgacagaagagagatcatcagcttcggcagcggctacggcggcaacagcctgctgggcaagaagtgcttcgccctgagaatggccagcagactggccaaggaggagggctggctggccgagcacatgctgatcctgggcatcaccaaccccgagggcgagaagaagtacctggccgccgccttccccagcgcctgcggcaagaccaacctggccatgatgaaccccagcctgcccggctggaaggtggagtgcgtgggcgacgacatcgcctggatgaagttcgacgcccagggccacctgagagccatcaaccccgagaacggcttcttcggcgtggcccccggcaccagcgtgaagaccaaccccaacgccatcaagaccatccagaagaacaccatcttcaccaacgtggccgagaccagcgacggcggcgtgtactgggagggcatcgacgagcccctggccagcggcgtgaccatcaccagctggaagaacaaggagtggagcagcgaggacggcgtgagcctgcccgaggccctggtgtgcagagccgccggcaccgcctgcctgagccaggccctgaccagcctgagcctgagctacagaggcaccctgtgccccccccagctggaggtgctgcacccctgccagcccgtgccccaccactag

SEQ ID NO: 321656 - DNA, 915 bp, Artificial Sequence
  derived and/or modified sequence
accaccggccacctgagagccatcaaccccgagaacggcttcttcggcgtggcccccggcaccagcgtgaagaccaaccccaacgccatcaagaccatccagaagaacaccatcttcaccaacgtggccgagaccagcgacggcggcgtgtactgggagggcatcgacgagcccctggccagcggcgtgaccatcaccagctggaagaacaaggagtggagcagcgaggacggcgagccctgcgcccaccccaacagcagattctgcacccccgccagccagtgccccatcatcgacgccgcctgggagagccccgagggcgtgcccatcgagggcatcatcttcggcggcagaagacccgccggcgtgcccctggtgtacgaggccctgagctggcagcacggcgtgttcgtgggcgccgccatgagaagcgaggccaccgccgccgccgagcacaagggcaagatcatcatgcacgaccccttcgccatgagacccttcttcggctacaacttcggcaagtacctggcccactggctgagcatggcccagcaccccgccgccaagctgcccaagatcttccacgtgaactggttcagaaaggacaaggagggcaagttcctgtggcccggcttcggcgagaacagcagagtgctggagtggatgttcaacagaatcgacggcaaggccagcaccaagctgacccccatcggctacatccccaaggaggacgccctgaacctgaagggcctgggccacatcaacatgatggagctgttcagcatcagcaaggagttctgggagaaggaggtggaggacatcgagaagtacctggaggaccaggtgaacgccgacctgccctgcgagatcgagagagagatcctggccctgaagcagagaatcagccagatgtag

SEQ ID NO: 321657 - DNA, 918 bp, Artificial Sequence
  derived and/or modified sequence
atgaccaccggccacctgagagccatcaaccccgagaacggcttcttcggcgtggcccccggcaccagcgtgaagaccaaccccaacgccatcaagaccatccagaagaacaccatcttcaccaacgtggccgagaccagcgacggcggcgtgtactgggagggcatcgacgagcccctggccagcggcgtgaccatcaccagctggaagaacaaggagtggagcagcgaggacggcgagccctgcgcccaccccaacagcagattctgcacccccgccagccagtgccccatcatcgacgccgcctgggagagccccgagggcgtgcccatcgagggcatcatcttcggcggcagaagacccgccggcgtgcccctggtgtacgaggccctgagctggcagcacggcgtgttcgtgggcgccgccatgagaagcgaggccaccgccgccgccgagcacaagggcaagatcatcatgcacgaccccttcgccatgagacccttcttcggctacaacttcggcaagtacctggcccactggctgagcatggcccagcaccccgccgccaagctgcccaagatcttccacgtgaactggttcagaaaggacaaggagggcaagttcctgtggcccggcttcggcgagaacagcagagtgctggagtggatgttcaacagaatcgacggcaaggccagcaccaagctgacccccatcggctacatccccaaggaggacgccctgaacctgaagggcctgggccacatcaacatgatggagctgttcagcatcagcaaggagttctgggagaaggaggtggaggacatcgagaagtacctggaggaccaggtgaacgccgacctgccctgcgagatcgagagagagatcctggccctgaagcagagaatcagccagatgtag

SEQ ID NO: 321658 - DNA, 819 bp, Artificial Sequence
  derived and/or modified sequence
atgaccaagcacccccctaacagacgcgggatatctttcgaggttggggctcagcttgaggctagggatcgcttaaaaaactggtatccggctcacattgaggatatcgactatgaagagggcaaagtgctcatacactttaagagatggaatcatcgctacgacgagtggttttgctgggattcaccatacctaagaccccttgagaaaattcagttacggaaagagggtctgcacgaggaggacggaagttctgaattccagatcaatgagcaggtgctagcttgctggtctgattgtagattttatcctgccaaggtgaccgcagtgaacaaagatggaacctatacggtgaaattctacgacggggtggtccagacggtcaagcacatccatgtaaaggcgttctcgaaggaccaaaacatcgtgggcaatgcaagacctaaggaaactgaccacaaatcccttagctcgagtccagataagagagaaaaatttaaagagcagcgtaaagcaaccgtcaatgtcaaaaaggataaagaggacaaaccacttaagaccgagaagagacctaaacagcccgacaaagagggcaaactaatttgcagtgagaaaggtaaggtgagtgagaagtccctccccaagaatgagaaggaagacaaggaaaacattagtgaaaacgatagggagtactccggagatgctcagaagacccgccagaccccattccactctagctattgctgcggtttcaagctgtccaactttgccaccaataatataggaactgaaaaaaaagaaaatatcaagcgcatgtag

SEQ ID NO: 321659 - DNA, 819 bp, Artificial Sequence
  derived and/or modified sequence
atgaccaagcacccccccaacagaagaggcatcagctttgaggtgggcgcccagctggaggcccgggaccggctgaagaactggtacccagcccacatcgaggacatcgactatgaggagggcaaggtgctgatccacttcaagcgctggaaccacagatatgatgagtggttctgctgggacagcccctacctgcggcccctggagaagatccagctgaggaaggagggcctgcatgaagaagatggcagcagcgagttccagatcaatgagcaggtgctggcctgctggagcgactgccgcttctacccagccaaggtgacagctgtgaacaaggatggcacctacacagtgaagttctatgatggagtggtgcagacagtgaagcacatccacgtgaaggccttcagcaaggaccagaacatcgtgggcaatgcccggcccaaggagacagaccacaagagcctgagcagcagcccagacaagcgggagaagttcaaggagcagaggaaggccaccgtgaatgtgaagaaggacaaggaggacaagcccctgaagacagagaagaggcccaagcagcctgacaaggagggcaagctgatctgcagcgagaagggcaaggtgtctgagaagagcctgcccaagaatgagaaggaggacaaggagaacatcagtgaaaatgaccgggagtacagcggagatgcccagaagacccggcagacccccttccacagcagctactgctgcggcttcaagctgagcaactttgccaccaacaacattggaacagagaagaaggagaacatcaagaggatgtag

SEQ ID NO: 321660 - DNA, 819 bp, Artificial Sequence
  derived and/or modified sequence
atgaccaagcacccccccaaccggcggggcatcagcttcgaggtgggagcccagttggaggctcgtgatcgactcaagaattggtaccctgcacatattgaagacattgactacgaggaaggcaaggtgctgatccatttcaaacggtggaatcaccgctacgacgaatggttctgttgggactccccttaccttcgacccttggagaaaatccagctgcggaaagaagggctgcacgaggaggacggaagctctgagttccagatcaatgagcaggtcttggcttgctggtctgactgtagattctatccagcaaaagtgacagctgtcaataaagacggcacgtacactgttaagttctatgacggcgtggtacagaccgtgaaacatattcacgtgaaagcgttctcaaaggatcagaatattgtagggaacgccaggccaaaagaaactgatcacaagagcctgagttccagtcctgacaaaagagagaagtttaaagaacagcgaaaggctacggtcaacgttaagaaggacaaggaggacaaaccattgaagaccgaaaaacgccctaaacaacctgataaggaaggcaagctcatatgtagtgagaagggaaaagttagcgagaagagtttgccaaagaacgaaaaagaggacaaagagaacatcagtgaaaacgatcgtgagtattccggagacgctcagaaaacacgccaaactcctttccattcaagttattgttgcggattcaaactaagcaacttcgctactaataatatcgggactgagaaaaaggagaacatcaagaggatgtag

SEQ ID NO: 321661 - DNA, 819 bp, Artificial Sequence
  derived and/or modified sequence
atgacaaagcacccccctaaccgaagggggatctcattcgaagtgggcgctcagctggaagctcgcgatcggctgaagaactggtaccccgcacatatcgaagatattgattacgaggaaggcaaagtactgatccattttaagcgatggaaccatcgttacgatgagtggttttgttgggatagcccatatctgcgacctttggagaaaatacagctgcgcaaagaagggttgcacgaggaggacggtagttcggaattccagatcaatgagcaagtgctggcatgctggtctgattgtcgcttctacccagctaaggtcacggctgtcaacaaggatggaacctacacagtcaaattttacgatggggtagtacagactgtaaaacatatccacgtcaaagctttttctaaagaccaaaatatcgttggcaatgcaagacccaaggaaacagaccataagagtttatctagtagccccgacaagagggagaagttcaaagaacaaagaaaggctactgtgaatgtgaaaaaggacaaagaagacaaaccactgaaaaccgagaaacggcctaagcagcccgacaaagagggaaaactcatctgttctgagaaggggaaagttagcgagaaatcgcttcccaaaaacgaaaaagaggacaaagagaatatttctgagaatgatcgggaatacagtggagacgcccagaaaacacggcagacaccctttcactccagctattgttgcggctttaagctctcaaactttgcgacaaacaatatcggaaccgagaaaaaagaaaatattaagcggatgtag

SEQ ID NO: 321662 - DNA, 819 bp, Artificial Sequence
  derived and/or modified sequence
atgaccaagcacccccccaacagaagaggcatcagcttcgaggtgggcgcccagctggaggccagagacagactgaagaactggtaccccgcccacatcgaggacatcgactacgaggagggcaaggtgctgatccacttcaagagatggaaccacagatacgacgagtggttctgctgggacagcccctacctgagacccctggagaagatccagctgagaaaggagggcctgcacgaggaggacggcagcagcgagttccagatcaacgagcaggtgctggcctgctggagcgactgcagattctaccccgccaaggtgaccgccgtgaacaaggacggcacctacaccgtgaagttctacgacggcgtggtgcagaccgtgaagcacatccacgtgaaggccttcagcaaggaccagaacatcgtgggcaacgccagacccaaggagaccgaccacaagagcctgagcagcagccccgacaagagagagaagttcaaggagcagagaaaggccaccgtgaacgtgaagaaggacaaggaggacaagcccctgaagaccgagaagagacccaagcagcccgacaaggagggcaagctgatctgcagcgagaagggcaaggtgagcgagaagagcctgcccaagaacgagaaggaggacaaggagaacatcagcgagaacgacagagagtacagcggcgacgcccagaagaccagacagacccccttccacagcagctactgctgcggcttcaagctgagcaacttcgccaccaacaacatcggcaccgagaagaaggagaacatcaagagaatgtag

SEQ ID NO: 321663 - protein, 292 aa, Artificial Sequence
  derived and/or modified sequence
MKSEAKDGEEESLQTAFKKLRVDASGSVASLSVGEGTGVRAPVRTATDDTKPKTTCASKDSWHGSTRKSSRGAVRTQRRRRSKSPVLHPPKFIHCSTIASSSSSQLKHKSQTDSPDGSSGLGISSPKEFSAGESSTSLDANHTGAVVEPLRTSVPRLPSESKKEDSSDATQVPQASLKASDLSDFQSVSKLNQGKPCTCIGKECQCKRWHDMEVYSFSGLQSVPPLAPERRSTLEDYSQSLHARTLSGSPRSCSEQARVFVDDVTIEDLSGYMEYYLYIPKKMSHMAEMMYT

SEQ ID NO: 321664 - DNA, 1572 bp, Artificial Sequence
  derived and/or modified sequence
ggctggtttggatccgggtcagtcgggtgccgagatttgggagagacgctctgaactgactgccccgcatcaccggagcgtcccagctgcgaggagtgtaaacaggaacatcgataagtagtgtaaaaacttgcacaatgaaatccgaagccaaggatggagaggaggagagtctacagactgctttcaaaaaattaagagtggatgcatcagggtctgtagcatctctgtctgttggagaaggcacaggtgtcagagcaccagtcagaacagcaacagatgataccaaacctaaaaccacatgtgcatctaaagacagttggcacgggtctacaaggaagtcttcacgaggagcagtgagaactcagcgtcgtcgacgttctaagtctcctgtccttcatcctccaaagtttatacattgcagtacaatagcgtcttcttccagcagtcaactcaagcacaaaagccagactgactcacctgatggcagcagtgggctgggaatttcatcccctaaagagttcagtgcaggagaaagctctacttctctcgatgctaatcacacaggggcagtcgttgagcctttgagaacttctgttccaaggctcccatcagagagtaagaaggaagactcctctgacgctacccaagtcccccaagcaagtctcaaagccagtgatctctctgactttcaatcagtttccaagctaaaccagggcaagccatgcacatgcataggcaaggaatgccagtgtaagagatggcatgatatggaagtgtattccttttcaggcctgcagagtgtccctcccttggctccagaacgaagatccacacttgaggactactctcagtcgctgcacgccagaactctgtctggctctccccgatcctgttctgagcaagctcgagtcttcgtggatgatgtgaccattgaggacctgtcaggctacatggagtattacttgtatattcccaagaaaatgtcccacatggcagaaatgatgtacacctgatagcaagaagctaattcatatgctttaaaccaatgaaggcttgtcaaagagatttagttaatggcagaccttgtggccactttgtgtgagaagacatctctttctgctcactgtgcttgcaataaaaacttttcttggcatctcagttaatcttcattctttcaacttactctcttgagttcttacatacacttcaaggcgagcagatcaaagaaaaatcccccttatttagaaatgttcctgggggatgaagaaaccataattacttgagactggcagcagtgggtatatggtaaaagcctttgtaaaacagtgcatttttcagatttgtttaaggtttgctagccaaggaaagtaaaatgtgattttgtaactgcactaaacatttgtcatgctgtagttgccagcccagaatattagaagttacaagactgatttaaaccgtctctgatttaatgcaagatatattgtgtctataaaggtttctcttgttattgttaagccagagatctaaggtttagattcaatttgaataaactagctggcctgccctcta

SEQ ID NO: 321665 - DNA, 1617 bp, Artificial Sequence
  derived and/or modified sequence
gaaagaactttgtgctttggctgcagcgctgcgagtataaagggatgagtgggttgcacggagagggctatgaagaaaaacacaaatggaagtatcaaccttactggtttctagaccaactggggagattcccgttaaaaatgtaaacaggaacatcgataagtagtgtaaaaacttgcacaatgaaatccgaagccaaggatggagaggaggagagtctacagactgctttcaaaaaattaagagtggatgcatcagggtctgtagcatctctgtctgttggagaaggcacaggtgtcagagcaccagtcagaacagcaacagatgataccaaacctaaaaccacatgtgcatctaaagacagttggcacgggtctacaaggaagtcttcacgaggagcagtgagaactcagcgtcgtcgacgttctaagtctcctgtccttcatcctccaaagtttatacattgcagtacaatagcgtcttcttccagcagtcaactcaagcacaaaagccagactgactcacctgatggcagcagtgggctgggaatttcatcccctaaagagttcagtgcaggagaaagctctacttctctcgatgctaatcacacaggggcagtcgttgagcctttgagaacttctgttccaaggctcccatcagagagtaagaaggaagactcctctgacgctacccaagtcccccaagcaagtctcaaagccagtgatctctctgactttcaatcagtttccaagctaaaccagggcaagccatgcacatgcataggcaaggaatgccagtgtaagagatggcatgatatggaagtgtattccttttcaggcctgcagagtgtccctcccttggctccagaacgaagatccacacttgaggactactctcagtcgctgcacgccagaactctgtctggctctccccgatcctgttctgagcaagctcgagtcttcgtggatgatgtgaccattgaggacctgtcaggctacatggagtattacttgtatattcccaagaaaatgtcccacatggcagaaatgatgtacacctgatagcaagaagctaattcatatgctttaaaccaatgaaggcttgtcaaagagatttagttaatggcagaccttgtggccactttgtgtgagaagacatctctttctgctcactgtgcttgcaataaaaacttttcttggcatctcagttaatcttcattctttcaacttactctcttgagttcttacatacacttcaaggcgagcagatcaaagaaaaatcccccttatttagaaatgttcctgggggatgaagaaaccataattacttgagactggcagcagtgggtatatggtaaaagcctttgtaaaacagtgcatttttcagatttgtttaaggtttgctagccaaggaaagtaaaatgtgattttgtaactgcactaaacatttgtcatgctgtagttgccagcccagaatattagaagttacaagactgatttaaaccgtctctgatttaatgcaagatatattgtgtctataaaggtttctcttgttattgttaagccagagatctaaggtttagattcaatttgaataaactagctggcctgccctcta

SEQ ID NO: 321666 - DNA, 879 bp, Artificial Sequence
  derived and/or modified sequence
atgaagagcgaggccaaggacggcgaggaggagagcctgcagaccgccttcaagaagctgagagtggacgccagcggcagcgtggccagcctgagcgtgggcgagggcaccggcgtgagagcccccgtgagaaccgccaccgacgacaccaagcccaagaccacctgcgccagcaaggacagctggcacggcagcaccagaaagagcagcagaggcgccgtgagaacccagagaagaagaagaagcaagagccccgtgctgcacccccccaagttcatccactgcagcaccatcgccagcagcagcagcagccagctgaagcacaagagccagaccgacagccccgacggcagcagcggcctgggcatcagcagccccaaggagttcagcgccggcgagagcagcaccagcctggacgccaaccacaccggcgccgtggtggagcccctgagaaccagcgtgcccagactgcccagcgagagcaagaaggaggacagcagcgacgccacccaggtgccccaggccagcctgaaggccagcgacctgagcgacttccagagcgtgagcaagctgaaccagggcaagccctgcacctgcatcggcaaggagtgccagtgcaagagatggcacgacatggaggtgtacagcttcagcggcctgcagagcgtgccccccctggcccccgagagaagaagcaccctggaggactacagccagagcctgcacgccagaaccctgagcggcagccccagaagctgcagcgagcaggccagagtgttcgtggacgacgtgaccatcgaggacctgagcggctacatggagtactacctgtacatccccaagaagatgagccacatggccgagatgatgtacacctag

SEQ ID NO: 321667 - DNA, 879 bp, Artificial Sequence
  derived and/or modified sequence
atgaaaagcgaggccaaggacggagaggaagagtctctgcaaacggctttcaagaaactgcgcgttgacgcatcaggatccgtggcgtcattatctgttggagaaggcacgggagtgcgagctcctgtgcggactgccaccgatgacacaaaacccaaaaccacgtgtgctagtaaggatagctggcacggatcaacccgaaagagcagccgcggtgcagtaagaacccagaggagacgccgttccaagagccctgtgctgcacccccccaagtttatccactgctccaccattgcaagcagcagctcttcgcagttgaagcataaatctcagacggacagcccggacggctcttctggcctaggcattagcagtcctaaagaattttctgccggcgagagtagtacttccctggatgctaaccataccggtgccgtcgtcgagcccttgcgaacctctgtgcccagactgccctccgagtctaagaaggaagacagttccgacgctacccaagtgcctcaagcctctctaaaagccagcgatctcagtgactttcagagcgtgtcaaaactcaatcagggcaaaccatgcacctgtatcggcaaggagtgccagtgtaagcggtggcatgacatggaagtgtactccttctccggcttgcaatccgtaccgccgctggcgcccgagcggcggtcaactctcgaagactatagccaatcactccacgcccggacactgtcgggctcaccccgaagttgcagtgaacaggcgcgcgtgtttgtggacgacgtgacgattgaggacctgagcggctacatggagtattacttgtatattcccaaaaagatgagccacatggctgaaatgatgtatacttag

SEQ ID NO: 321668 - DNA, 879 bp, Artificial Sequence
  derived and/or modified sequence
atgaaatcggaggcaaaggacggagaggaagagtccttgcagaccgcgtttaagaagctacgcgtggacgcctccggcagcgtggcctccctctccgtcggggaaggcactggagtgcgcgcgcccgtgaggactgccactgatgatacgaagccaaagactacctgcgcatcaaaggatagttggcacggaagcacccgcaaatcatccaggggtgcggtccgcactcaacgccgccgtcgctctaagagccctgttctgcatcctccaaaattcatacactgtagtacaatcgctagcagctcatcctctcagttgaagcacaaatctcagacagacagccctgatggatcttccggacttgggatttcctcgcctaaggagtttagtgctggcgagtcaagcacctcgctggatgccaaccacactggtgcggtggtggaacccctgcgaacaagtgtgccaagactgcccagcgagtccaagaaagaagatagctccgacgccacacaggttccccaagcgtctcttaaggcctccgatctgagcgattttcaatccgtgtccaaattgaaccaaggtaaaccatgcacctgcataggcaaggagtgccaatgcaaaagatggcatgacatggaagtgtactcgttttcaggactccagagcgtgcccccgctggcccctgagagaaggagtaccctggaagactactctcagtccttgcatgccagaactctaagtggatctccccggtcctgctctgagcaggcacgcgttttcgtcgacgatgtgactatcgaagacctcagtggctacatggagtactacctctacattcccaagaagatgtcccacatggcagagatgatgtatacctag

SEQ ID NO: 321669 - DNA, 879 bp, Artificial Sequence
  derived and/or modified sequence
atgaagtctgaggccaaggatggagaggaggagagcctgcagacagccttcaagaagctgcgggtggatgccagcggctctgtggccagcctgtctgtgggggagggcactggagtgcgggcccctgtgaggacagccacagatgacaccaagcccaagaccacctgtgccagcaaggacagctggcacggcagcaccaggaagagcagcagaggagctgtgaggacccagaggagaagaagaagcaagagccctgtgctgcacccccccaagttcatccactgcagcaccatcgccagcagcagcagcagccagctgaagcacaagagccagacagacagcccagatggcagcagcggcctgggcatcagcagccccaaggagttctctgctggggagagcagcaccagcctggatgccaaccacactggagctgtggtggagcccctgcggacctctgtgccccggctgcccagcgagagcaagaaggaggacagcagtgatgccacccaggtgccccaggccagcctgaaggccagtgacctgagtgacttccagagcgtgtccaagctgaaccagggcaagccctgcacctgcatcggcaaggagtgccagtgcaagcgctggcatgacatggaggtgtacagcttcagcggcctgcagagcgtgccccccctggcccctgagcggcgcagcaccctggaggactacagccagagcctgcacgcccggaccctgagcggcagccccaggagctgcagcgagcaggcccgggtgtttgtggatgatgtgaccatcgaggacctgagcggctacatggagtactacctgtacatccccaagaagatgagccacatggccgagatgatgtacacctag

SEQ ID NO: 321670 - DNA, 879 bp, Artificial Sequence
  derived and/or modified sequence
atgaagagcgaggccaaggacggcgaggaggagagcctgcagaccgcgtttaagaaactccgggtggacgctagcggttccgttgcctctctctccgtcggcgagggcacaggtgtgcgtgccccggtgaggacagcaacagatgatacgaaacccaagaccacctgtgcttctaaagactcctggcacggtagtacacgcaaatcctcgcgtggtgccgtgaggacacagaggcggagaaggagtaagagcccagtcctacaccccccaaagtttatacactgttcaaccatcgcttctagcagctcctctcaactgaaacataaaagccagacggattcacctgacgggagctctggactaggaatctcatcccctaaggaatttagtgccggggaatcctcaacatcactggatgcaaatcataccggcgccgtggtcgaacccctgcgcacgtccgttcccaggcttccttcggaaagcaaaaaggaagactctagcgacgcaacacaagtgccccaggcctcgctgaaggctagtgacctctcggactttcaatcggttagcaaactgaatcagggaaaaccttgcacatgcataggaaaggaatgccagtgtaaacgctggcatgatatggaagtgtactccttcagcggactgcagtcagtgccacctttggcacccgagcggcggtctacactggaggactactcccagtccctgcatgcccggacactcagcggtagtccccgcagctgctctgagcaggccagagtgttcgtggatgacgttacgatagaagacctttccggatatatggagtactatctgtacatccccaaaaagatgtcccatatggccgagatgatgtacacttag

SEQ ID NO: 321671 - DNA, 879 bp, Artificial Sequence
  derived and/or modified sequence
atgaagagcgaggccaaggacggcgaggaggagagcctgcagaccgctttcaaaaaactacgggtggatgcttctgggagtgtggcttcacttagtgtgggagagggtacaggggttagagctcctgtaaggaccgccactgacgacactaaaccaaagacaacatgtgcgtccaaagactcctggcacggctccacacgtaagtccagccgcggtgcagtccggacacagcggcgtcgcaggtctaaatcgcccgtgctccacccgcccaaatttatccattgcagcactatcgcaagttccagctcttctcaactcaagcacaaaagccaaacggatagccccgatggcagcagcggtctgggaatttcctctcccaaagaattctcagcaggggagagctcaacctcactggacgcaaaccatacaggtgccgtggtagagccacttagaacaagtgtcccgagattgccctctgagagtaaaaaagaggatagctccgacgcaactcaggttccgcaagcctcacttaaagcctccgatctctccgacttccaatctgtgagcaagctgaatcagggaaagccttgtacgtgtatcggtaaagagtgtcagtgtaagaggtggcacgacatggaggtatattctttttctggacttcaatccgttcctcccctggccccagaaagaaggtcaactttggaagattacagccaatcgttacacgcacgtaccctcagtggcagtccgcgctcatgcagcgaacaggccagggtatttgtggacgacgtcacgattgaagacctatccggctatatggagtactatctatatatcccgaagaagatgtcacatatggccgagatgatgtacacctag

SEQ ID NO: 321672 - DNA, 879 bp, Artificial Sequence
  derived and/or modified sequence
atgaagtcagaagccaaggatggggaagaggagtctctgcagaccgcattcaaaaagctgcgtgtcgatgccagcgggtcagtcgcttctctgagtgtgggtgagggaacaggggtcagggccccagtgcggaccgccacagacgacactaagcctaaaaccacctgtgccagtaaggatagctggcatggtagcacgaggaagagctcacgcggtgccgtccgcacgcagcggaggcggaggagcaagtcaccggtccttcatcccccaaagttcatccactgcagtacgatcgcctcatctagttcctctcagctgaagcacaaatcacagacagattcgcccgatggctctagcggattgggcatttcgagccccaaggaattctcagccggagagtccagcacctcattggatgccaatcacaccggtgctgtggtcgagccacttcggacatccgtgcccaggctgccatccgagagtaagaaagaagactcttcagacgctacccaagtgccacaggcaagtctgaaagcaagtgatctctccgattttcagtccgtgtcaaagctcaaccagggaaagccctgcacatgtatcggtaaggaatgccagtgtaagagatggcatgacatggaagtctacagcttctctggcctacagagcgtgccaccccttgcccctgagaggcgtagcacacttgaagattacagtcagtccctgcacgctcgcactctctctggcagccccagatcttgttccgaacaggctagggtctttgtggatgatgtgactattgaagacctgagcgggtacatggaatactatctttatatacctaagaaaatgtcacatatggcggagatgatgtatacatag

SEQ ID NO: 321673 - DNA, 879 bp, Artificial Sequence
  derived and/or modified sequence
atgaaatcagaagctaaagacggcgaggaagaatcattgcaaaccgcatttaaaaaactgagagttgatgcctcgggatcagtggcatctctgtccgtgggggagggcaccggtgtcagggccccagttagaacggctactgacgatactaaaccaaagacgacatgcgcgagtaaggactcttggcacgggagtactaggaaatcctctcgcggtgcagtgaggacccagagaagaagacgctccaaaagcccagtcctgcatcctcccaaattcatccactgctctacgatcgccagtagcagctcttcccagcttaaacacaagtcgcaaaccgacagtcctgacggctcttcaggcttaggcatctctagtcccaaagagtttagcgccggagagagttcaacctctctggacgccaaccatactggtgccgtcgttgagccgctccgtacgagtgttccacggctgccttccgagtcaaagaaggaggactcatcggatgcgacacaggtgccacaagcttcccttaaagccagcgacctttccgactttcagtccgttagcaagctgaaccagggcaagccctgcacatgcattggaaaagagtgccaatgcaaacgttggcatgacatggaggtgtattccttctctggactgcagagcgtgccccctctcgctcccgaaaggaggtccaccttggaggattattctcagtccttgcatgccagaactctatctgggtcaccaaggtcttgtagcgaacaggccagggtctttgtggacgacgtcactatcgaggatttgtcagggtatatggaatactacctatacataccaaaaaagatgtcacacatggcagaaatgatgtacacatag

SEQ ID NO: 321674 - DNA, 984 bp, Artificial Sequence
  derived and/or modified sequence
atgaacgtgaacgacacagaaatagcatggtcaatcctacagaagtcgggctatttaaggacctcgaacttgcaagaggccgacgttattttactggtgacctgttcaattcgggaaaaagctgagcagaccatttggaatagattacatcagctgaaggcacttaaaaccagaaggcctaggtccagggtgccactgcggataggaatactgggttgtatggctgaacgtctgaaggaggagattctaaaccgagaaaaaatggtggatatccttgccgggccggatgcttaccgagatttgccgagactgctcgctgtggcagaatctggacagcaggccgcgaatgtgctgcttagtttagatgagacttatgccgatgttatgcctgtgcaaacctcagcaagcgcgacatcagcatttgtgtatagccgggaagcttacgtcgaactcgtacaccacattcgggaatcaatccccggcgtgagccttagttcagacttcatcgcagggttctgtggagaaactgaggaggaccacgttcaaacggtgtccttacttcgggaagtgcaatataacatgggattcctgttcgcctatagcatgaggcagaagacacgggcctaccaccggttgaaagacgacgtgcctgaggaggttaaacttcggcgcttggaggaactcatcacaatttttagggaagaggctacaaaagccaatcagacttccgtcggctgtacgcagcttgttcttgtagagggcctctcaaaacgctctgccaccgacctctgtggaagaaatgacggcaacttaaaggtgattttcccagacgcggaaatggaggatgtcaataaccccggtttacgtgtcagggctcagccgggagactatgtactagtgaaaatcactagtgcatcttcacagacactgagggggcacgtgctctgtcggaccacactgcgggactctagtgcttactgctag

SEQ ID NO: 321675 - DNA, 984 bp, Artificial Sequence
  derived and/or modified sequence
atgaatgtgaatgacacagagatcgcctggagcatcctgcagaagagcggctacctgcggaccagcaacctgcaggaggctgatgtgatcctgctggtgacctgcagcatccgggagaaggccgagcagaccatctggaaccggctgcaccagctgaaggccctgaagacccggcggcccaggagccgggtgcccctgcgcatcggcatcctgggctgcatggccgagcggctgaaggaggagatcctgaaccgggagaagatggtggacatcctggccggcccagatgcctacagagacctgccccggctgctggccgtggccgagagcggccagcaggccgccaacgtgctgctgagcctggatgagacctatgcagatgtgatgcctgtgcagaccagcgccagcgccaccagcgcctttgtgtacagccgggaggcctacgtggagctggtgcaccacatccgggagagcatccctggggtgtccctgagcagtgacttcatcgccggcttctgtggggagacagaggaggaccacgtgcagacagtgtccctgctgcgggaggtgcagtacaacatgggcttcctgtttgcctacagcatgaggcagaagacccgggcctaccaccggctgaaggatgatgtgcctgaggaggtgaagctgcggcggctggaggagctgatcaccatcttccgggaggaggccaccaaggccaaccagacctctgtgggctgcacccagctggtgctggtggagggcctgagcaagaggtctgccacagacctgtgtggcagaaatgatggcaacctgaaggtgatcttcccagatgctgagatggaggatgtgaacaaccctggcctgcgggtgcgggcccagcccggggactatgtgctggtgaagatcaccagcgccagcagccagaccctgcggggccacgtgctgtgcaggaccaccctgcgggacagcagcgcctactgctag

SEQ ID NO: 321676 - DNA, 984 bp, Artificial Sequence
  derived and/or modified sequence
atgaacgtgaacgacaccgagatcgcctggagcatcctgcagaagagcggatacctccgcacttccaacctccaggaggccgacgtgatccttctggtgacttgctccattagggaaaaggcagaacaaactatctggaacagactgcatcagctgaaagcactcaagacgcgacggccgaggagccgagtcccactccggatcggcatcctgggttgcatggccgagaggctgaaggaggagatcttaaaccgggagaaaatggtggacatcctcgcaggcccagatgcctatagagacctgccacgtctactcgctgtagcggaatccggtcagcaagctgcaaacgtcctcctctcactggacgagacttatgccgacgttatgcctgtgcagacatcggcttcagctacctccgcttttgtgtacagccgggaagcctatgtcgagctcgttcaccacatccgggaatccatcccaggggtttccttaagctctgatttcatcgccggcttttgcggggaaaccgaagaagaccatgtgcaaaccgtcagtcttctgagagaggtccagtataacatgggctttctgtttgcctatagcatgcgacagaagacacgtgcttaccaccggctgaaagatgacgttcccgaagaggtcaaactgcggaggctcgaggagctgataaccatctttagggaagaggccactaaggcaaaccaaacctctgtcggatgtacccagttagtccttgtggagggtttgagcaaaagaagcgctactgatctttgcggcagaaatgacggcaatctcaaggtgatcttcccagatgccgaaatggaggatgtcaacaatccaggcttgcgcgtgagggcgcagcctggcgattacgtgctggtcaagattaccagcgcctcttctcagaccttgcgtggtcacgtgctctgcaggactaccctgagagacagctctgcctactgctag

SEQ ID NO: 321677 - DNA, 984 bp, Artificial Sequence
  derived and/or modified sequence
atgaacgtcaacgacacagaaatcgcctggagcattctgcaaaaaagcggttatctgcggacaagcaacctgcaggaagctgatgtaattctgttggtgacctgttccatccgcgaaaaagcagagcagacaatttggaacaggttgcaccagctcaaagcactcaaaacccgtagaccgagatcaagggtgcccttgaggatcgggattctaggatgtatggccgaacggttgaaagaggagatcctcaaccgagagaaaatggtcgacatcctggccggaccagatgcatatagagatttgcccaggctgctcgccgtggcggagtcgggccaacaggccgctaatgtactgctgagcctcgacgagacctacgccgatgtcatgccagtgcagacatccgcgtcggccacatctgcgtttgtctattcgagggaggcgtatgttgaacttgtgcaccatatcagagaatcaatacccggagtctcattgtcaagtgacttcatcgctggattctgcggagaaacagaagaagaccacgtccagacagtgagccttctcagggaggtccagtataatatgggattcctttttgcctactcaatgaggcagaagacccgtgcctatcatcgactcaaggatgacgtaccagaagaagtgaagctccggaggctcgaggaactcattacgatattccgggaagaggcaacaaaggcaaaccagacgtctgtcggatgtacccagttggtattagttgaggggctgtctaagagaagcgccaccgacctctgcggcagaaacgacggcaacttgaaggtgattttccccgatgccgagatggaggatgtcaacaacccagggcttcgcgtcagagcccaacccggtgattatgtccttgtcaaaataacttccgcctctagccagactcttcgcggacacgtgctctgcagaaccactctaagggattcttctgcatattgttag

SEQ ID NO: 321678 - DNA, 984 bp, Artificial Sequence
  derived and/or modified sequence
atgaacgtgaacgacaccgagatcgcctggagcatcctgcagaagagcggctacctgagaaccagcaacctgcaggaggccgacgtgatcctgctggtgacctgcagcatcagagagaaggccgagcagaccatctggaacagactgcaccagctgaaggccctgaagaccagaagacccagaagcagagtgcccctgagaatcggcatcctgggctgcatggccgagagactgaaggaggagatcctgaacagagagaagatggtggacatcctggccggccccgacgcctacagagacctgcccagactgctggccgtggccgagagcggccagcaggccgccaacgtgctgctgagcctggacgagacctacgccgacgtgatgcccgtgcagaccagcgccagcgccaccagcgccttcgtgtacagcagagaggcctacgtggagctggtgcaccacatcagagagagcatccccggcgtgagcctgagcagcgacttcatcgccggcttctgcggcgagaccgaggaggaccacgtgcagaccgtgagcctgctgagagaggtgcagtacaacatgggcttcctgttcgcctacagcatgagacagaagaccagagcctaccacagactgaaggacgacgtgcccgaggaggtgaagctgagaagactggaggagctgatcaccatcttcagagaggaggccaccaaggccaaccagaccagcgtgggctgcacccagctggtgctggtggagggcctgagcaagagaagcgccaccgacctgtgcggcagaaacgacggcaacctgaaggtgatcttccccgacgccgagatggaggacgtgaacaaccccggcctgagagtgagagcccagcccggcgactacgtgctggtgaagatcaccagcgccagcagccagaccctgagaggccacgtgctgtgcagaaccaccctgagagacagcagcgcctactgctag

SEQ ID NO: 321679 - DNA, 1260 bp, Artificial Sequence
  derived and/or modified sequence
atggccgccccccccgccagagccgacgccgaccccagccccaccagcccccccaccgccagagacacccccggcagacaggccgagaagagcgagaccgcctgcgaggacagaagcaacgccgagagcctggacagactgctgccccccgtgggcaccggcagaagccccagaaagagaaccaccagccagtgcaagagcgagccccccctgctgagaaccagcaagagaaccatctacaccgccggcagacccccctggtacaacgagcacggcacccagagcaaggaggccttcgccatcggcctgggcggcggcagcgccagcggcaagaccaccgtggccagaatgatcatcgaggccctggacgtgccctgggtggtgctgctgagcatggacagcttctacaaggtgctgaccgagcagcagcaggagcaggccgcccacaacaacttcaacttcgaccaccccgacgccttcgacttcgacctgatcatcagcaccctgaagaagctgaagcagggcaagagcgtgaaggtgcccatctacgacttcaccacccacagcagaaagaaggactggaagaccctgtacggcgccaacgtgatcatcttcgagggcatcatggccttcgccgacaagaccctgctggagctgctggacatgaagatcttcgtggacaccgacagcgacatcagactggtgagaagactgagaagagacatcagcgagagaggcagagacatcgagggcgtgatcaagcagtacaacaagttcgtgaagcccagcttcgaccagtacatccagcccaccatgagactggccgacatcgtggtgcccagaggcagcggcaacaccgtggccatcgacctgatcgtgcagcacgtgcacagccagctggaggagggctgcgccggcctgggcacccccgtgccccccgccgcccccgacgccgagagacccgaggagcacgccgccggcaccggccacgcccaccaccaccaggtgagagcccacctgggcaccggcagacccagagccagagcccccgcccagctgctggccccccagggccagggcgaccagagcagaagagtgcacctgctgctgcaggagaccgacgccgccgcccacagagccagagccctgctgcccgccctgagcggcctgagaagaaccgaccccgccggcgccggcctgtgcggccaggtgctgtgcggcgaggccgaccacagatgcgtgcacagcgccagaagatag

SEQ ID NO: 321680 - DNA, 1260 bp, Artificial Sequence
  derived and/or modified sequence
atggccgctccaccagcgagggccgacgcagacccaagtccgacgtccccacccaccgccagagacactcccggccggcaggccgagaagtctgagactgcgtgcgaagacaggtccaacgctgagtccctggacagactcctgcctcccgttggcaccggcagaagccctaggaagagaacaactagtcagtgtaagtcagaacccccgcttctcagaacctcaaaacgaaccatctataccgctgggcggccgccctggtacaacgagcacggcacacagtcgaaggaagctttcgccatcgggctggggggtggttcagcctccggaaagacaaccgtggctcgaatgattatcgaagccctcgacgtgccgtgggttgtgctgcttagtatggacagcttttacaaagttctgacagaacagcagcaagaacaggccgcccacaataacttcaatttcgaccacccagacgctttcgattttgacctgattatctccacgctcaagaagctgaagcaaggcaaaagtgtgaaagtaccgatctatgactttaccactcacagccgcaaaaaagactggaaaaccctgtatggagctaacgtcatcattttcgaaggcatcatggcttttgcggataaaaccctgcttgaactcctcgacatgaaaattttcgtggacactgattcagatatcaggctggtgcggcgactgcgccgagacataagcgagcggggtcgcgatatcgagggtgttatcaagcaatataataagttcgtgaagccctcctttgaccagtatattcagccaacaatgcgtcttgccgatattgtggtcccccgaggatcaggtaacactgttgctatcgatctcatcgttcagcatgtccacagtcagcttgaagagggatgtgcaggactgggaaccccagtaccccccgctgcccccgatgctgaacgtccagaggaacatgcggctggaaccggtcacgctcatcaccaccaggttagagcccacttgggcacaggccgcccgcgcgcccgggcccctgcccagttgctggccccccagggtcaaggagaccagagcaggcgagtgcaccttctgctgcaggaaaccgacgctgccgcccaccgggccagggcactactccccgccctgtctggcctgcgcagaactgaccctgctggggccggcctgtgtgggcaggtgctgtgcggagaagctgatcataggtgcgtacactccgcccgcagatag

SEQ ID NO: 321681 - DNA, 1260 bp, Artificial Sequence
  derived and/or modified sequence
atggccgcccccccagcccgggcagatgctgaccccagccccaccagccccccaacagcccgggacaccccaggccggcaggccgagaagtcagaaacagcctgtgaggacaggagcaatgctgagagcctggaccggctgctgccccctgtgggcaccggccgcagccccaggaagaggaccaccagccagtgcaagtctgagccccccctgctgcggaccagcaagaggaccatctacacagctggccggcccccctggtacaatgaacatggcacccagagcaaggaggcctttgccatcggcctgggcggcggcagcgccagcggcaagaccaccgtggccaggatgatcatcgaggccctggatgtgccctgggtggtgctgctgtccatggacagcttctacaaggtgctgacagagcagcagcaggagcaggccgcccacaacaacttcaactttgaccacccagatgcctttgattttgacctgatcatcagcaccctgaagaagctgaagcagggcaagtctgtgaaggtgcccatctatgacttcaccacccacagcaggaagaaggactggaagaccctgtatggagccaacgtcatcatctttgagggcatcatggcctttgctgacaagaccctgctggagctgctggacatgaagatctttgtggacacagacagcgacatccggctggtgcggcggctgcggcgggacatcagcgagcggggccgggacattgaaggagtcatcaagcagtacaacaagtttgtgaagcccagctttgaccagtacatccagcccaccatgaggctggccgacatcgtggtgccccggggcagcggcaacacagtggccatcgacctgattgtgcagcacgtgcacagccagctggaggagggctgtgccggcctgggcacccctgtgcccccagctgccccagatgctgagaggcctgaggagcacgccgccggcaccggccacgcccaccaccaccaggtgcgggcccacctgggcaccggccggccccgggcccgggccccagcccagctgctggccccccagggccagggcgaccagagccggcgggtgcacctgctgctgcaggagacagatgctgctgcccaccgggcccgggccctgctgcctgccctgagcggcctgcggaggacagatcctgctggggccggcctgtgtggccaggtgctgtgtggggaggccgaccaccgctgtgtgcacagcgcccggaggtag

SEQ ID NO: 321682 - DNA, 1260 bp, Artificial Sequence
  derived and/or modified sequence
atggccgccccccccgcccgggccgacgccgaccccagccccacctcaccgcccaccgccagagacactcctggccggcaagcagagaaatccgaaacagcatgtgaagaccgatccaacgccgagagcctggataggctgctgcctcccgtcgggaccggaaggagcccgcgcaaaaggacaacatctcagtgcaagagtgaacctcccctgctgcgcacctccaagaggaccatatatacagccggcaggcctccttggtacaatgaacacgggactcaatcaaaggaggctttcgctattgggcttgggggcggtagcgctagtgggaaaacaacggtcgcaagaatgatcatcgaagccctggacgtgccatgggtagtcttactgtcaatggactcattttacaaagtcctcaccgagcagcagcaggagcaggccgcccataataacttcaactttgaccacccagacgctttcgacttcgatctaattatttcaactctcaaaaagttaaagcagggaaagtcagttaaagtgccgatatatgacttcaccacccactctagaaaaaaagactggaagaccctctacggagccaacgtgatcatttttgagggcatcatggctttcgcagataagacattgctggagcttctagacatgaaaatcttcgttgataccgacagcgatatcagacttgtccgccgcttgcgccgggatatatccgaaaggggccgcgatattgagggagtcattaaacagtacaataagtttgtaaaaccctcattcgaccagtatatccagcctacgatgcgactggccgacatcgtggttccacgcggctccggcaatacagttgctatcgatttgatcgtccagcatgtgcatagccagttggaagaaggctgcgccgggctgggaactcccgtgcctcctgctgctcctgatgccgagcgtcccgaagaacacgccgcaggaacaggtcatgcacaccatcaccaggtgcgagcacatcttggtaccgggcgccccagagctcgagcgcctgcccagcttttggcccctcagggacagggagatcagagcaggcgtgtgcacctgttactgcaggagacggacgccgcagcccatagggcccgcgctctgctgcctgccctgtccgggttgcgaagaactgatcctgccggcgccggcctgtgcggccaggtgctgtgcggcgaagccgaccacaggtgtgtgcattccgccaggcgctag

SEQ ID NO: 321683 - DNA, 1260 bp, Artificial Sequence
  derived and/or modified sequence
atggccgcacctcctgcccgagctgacgccgatccctcccctaccagccctcccacggctcgcgatacccccggacgtcaggctgaaaaatccgagacagcttgcgaggataggtccaacgcagagtcccttgatcggctgctgccccctgttggaaccgggagatcccctcgcaagcggacgacttcccagtgcaaatcggaacctccacttctgcggacctccaagagaacaatctataccgctggcagacccccttggtacaacgaacatgggacgcagagtaaggaggcatttgctattgggctgggaggtggatcagcatccggcaaaaccaccgtggcacgtatgattatcgaggctctggatgtgccttgggtggtgctgctttcaatggattcgttttacaaagtgctcactgaacaacagcaggagcaggcggctcacaacaatttcaattttgatcaccctgatgcttttgatttcgatctcattatctctaccctaaagaagctcaaacagggaaagtccgtgaaagtccccatttatgatttcacaacacattcaaggaaaaaggattggaagacactctacggcgcaaatgtaatcatttttgaaggcataatggcctttgccgacaaaacactcctcgaattgttggacatgaagatcttcgtcgacactgactccgatatccgattggtgaggcgtctcagacgagatattagcgaacgcggacgtgacatcgagggggtaatcaagcagtataacaagtttgttaagccgtcctttgaccagtacatccagcctacgatgagacttgcagacattgtggttccccgaggtagcggcaacactgtagctatcgacctcattgtgcagcatgtgcactcgcaactagaagaagggtgtgccggactgggaactccagttcctcctgctgctcctgatgccgagaggccagaggaacacgctgccggaacaggccatgcacatcaccatcaggttagggcccatctgggcacgggacgccctcgggctcgggctcccgcacagctgctcgcacctcagggccagggagaccagagccgcagagtacacctcctgcttcaggaaaccgatgcagccgctcatcgggctcgggctttgttgcccgctctgtccggcctaaggagaactgatccagccggagccggattatgcggacaggtgttatgtggggaggctgatcatcgatgcgtgcactcagctaggaggtag

SEQ ID NO: 321684 - DNA, 408 bp, Artificial Sequence
  derived and/or modified sequence
atgcacaccatcatcagagacaaggagaccagcagagacgagttcatcttctacagcaagagactgatgagactgctgatcgagcacgccctgagcttcctgcccttccaggactgcgtggtgcagaccccccagggccaggactacgccggcaagtgctacgccggcaagcagatcaccggcgtgagcatcctgagagccggcgagaccatggagcccgccctgagagccgtgtgcaaggacgtgagaatcggcaccatcctgatccagaccaaccagctgaccggcgagcccgagctgcactacctgagactgcccaaggacatcagcgacgaccacgtgatcctgatggactgcaccgtgagcaccggcgccgccgccatgatggccgtgagagtgctgctgtag

SEQ ID NO: 321685 - DNA, 408 bp, Artificial Sequence
  derived and/or modified sequence
atgcacaccattattcgtgataaggaaacgtcccgcgatgaatttatcttctactccaagagactcatgaggctgttgattgagcacgccctgagcttccttcctttccaggactgtgttgttcagacaccacagggacaagactacgccggcaaatgttacgctgggaagcagataacaggggtctctatcctgagagccggtgagaccatggagccagccctacgcgccgtatgtaaggacgtcagaattgggaccatcttaatccaaaccaatcagctaaccggagagcctgagctgcactatctccgcctgcctaaagatatttccgatgaccacgtaatactcatggactgcactgtgtccacgggggctgcagccatgatggctgttcgagtcctgctgtag

SEQ ID NO: 321686 - DNA, 408 bp, Artificial Sequence
  derived and/or modified sequence
atgcacaccatcatccgggacaaggagaccagcagagatgagttcatcttctacagcaagaggctgatgaggctgctgattgaacatgccctgtccttcctgcccttccaggactgtgtggtgcagaccccccagggccaggactatgctgggaagtgctacgccggcaagcagatcaccggggtgtccatcctgcgggccggggagaccatggagcccgccctgcgggctgtgtgcaaggatgtgcgcatcggcaccatcctgatccagaccaaccagctgactggagagcctgagctgcactacctgcggctgcccaaggacatcagtgatgaccacgtgatcctgatggactgcaccgtgtccactggagctgctgccatgatggctgtgcgggtgctgctgtag

SEQ ID NO: 321687 - DNA, 408 bp, Artificial Sequence
  derived and/or modified sequence
atgcacaccatcatccgggacaaggagaccagccgggacgagttcatcttctattccaagcggctgatgagactactgatagaacacgccctctcttttctgccgtttcaggattgtgtggtgcagacccctcaagggcaagattatgccggtaagtgctatgcaggcaagcagataacgggagtctcaatcttacgggctggcgaaactatggagcccgcattaagggccgtgtgcaaggatgtacgcattggaactatcctgatccagacgaatcagctcaccggagagccagagctacactacctcaggctcccaaaggacatctccgatgaccacgtgattcttatggattgcaccgtgagtacaggggccgctgccatgatggccgtcagggtcttgctgtag

SEQ ID NO: 321688 - DNA, 408 bp, Artificial Sequence
  derived and/or modified sequence
atgcataccattatccgggacaaagagaccagtcgagacgagtttattttttattctaaacgactaatgaggttgctcattgagcacgctttgagtttcctgcccttccaggactgtgtggtccagaccccacagggacaagactatgcgggtaaatgttatgccggaaaacagattacgggggtcagtattctgcgcgctggcgagactatggagcctgcgctcagggccgtttgtaaggatgttcggatcgggaccatattgatccagaccaaccaactgaccggggagccagagcttcattatctgcggttgccaaaggatatctccgacgaccatgtgatattaatggactgtactgtgtctacaggtgccgcagctatgatggcagtgcgggtgctcttgtag

SEQ ID NO: 321689 - DNA, 888 bp, Artificial Sequence
  derived and/or modified sequence
ctttagttcccccggggagaggctggggacaagctacccattctggggtatgacacctatcagcacgtgtgagcccgccctgtgcccggcccacttctgcttcctcttagcgcaggaggggtcccgcactgggaggggccctcacagcctaccccgctagctttctgcctgatggtgagcttgccccgttgttcgccgccatctttcgcctttgcctgacagctcaggtagggcgacgtctccccccagctcagccccaggcagaagtcaggcccgctctgcacctcgtgctgtgcctggcccgtgtgttcccctcacagtgacgcacagccgtcctgtggggagggagggctctgggaaaagacccccttcttgagtgttccccatcggtttgtccccagggctgcgctggcctcggcacaccagtgccacccgctgccccggacgctgagcgtcctgaagagcacgccgcaggtacggggcatgcacaccatcatcagggacaaggagaccagtcgcgacgagttcatcttctactccaagagactgatgcggctgctcatcgagcacgcgctctccttcctgccctttcaggactgcgtcgtacagaccccgcaggggcaggactatgcgggcaagtgctatgcggggaagcagatcaccggtgtgtccattctgcgcgccggtgaaaccatggagcccgcgctgcgcgctgtgtgcaaagacgtgcgcatcggcaccatcctcatccagaccaaccagcttaccggggagcccgagctccactacctgaggctgcccaaggacatcagcgatgaccacgtgatcctcatggactgcaccgtgtccacgggcgcggcggccatgatggcagtgcgcgtgctcctg

SEQ ID NO: 321690 - protein, 187 aa, Artificial Sequence
  derived and/or modified sequence
MQPIDTCVSYPRTGGQGSVSHFPGCQMPDTFNSWFLITLLHVWMCLVRMKQEGRSGKYMCRIIVHFMWEDVQQRGRVMGVNPYILKKNMILMTNHFYAAILGYDEGILSDDHGLAAALWRTFFNRKCEDPRHLELLVEYVRKQIQYLDSMNGEDLLLTGEVSWRPLVEKNPQSILKPHSPTYNDEGL

SEQ ID NO: 321691 - protein, 200 aa, Artificial Sequence
  derived and/or modified sequence
MGFTGPLKYSKWKIKIAALRMYTSCVEKTDFEEFFLRCQMPDTFNSWFLITLLHVWMCLVRMKQEGRSGKYMCRIIVHFMWEDVQQRGRVMGVNPYILKKNMILMTNHFYAAILGYDEGILSDDHGLAAALWRTFFNRKCEDPRHLELLVEYVRKQIQYLDSMNGEDLLLTGEVSWRPLVEKNPQSILKPHSPTYNDEGL

SEQ ID NO: 321692 - protein, 162 aa, Artificial Sequence
  derived and/or modified sequence
MALLVRVLRNQTSISQWVPVCSRLIPVSPTQGQGDRALSRTSQWPQMSQSRACGGSEQIPGIDIQLNRKYHTTPILGYDEGILSDDHGLAAALWRTFFNRKCEDPRHLELLVEYVRKQIQYLDSMNGEDLLLTGEVSWRPLVEKNPQSILKPHSPTYNDEGL

SEQ ID NO: 321693 - protein, 144 aa, Artificial Sequence
  derived and/or modified sequence
MCLVRMKQEGRSGKYMCRIIVHFMWEDVQQRGRVMGVNPYILKKNMILMTNHFYAAILGYDEGILSDDHGLAAALWRTFFNRKCEDPRHLELLVEYVRKQIQYLDSMNGEDLLLTGEVSWRPLVEKNPQSILKPHSPTYNDEGL

SEQ ID NO: 321694 - DNA, 1554 bp, Artificial Sequence
  derived and/or modified sequence
gggttccagtatgcagccgattgatacctgtgtctcctacccaaggacagggggacagggctctgtctcgcacttcccagctttctactaccaaagattccccacagcctgttgaggagaaggttggtgctttcacaaagataatagaagccatgggattcacgggacctttgaaatacagtaaatggaagattaagattgcggccctgcgcatgtatactagctgtgtggagaaaactgacttcgaggaattctttctaaggtgtcagatgcctgatacattcaattcatggtttcttataaccctactccacgtctggatgtgtctagtccgaatgaagcaggaaggccggagtgggaagtacatgtgtcgtatcatagttcattttatgtgggaggatgttcagcagcgcggcagagtcatgggggttaatccctatatcctgaagaagaacatgatcctcatgacaaatcatttctatgcagcgatcttgggatatgatgaggggatcctttcagatgatcatgggctggccgctgccctctggagaaccttcttcaaccggaaatgtgaagaccctcgacatcttgaattgctggtagagtatgtgaggaaacagatacagtacctggactccatgaacggggaggatctgcttctgacaggggaggtgagctggcgccctctagtggagaagaatcctcagagcatcctgaagccccattctccgacttacaacgacgagggactttgatgggctgggccctccgcacggcccgccagctggcttcgaggaacctccaggagagaagtgcctgttggtccaggaccctgcagaaagtggcctgaactgacctctgaacagcatctgtcaaatacctggccccatttgtgttgagtttcctcttagtgtgcccaggagtctgatctgctggggtacagggctgggagaacccctagctctcccggggtgtcctctcccttaggggaagccccgagtgagagtcccccagcacacactccccaaccccctccagcaactacatgtgactgatagcttttcccaaaggccaaggaagggatggtgtaggttcaaaagggaaaccccccagggcctgctgtggcctaggagcagattgtaatgctgccgagtccggtcggtgaccacgcgttgtccctcggctttcagccatggggttgagttggccattaaaagaaacagagacttctctctgccatggcccttctttattccagggacttagaaacttgcctgagatggtggacgcagtaatgagggcaccgcgcagctcagttagagacggagaaagggaagaggctgggatggtctctgctgctcttgcctctagttcatggagatgtgtctctgttcaggccaagatacagccagccaggcctgtcgtctgggacccaggaggcctctgatgaccaagggctttcacatcctaagtcatttggaaggaggccttgagaacaaagtcacctttgtcactcccagtgaactgaatgaggaacatgctgtctcctgtctt

SEQ ID NO: 321695 - DNA, 603 bp, Artificial Sequence
  derived and/or modified sequence
atgggcttcaccggccccctgaagtacagcaagtggaagatcaagatcgccgccctgagaatgtacaccagctgcgtggagaagaccgacttcgaggagttcttcctgagatgccagatgcccgacaccttcaacagctggttcctgatcaccctgctgcacgtgtggatgtgcctggtgagaatgaagcaggagggcagaagcggcaagtacatgtgcagaatcatcgtgcacttcatgtgggaggacgtgcagcagagaggcagagtgatgggcgtgaacccctacatcctgaagaagaacatgatcctgatgaccaaccacttctacgccgccatcctgggctacgacgagggcatcctgagcgacgaccacggcctggccgccgccctgtggagaaccttcttcaacagaaagtgcgaggaccccagacacctggagctgctggtggagtacgtgagaaagcagatccagtacctggacagcatgaacggcgaggacctgctgctgaccggcgaggtgagctggagacccctggtggagaagaacccccagagcatcctgaagccccacagccccacctacaacgacgagggcctgtag

SEQ ID NO: 321696 - DNA, 603 bp, Artificial Sequence
  derived and/or modified sequence
atgggttttacgggccctttgaaatactctaagtggaagattaaaatagcagccctacggatgtacacctcttgcgtggaaaagaccgacttcgaagaatttttcttacggtgccagatgccagacacatttaacagttggtttctgattacactgttgcatgtgtggatgtgtcttgtgagaatgaaacaagaaggtagatccggaaaatatatgtgtcgcatcatagttcactttatgtgggaggatgttcagcaacgggggcgggtaatgggagtgaatccctatattctgaaaaaaaacatgattcttatgacaaaccacttctacgcggctatcctgggatacgacgaggggatcctgagcgacgaccacggactggccgctgcattgtggagaaccttctttaatcgcaaatgtgaggacccaagacacctggagttactggttgaatatgtgagaaagcaaattcaatatctggactcaatgaatggagaagacctgctgctgaccggtgaggtgtcatggcgacccctggtggagaagaatccacagtctattctcaagccacatagcccaacgtacaatgacgagggactatag

SEQ ID NO: 321697 - DNA, 603 bp, Artificial Sequence
  derived and/or modified sequence
atgggcttcaccggccccctgaagtacagcaagtggaagatcaagattgctgccctgaggatgtacaccagctgtgtggagaagacagactttgaggagttcttcctgcgctgccagatgccagacaccttcaacagctggttcctgatcaccctgctgcacgtgtggatgtgcctggtgaggatgaagcaggagggccgcagcggcaagtacatgtgccgcatcatcgtgcacttcatgtgggaggatgtgcagcagaggggccgggtgatgggcgtgaacccctacatcctgaagaagaacatgatcctgatgaccaaccacttctatgctgccatcctgggctatgatgagggcatcctgagtgatgaccacggcctggccgccgccctgtggaggaccttcttcaacagaaaatgtgaggaccccaggcacctggagctgctggtggagtatgtgaggaagcagatccagtacctggacagcatgaatggagaggacctgctgctgactggagaggtgtcctggaggcccctggtggagaagaacccccagagcatcctgaagccccacagccccacctacaatgatgagggcctgtag

SEQ ID NO: 321698 - DNA, 603 bp, Artificial Sequence
  derived and/or modified sequence
atgggcttcaccggccccctgaagtacagcaagtggaagatcaagattgcagccctgagaatgtacacctcctgtgtcgagaagactgactttgaagaattttttctgagatgccagatgcccgacaccttcaactcttggtttctcattaccctgctgcacgtgtggatgtgtctggtgaggatgaagcaagagggaaggtccgggaaatatatgtgtaggataatcgtacattttatgtgggaagatgtccagcaaagaggcagggtcatgggcgtgaacccatacatactcaaaaaaaacatgatcctgatgactaaccacttctacgcagcaatcctgggctatgacgaaggtattctttccgatgatcacggacttgccgccgcattatggcgaacgttcttcaatcgtaagtgtgaggaccctcggcatctcgaactgctggtggagtacgtgcgcaaacaaatccagtatcttgacagtatgaacggtgaagatttgttgttaacgggagaggtgagttggcgtcccctcgtcgaaaagaatccacagagtatcctgaagccccatagccctacttacaacgatgaggggctctag

SEQ ID NO: 321699 - DNA, 603 bp, Artificial Sequence
  derived and/or modified sequence
atgggctttactggccctctgaagtacagcaagtggaagattaagatcgcggcactgcgaatgtacacttcatgcgtcgagaagaccgattttgaggagttcttcttacggtgccagatgcccgatacattcaatagttggtttctgattacactgcttcatgtctggatgtgtctggtcagaatgaagcaggaaggtaggtcgggcaaatatatgtgccggattattgtacacttcatgtgggaagacgtgcagcagcgtggacgcgtgatgggagtgaacccctacattcttaagaaaaacatgattctgatgactaatcatttctatgccgcaatcttgggatacgatgagggaatactgagtgatgatcacggacttgccgctgctctgtggcgcacattcttcaaccggaagtgcgaagaccccagacaccttgagttgctggtggaatacgtgaggaagcaaattcagtacctcgactccatgaatggagaagatctgcttcttactggagaagtatcttggaggcccctagtggagaagaatccccagagcatccttaagcctcattctcctacctataacgacgaaggtctttag

SEQ ID NO: 321700 - DNA, 157 bp, Artificial Sequence
  derived and/or modified sequence
tggaatggaatggaatggaatcaaatcgcatggtaatgaatcaaatggaatcaaatcgaatggaaataatggaatcgaagggaaacgaatggaatcgaattgcactgattctactgacttcgaggaaaatgaaatgaaatgcggtgaagtggaatgg

SEQ ID NO: 321701 - DNA, 564 bp, Artificial Sequence
  derived and/or modified sequence
atgcagcccatcgacacctgcgtgagctaccccagaaccggcggccagggcagcgtgagccacttccccggctgccagatgcccgacaccttcaacagctggttcctgatcaccctgctgcacgtgtggatgtgcctggtgagaatgaagcaggagggcagaagcggcaagtacatgtgcagaatcatcgtgcacttcatgtgggaggacgtgcagcagagaggcagagtgatgggcgtgaacccctacatcctgaagaagaacatgatcctgatgaccaaccacttctacgccgccatcctgggctacgacgagggcatcctgagcgacgaccacggcctggccgccgccctgtggagaaccttcttcaacagaaagtgcgaggaccccagacacctggagctgctggtggagtacgtgagaaagcagatccagtacctggacagcatgaacggcgaggacctgctgctgaccggcgaggtgagctggagacccctggtggagaagaacccccagagcatcctgaagccccacagccccacctacaacgacgagggcctgtag

SEQ ID NO: 321702 - DNA, 489 bp, Artificial Sequence
  derived and/or modified sequence
atggccctgctggtgagagtgctgagaaaccagaccagcatcagccagtgggtgcccgtgtgcagcagactgatccccgtgagccccacccagggccagggcgacagagccctgagcagaaccagccagtggccccagatgagccagagcagagcctgcggcggcagcgagcagatccccggcatcgacatccagctgaacagaaagtaccacaccacccccatcctgggctacgacgagggcatcctgagcgacgaccacggcctggccgccgccctgtggagaaccttcttcaacagaaagtgcgaggaccccagacacctggagctgctggtggagtacgtgagaaagcagatccagtacctggacagcatgaacggcgaggacctgctgctgaccggcgaggtgagctggagacccctggtggagaagaacccccagagcatcctgaagccccacagccccacctacaacgacgagggcctgtag

SEQ ID NO: 321703 - DNA, 435 bp, Artificial Sequence
  derived and/or modified sequence
atgtgcctggtgagaatgaagcaggagggcagaagcggcaagtacatgtgcagaatcatcgtgcacttcatgtgggaggacgtgcagcagagaggcagagtgatgggcgtgaacccctacatcctgaagaagaacatgatcctgatgaccaaccacttctacgccgccatcctgggctacgacgagggcatcctgagcgacgaccacggcctggccgccgccctgtggagaaccttcttcaacagaaagtgcgaggaccccagacacctggagctgctggtggagtacgtgagaaagcagatccagtacctggacagcatgaacggcgaggacctgctgctgaccggcgaggtgagctggagacccctggtggagaagaacccccagagcatcctgaagccccacagccccacctacaacgacgagggcctgtag

SEQ ID NO: 321704 - DNA, 564 bp, Artificial Sequence
  derived and/or modified sequence
atgcagcccatcgacacatgcgtgagttacccccgcaccgggggtcaagggtcagtttctcattttccaggctgccagatgcccgacacctttaactcctggttcctcatcaccctactccacgtgtggatgtgtttagtgcgcatgaagcaggaaggccgttctggtaaatacatgtgccggatcattgttcacttcatgtgggaagatgtgcagcaacgaggtcgggtgatgggggttaacccctacattctcaaaaagaacatgatcttgatgacaaatcatttctacgctgccatcctaggctacgatgagggaattctttccgatgatcacggactggcagcagctctttggagaacattcttcaacagaaagtgcgaggacccccgacacctggagctgctcgtggagtacgtgcgaaagcaaatacagtatttggactcaatgaatggtgaagacctgctccttacgggggaggtgtcatggagaccccttgtcgagaagaatccccagagcattttaaaacctcactcccccacctacaatgacgaaggcctgtag

SEQ ID NO: 321705 - DNA, 489 bp, Artificial Sequence
  derived and/or modified sequence
atggcactactggtgcgtgtcctgcgaaaccagacttcaatttcccagtgggtgcccgtctgcagtagattgataccggtttccccgactcaaggacagggtgaccgggccctcagtagaacctcacagtggccacagatgagtcaatcccgagcctgcggggggagtgaacaaatcccagggatcgatatccagctgaacaggaagtatcacacgacacccatattaggttacgatgaaggcattctaagcgacgaccacggccttgccgcggcgctgtggaggaccttttttaatcgtaagtgcgaagacccgagacacctcgagctcctggtggaatacgtgcgcaagcagatccagtaccttgactctatgaacggagaagacctgctactgaccggcgaagttagctggcggccactggtggaaaagaaccctcagagcattcttaaaccccacagtcctacttacaacgatgaggggctttag

SEQ ID NO: 321706 - DNA, 435 bp, Artificial Sequence
  derived and/or modified sequence
atgtgtctggttcggatgaagcaggagggcaggtccggcaagtatatgtgcaggatcattgtacacttcatgtgggaagatgtgcaacagcggggccgcgtaatgggagtgaatccatatatactaaaaaaaaatatgatccttatgacgaatcatttctacgctgcgatcctcggttacgatgaagggatcctgtctgatgatcatgggttggccgcagctctgtggcgaacgtttttcaaccgtaagtgcgaggatcctcgccacctggagttactggtggagtatgttcggaagcagattcagtatctggatagcatgaacggtgaagaccttctccttacaggggaagtgtcctggagacccctcgtggaaaagaatcctcagtccatcctgaaaccacactcaccgacgtacaatgatgagggcctgtag

SEQ ID NO: 321707 - DNA, 564 bp, Artificial Sequence
  derived and/or modified sequence
atgcagcccatcgacacctgtgtgtcctaccccaggactggaggccagggctctgtgagccacttccctggctgccagatgccagacaccttcaacagctggttcctgatcaccctgctgcacgtgtggatgtgcctggtgaggatgaagcaggagggccgcagcggcaagtacatgtgccgcatcatcgtgcacttcatgtgggaggatgtgcagcagaggggccgggtgatgggcgtgaacccctacatcctgaagaagaacatgatcctgatgaccaaccacttctacgccgccatcctgggctatgatgagggcatcctgagtgatgaccacggcctggccgccgccctgtggaggaccttcttcaacagaaaatgtgaggaccccaggcacctggagctgctggtggagtatgtgaggaagcagatccagtacctggacagcatgaatggagaggacctgctgctgaccggggaggtgtcctggaggcccctggtggagaagaacccccagagcatcctgaagccccacagccccacctacaatgatgagggcctgtag

SEQ ID NO: 321708 - DNA, 489 bp, Artificial Sequence
  derived and/or modified sequence
atggccctgctggtgcgggtgctgaggaaccagaccagcatcagccagtgggtgcctgtgtgcagccgcctcatccctgtgagccccacccagggccagggcgaccgggccctgagcaggaccagccagtggccccagatgagccagagccgggcctgtggcggcagcgagcagatccctggcatcgacatccagctgaacaggaagtaccacaccacccccatcctgggctatgatgagggcatcctgagtgatgaccacggcctggccgccgccctgtggaggaccttcttcaacagaaaatgtgaggaccccaggcacctggagctgctggtggagtatgtgaggaagcagatccagtacctggacagcatgaatggagaggacctgctgctgactggagaggtgtcctggaggcccctggtggagaagaacccccagagcatcctgaagccccacagccccacctacaatgatgagggcctgtag

SEQ ID NO: 321709 - DNA, 435 bp, Artificial Sequence
  derived and/or modified sequence
atgtgcctggtgaggatgaagcaggagggccgcagcggcaagtacatgtgccgcatcatcgtgcacttcatgtgggaggatgtgcagcagaggggccgggtgatgggcgtgaacccctacatcctgaagaagaacatgatcctgatgaccaaccacttctatgctgccatcctgggctatgatgagggcatcctgagtgatgaccacggcctggccgccgccctgtggaggaccttcttcaacagaaaatgtgaggaccccaggcacctggagctgctggtggagtatgtgaggaagcagatccagtacctggacagcatgaatggagaggacctgctgctgactggagaggtgtcctggaggcccctggtggagaagaacccccagagcatcctgaagccccacagccccacctacaatgatgagggcctgtag

SEQ ID NO: 321710 - DNA, 564 bp, Artificial Sequence
  derived and/or modified sequence
atgcagcccatcgacacctgcgtgagctacccccggaccggcggccagggatccgtgtcccactttcccggctgccaaatgcccgatacctttaactcatggtttctgattaccctcctacatgtgtggatgtgcctcgtgcggatgaagcaggaaggcagatctgggaagtatatgtgtcgaattattgtacacttcatgtgggaggatgtccaacagcggggacgcgtgatgggcgttaacccttatatccttaaaaagaatatgatcctcatgaccaaccatttctatgcagctatcctgggatacgacgagggaatcctctccgacgatcatggactggcagctgccctgtggcgcactttctttaatagaaagtgcgaagatccccggcacttagagctactggtagaatatgtgagaaaacagattcagtatctagatagtatgaatggagaagatctcctgctaacgggcgaagtgagctggaggccgctcgtcgaaaaaaaccctcagagtatccttaaaccacatagccctacatacaatgatgagggtctctag

SEQ ID NO: 321711 - DNA, 489 bp, Artificial Sequence
  derived and/or modified sequence
atggccctgctggtgcgggtgctgcggaaccagaccagcatcagccagtgggtgccagtatgcagcagattgatcccagtgtctccgacccagggccaaggagacagggcgctgagccgcacttcccagtggccccagatgagccagagcagagcatgtggaggatctgagcaaatccccggcattgatattcagctgaataggaagtaccataccactccaatcctaggctacgatgagggtatcctctcagatgaccatggtctggctgcagcactttggagaactttctttaaccgcaagtgcgaggacccccgtcacctggagcttctggtagagtatgtgcgaaagcaaatccagtatctcgactctatgaatggagaagatctgctgttgaccggtgaagtttcatggcgaccactagtggaaaagaacccccagtcaattttaaaaccccactcgccaacatacaatgacgagggactctag

SEQ ID NO: 321712 - DNA, 435 bp, Artificial Sequence
  derived and/or modified sequence
atgtgcctggtgcggatgaagcaggagggccggagcggcaagtacatgtgtcgaattatcgtccattttatgtgggaggatgtgcagcaaagaggaagggtaatgggtgttaatccttacattttgaaaaaaaatatgattctgatgactaatcacttctatgcagcgatcctcgggtatgatgaggggattctgtccgatgatcacggactggcagctgccctgtggcgaacctttttcaacagaaagtgtgaggatcctaggcacctagaattattagtcgagtacgtcaggaaacaaatacagtacttggactccatgaacggcgaggacctcttgctgaccggcgaagtcagttggcgacctctcgtggagaagaatccccagtccattctgaagccacactcccctacctacaacgacgaaggactctag

SEQ ID NO: 321713 - DNA, 564 bp, Artificial Sequence
  derived and/or modified sequence
atgcagcctatcgatacctgcgtcagttaccctagaacgggaggtcaagggtctgtcagtcatttccctggctgccaaatgcccgacacctttaattcatggtttctgattaccctgctccacgtgtggatgtgcctggtaagaatgaaacaggagggaaggtccggtaagtatatgtgtcgcattatcgtgcacttcatgtgggaagatgtgcaacaacgaggacgggtcatgggggtcaacccctacattctaaagaaaaatatgatcctaatgacaaaccacttctatgcagctattcttggttatgatgaaggcatcttatcggatgaccacgggttggctgctgctctgtggcgcaccttctttaaccgaaaatgtgaagaccctagacacctcgaactgctagtggaatatgttagaaaacagatacagtacctcgactcaatgaacggcgaggatctcttgttaaccggggaggtctcatggcgccctctcgtagagaaaaaccctcagagtattctaaagcctcactctccaacttacaacgacgaaggtctgtag

SEQ ID NO: 321714 - DNA, 489 bp, Artificial Sequence
  derived and/or modified sequence
atggcactgctcgtgcgagtgctccgcaatcagaccagtatcagtcaatgggtgcctgtctgttcaaggttgatcccggtatcccctacgcagggtcaaggggaccgggctttatccagaaccagccaatggcctcagatgagccagtcgcgggcttgcggcggatcggaacaaattcctggcatcgacatacagctcaacaggaagtatcacacaacgcccatactcgggtatgacgaaggaatcttgtctgacgaccatgggctggctgccgctttgtggcgcactttttttaacaggaaatgcgaagatcctcgtcacctggaactgctggtggaatatgtgcggaagcagatccagtatctggatagcatgaacggggaagatctgctattgaccggagaggtctcttggcgaccactggtggaaaaaaatccccaatcaattctaaaaccacattcccctacctataatgatgaggggctttag

SEQ ID NO: 321715 - DNA, 435 bp, Artificial Sequence
  derived and/or modified sequence
atgtgcttagtgagaatgaaacaagagggacggagcggtaagtacatgtgccggatcatcgtgcatttcatgtgggaagacgtccagcagagaggcagggtcatgggcgttaacccatacatactgaagaagaatatgatcctaatgaccaatcatttttacgctgccatcctgggctacgatgaggggatcctgagcgacgatcacgggctcgccgctgccttatggcgaacattctttaacaggaaatgtgaggaccctcggcacctggagctcctcgttgagtacgtaagaaagcagatccagtacttagattccatgaacggcgaagatcttctgctcaccggcgaggtgtcctggagacctttagtggagaagaacccacaatctatcttaaagccccactcacccacatataacgacgagggactctag

SEQ ID NO: 321716 - DNA, 1988 bp, Artificial Sequence
  derived and/or modified sequence
attgaggaacatggcgttgctggtgcgagtccttaggaaccagactagcatttctcagtgggttccagtatgcagccgattgatacctgtgtctcctacccaaggacagggggacagggctctgtctcgcacttcccagggtgtcagatgcctgatacattcaattcatggtttcttataaccctactccacgtctggatgtgtctagtccgaatgaagcaggaaggccggagtgggaagtacatgtgtcgtatcatagttcattttatgtgggaggatgttcagcagcgcggcagagtcatgggggttaatccctatatcctgaagaagaacatgatcctcatgacaaatcatttctatgcagcgatcttgggatatgatgaggggatcctttcagatgatcatgggctggccgctgccctctggagaaccttcttcaaccggaaatgtgaagaccctcgacatcttgaattgctggtagagtatgtgaggaaacagatacagtacctggactccatgaacggggaggatctgcttctgacaggggaggtgagctggcgccctctagtggagaagaatcctcagagcatcctgaagccccattctccgacttacaacgacgagggactttgatgggctgggccctccgcacggcccgccagctggcttcgaggaacctccaggagagaagtgcctgttggtccaggaccctgcagaaagtggcctgaactgacctctgaacagcatctgtcaaatacctggccccatttgtgttgagtttcctcttagtgtgcccaggagtctgatctgctggggtacagggctgggagaacccctagctctcccggggtgtcctctcccttaggggaagccccgagtgagagtcccccagcacacactccccaaccccctccagcaactacatgtgactgatagcttttcccaaaggccaaggaagggatggtgtaggttcaaaagggaaaccccccagggcctgctgtggcctaggagcagattgtaatgctgccgagtccggtcggtgaccacgcgttgtccctcggctttcagccatggggttgagttggccattaaaagaaacagagacttctctctgccatggcccttctttattccagggacttagaaacttgcctgagatggtggacgcagtaatgagggcaccgcgcagctcagttagagacggagaaagggaagaggctgggatggtctctgctgctcttgcctctagttcatggagatgtgtctctgttcaggccaagatacagccagccaggcctgtcgtctgggacccaggaggcctctgatgaccaagggctttcacatcctaagtcatttggaaggaggccttgagaacaaagtcacctttgtcactcccagtgaactgaatgaggaacatgctgtctcctgtcttggcctcccctttcatgagatactggggagaagagaacattcctcctggcttagttgtagcagacccagacctgtgcccagctttggtcccccttcccaacttctgaagcacgtgctgcagagccaccttggtctgagcacctgaggaccagcccctcctccctcagtgcgggtcatctcttgggggattttcttaaagtgaagaaagggggtggggaaccatattgcccctccctcccccatcaaacttccttcatttaacttgctataaaatgagtcatataaagaaactctatatgggtgaggtatatcccacttctgtgaaaacattacaaatcaaaccgcttctctcagtttatttaagatgcttttgttgcgagcggagctctagagtgaagcctcctgtgtgtgtgtgagataataacaccttgtaactcattacagctgggcactatttacataaaccagagctgagccaggcaggaatttgctgattaatttatttttaatggagtgaagtataccatgcaccaaaataaactttactgtgtgtacct

SEQ ID NO: 321717 - DNA, 1239 bp, Artificial Sequence
  derived and/or modified sequence
attgaggaacatggcgttgctggtgcgagtccttaggaaccagactagcatttctcagtgggttccagtatgcagccgattgatacctgtgtctcctacccaaggacagggggacagggctctgtctcgcacttcccagtggccccagatgagccagtcccgagcatgtggtggatcagaacagattcctggaatagacatacagctgaataggaagtatcacaccacaccgatcttgggatatgatgaggggatcctttcagatgatcatgggctggccgctgccctctggagaaccttcttcaaccggaaatgtgaagaccctcgacatcttgaattgctggtagagtatgtgaggaaacagatacagtacctggactccatgaacggggaggatctgcttctgacaggggaggtgagctggcgccctctagtggagaagaatcctcagagcatcctgaagccccattctccgacttacaacgacgagggactttgatgggctgggccctccgcacggcccgccagctggcttcgaggaacctccaggagagaagtgcctgttggtccaggaccctgcagaaagtggcctgaactgacctctgaacagcatctgtcaaatacctggccccatttgtgttgagtttcctcttagtgtgcccaggagtctgatctgctggggtacagggctgggagaacccctagctctcccggggtgtcctctcccttaggggaagccccgagtgagagtcccccagcacacactccccaaccccctccagcaactacatgtgactgatagcttttcccaaaggccaaggaagggatggtgtaggttcaaaagggaaaccccccagggcctgctgtggcctaggagcagattgtaatgctgccgagtccggtcggtgaccacgcgttgtccctcggctttcagccatggggttgagttggccattaaaagaaacagagacttctctctgccatggcccttctttattccagggacttagaaacttgcctgagatggtggacgcagtaatgagggcaccgcgcagctcagttagagacggagaaagggaagaggctgggatggtctctgctgctcttgcctctagttcatggagatgtgtctctgttcaggccaagatacagccagccaggcctgtcgtctgggacccaggaggcctctgatgaccaagggctttcacatcctaagtcatttggaaggaggccttgaga

SEQ ID NO: 321718 - DNA, 1055 bp, Artificial Sequence
  derived and/or modified sequence
acccggaaatggttattgaggaacatggcgttgctggtgcgagtccttgatgtgtctagtccgaatgaagcaggaaggccggagtgggaagtacatgtgtcgtatcatagttcattttatgtgggaggatgttcagcagcgcggcagagtcatgggggttaatccctatatcctgaagaagaacatgatcctcatgacaaatcatttctatgcagcgatcttgggatatgatgaggggatcctttcagatgatcatgggctggccgctgccctctggagaaccttcttcaaccggaaatgtgaagaccctcgacatcttgaattgctggtagagtatgtgaggaaacagatacagtacctggactccatgaacggggaggatctgcttctgacaggggaggtgagctggcgccctctagtggagaagaatcctcagagcatcctgaagccccattctccgacttacaacgacgagggactttgatgggctgggccctccgcacggcccgccagctggcttcgaggaacctccaggagagaagtgcctgttggtccaggaccctgcagaaagtggcctgaactgacctctgaacagcatctgtcaaatacctggccccatttgtgttgagtttcctcttagtgtgcccaggagtctgatctgctggggtacagggctgggagaacccctagctctcccggggtgtcctctcccttaggggaagccccgagtgagagtcccccagcacacactccccaaccccctccagcaactacatgtgactgatagcttttcccaaaggccaaggaagggatggtgtaggttcaaaagggaaaccccccagggcctgctgtggcctaggagcagattgtaatgctgccgagtccggtcggtgaccacgcgttgtccctcggctttcagccatggggttgagttggccattaaaagaaacagagacttctctctgccatggcccttctttattccagggacttagaaacttgcctgagatggtggacgcagtaatgagggcaccgcgcagctcagttagagacgg

SEQ ID NO: 321719 - protein, 203 aa, Artificial Sequence
  derived and/or modified sequence
MQRTGGGAPRPGRNHGLPGSLRQPDPVALLMLLVDADQPEPMRSGARELALFLTPEPGAEAKEVEETIEGMLLRLEEFCSLADLIRSDTSQILEENIPVLKAKLTEMRGIYAKVDRLEAFVKMVGHHVAFLEADVLQAERDHGAFPQALRRWLGSAGLPSFRNKSPAPVPVTYELPTLYRTEDYFPVDAGEAQHHPRTCPRPL

SEQ ID NO: 321720 - DNA, 612 bp, Artificial Sequence
  derived and/or modified sequence
atgcagaggacaggcggaggtgcccctcgacccggcagaaatcatgggctgcccggatccctcagacagccggatcccgtggccctgctaatgctgcttgtggacgccgaccagcctgagcccatgcgcagtggggctagagagctcgccctgttcctgacccctgagcccggggctgaagctaaagaagtggaggagactatcgagggcatgcttttacggcttgaagagttctgcagtctggctgatctgatcagaagcgatacctcacaaatcttggaggaaaatatccctgttctcaaagcaaaactgaccgagatgaggggaatatatgcgaaagtggacagactcgaggcttttgtgaaaatggttggacatcatgtggcctttctagaagctgacgtcctgcaggccgagagagatcacggcgccttcccacaggcattgcgacggtggctcggctctgctggtctgcctagttttcgtaataagtcccctgcccctgtgcctgtgacctatgaattgccaactctataccggacagaggattatttccctgtcgatgccggcgaggcccaacaccacccgcgaacctgccctagacctctctag

SEQ ID NO: 321721 - DNA, 612 bp, Artificial Sequence
  derived and/or modified sequence
atgcagaggactggaggaggagcccccaggcctggaagaaatcatggcctgcccggcagcctgcggcagcctgaccctgtggccctgctgatgctgctggtggatgctgaccagcctgagcccatgaggtctggggcccgggagctggccctcttcctgaccccagagcctggagctgaggccaaggaggtggaggagaccatcgagggcatgctgctgcggctggaggagttctgcagcctggccgacctgatccgcagtgacaccagccagatcctggaggagaacatccctgtgctgaaggccaagctgacagagatgaggggcatctatgccaaggtggaccggctggaggcctttgtgaagatggtgggccaccacgtggccttcctggaggctgatgtgctgcaggccgagcgggaccacggggccttcccccaggccctgcggcgctggctgggcagcgctggcctgcccagcttcaggaacaagagccctgcccctgtgcctgtgacctatgagctgcccaccctgtacagaacagaggactacttccctgtggatgctggggaggcccagcaccaccccaggacctgcccccggcccctgtag

SEQ ID NO: 321722 - DNA, 612 bp, Artificial Sequence
  derived and/or modified sequence
atgcagcggaccggcggcggcgccccccggcccggccggaaccacggcctgccagggtcgctgcgacagccagaccccgtcgctctcctcatgttacttgtggacgccgatcaaccggaaccaatgcgctcaggtgcacgcgaacttgcactgtttctgaccccggagcccggcgccgaagccaaggaggtcgaggagaccattgaaggtatgctcctgagattggaagaattctgtagcctggccgacttaattagaagcgacacaagtcagattctcgaagaaaatatccctgtgctgaaagcaaagctgacggagatgcggggcatctatgcgaaggtggaccgtctggaagcgttcgtcaaaatggtagggcaccatgtcgccttcctagaagccgacgtcctccaggcagagcgcgaccacggagcattccctcaggccctgcggagatggttgggcagcgcgggattaccatcttttcggaataagtctcctgcgccagttcctgtgacatacgaactccccactctgtaccggacagaagattattttcccgtggacgcaggcgaggcccagcaccacccaaggacctgccccaggccactctag

SEQ ID NO: 321723 - DNA, 612 bp, Artificial Sequence
  derived and/or modified sequence
atgcagcggaccggcggaggcgctccgcgacccggacggaaccatgggctacctggatcactgagacagccagatccagtggcgttactgatgctgttggtggacgccgatcagcccgaaccaatgaggtcaggcgctagggaactggccctgttcctgacacctgaaccgggtgccgaggccaaggaggtggaagaaacaattgaaggcatgctcttgaggttggaggaattttgttcccttgccgacctgattcgatcagatacttcacaaattttggaggaaaatatcccagttctgaaagccaaactaactgaaatgcggggaatatacgcgaaggtcgaccgtctcgaggcatttgtgaaaatggtcggccatcatgttgctttcctggaggctgacgtgctccaggccgaaagagaccacggagctttcccccaggcccttagaagatggttagggagcgccggactgccaagctttcggaacaagagcccagcccctgtgcctgtgacctatgagctccctactttgtaccgcactgaagattatttcccggtggacgccggtgaagctcagcatcaccccagaacatgccctcggcctctatag

SEQ ID NO: 321724 - DNA, 1181 bp, Artificial Sequence
  derived and/or modified sequence
atgcagcggaccgggggcggggctccgaggcccgggcgcaaccacgggctcccaggcagcctccgccagccggaccccgtcgccctcctgatgctgctcgtggacgctgatcagccggagcccatgcgcagcggggcgcgcgagctcgcgctcttcctgacccccgagcctggggccgaggcgaaggaggtggaggagaccatcgagggcatgctcctcaggctggaagagttttgcagcctggctgacctgatcaggagtgatacttcacagatcctggaggaaaacatcccagtccttaaggccaaactgacagaaatgcgtggcatctatgccaaagtggaccggctagaggccttcgtcaagatggttggacaccacgtcgccttcctggaagcagacgtgcttcaggctgagcgggaccatggggccttccctcaggccctgcggaggtggctgggatccgcagggctcccctccttcaggaacaagtcacctgcaccggtgcccgtgacgtacgagctgcccacactgtataggacggaggactattttcctgtggacgccggggaagcacagcaccacccccgcacctgccctcggcctttgtgagctttgtggtcttcccatcaggaacgctggaaagtgacattgtgtacacactgcagcttgggggttttttctttgtattgctgtttattttatattttaaaaatatttaaaaaaatgtcgagatggggtctcactatgttgtccagactgatctcaaactcctgggctcaagtgatccacccaccttggccttccaaagtggtgggattatgggcaggagcctccgtgcccaggctgctgccattttcaaatttcctccctgcctcatgtgagaccacagggtttggagaagcagttggaacccacgtgtggtgatgcctcccacatcggcctgcttggggttctacaggggttgagggaccaggcctggccggggctgatggacagtggggactttccttctctccatgatggctttgcaggggctccatggtccttctctctgtgatgggtttttgcacggggtgtgctctgccactgtggtgggtgggtggatgctgcttctgttgcctccagacctcggtgcccacagccttgaggatccttccaataaaggtgtcaagagctca

SEQ ID NO: 321725 - DNA, 612 bp, Artificial Sequence
  derived and/or modified sequence
atgcagagaaccggcggcggcgcccccagacccggcagaaaccacggcctgcccggcagcctgagacagcccgaccccgtggccctgctgatgctgctggtggacgccgaccagcccgagcccatgagaagcggcgccagagagctggccctgttcctgacccccgagcccggcgccgaggccaaggaggtggaggagaccatcgagggcatgctgctgagactggaggagttctgcagcctggccgacctgatcagaagcgacaccagccagatcctggaggagaacatccccgtgctgaaggccaagctgaccgagatgagaggcatctacgccaaggtggacagactggaggccttcgtgaagatggtgggccaccacgtggccttcctggaggccgacgtgctgcaggccgagagagaccacggcgccttcccccaggccctgagaagatggctgggcagcgccggcctgcccagcttcagaaacaagagccccgcccccgtgcccgtgacctacgagctgcccaccctgtacagaaccgaggactacttccccgtggacgccggcgaggcccagcaccaccccagaacctgccccagacccctgtag

SEQ ID NO: 321726 - DNA, 159 bp, Artificial Sequence
  derived and/or modified sequence
atgaagctgtgcgtgacggtcctgagccttttagtcctcgtggccgcattctgcagtttggccctcagcgctcctaattctaaacctaaggaggcctcaaaatctgcccttaccccggtgtctccgggttcacgctccacctgcatgacttggaattag

SEQ ID NO: 321727 - DNA, 3479 bp, Artificial Sequence
  derived and/or modified sequence
aggctcttccgggtgagggtcctgcagcccgtgaatccctggtcccgccgagacttggacctggtgcgaactggaggcgaagcgggtgcacccacaacctataggaagggctggcggcgagctctgagcactcgggcgtcggagggaacggtggggccgggcggagcgggcctcgggtctgcggagggtggacgcgcgctctccctgtctttggagggagggtttcctgtggtcgggaggcgaggcagccagggcaggattgggctcctgacctgcaggccacgggcgagctctctctagggccctgatttgcccgaagaaggcgcttggtgaaggtgaaaggtttacgcatccaagtagctagaacctctttccagaacttctgctgatgcacttagtcttgcagccattgattattatagctcagcaaagttcagttcaactttcggaagaaggatgtgagctggaatgggcagggtcaagatttgacaggaaaagacacttcactggaggtatctgcgagagtcctgggttggagggaaggagtactggttataaataaggaaatgatgtcttcatcacttcctaaacacatacatgtcattccctaccatctccaccctctgtttattcagagctgcaccaaccatgttcatcacctcacctgggatttactgagtttaccccttacagagctacacgataggggtaaaggaaagactaaaaaccaatttatcttatattaaaattacgacttagtaaatatttttttcagtaatgcagtttgctagtgacagatccaataactgaattctggtcctttgagtaccaggtcagggcttttgtcatctaccacatttacgttacctaccacaagaagtttcttagtaaaaggtcctcttgtgaaactgcagctaagggaaaccaaactgtcaaaaagacaaacaccttaaagcactttcattcattctctctggattctgtcatctcaagtggctaaacacattagtaggaaaacagctctgctttcaacactcttggccctttctcaagagaacatgaaaatgaaaaaatttcagagatggggttttgccgtgttgcccagactgatcttgagcttctgagctccagcgatcagcctacctcaacctctcagagtgctgggattataggtgtgcgccaccacacctggccatgtgtgttttcttacatctcctttcttacataaaagataccagtttcattccaggacctgactgtgaacttcacccaagaggaatggcagcaactggaccctgctcagaggctcctgtacagggatgtgatgctggagaactacagcaacttggtctctgtggggtatcatgttagcaaaccagatgtgattttcaaattggagcaaggagaagagccatggatagtggaggaattctcaaatcagaactacccagacattgatgatgccttagagaagaacaaggaaatccaagataaacatttgacacaaactgtattcttcagcaacaaaacactgattacagaaagagagaatgtatttgggaaaacacttaatctgggcatgaatagtgttccctcaagaaaaatgccctataaatgtaatccaggaggaaacagtttgaaaactaattcagaagtaattgttgcaaagaaaagcaaagaaaacagaaagattcctgatggatacagtggatttgggaagcatgagaaaagtcatttgggaatgaaaaaatacagatacaatccaatgaggaaagccagcaatcaaaacgaaaatcttattctgcaccagaacattcagattttgaaacaaccgtttgactataataaatgtgggaaaaccttcttcaagagggcaattctcattacacaaaaggggagacagactgaaaggaaaccaaatgaatgtaatgaatgtaggaaaaccttttctaagagatctaccctcattgtacatcagagaattcatacaggggagaaaccgtatgtttgtagtgattgtaggaaaacttttcgtgtgaagacaagcctcactcgacaccgaagaattcatactggagagagaccctatgaatgcagtgaatgcaggaaaaccttcattgacaaatctgcccttattgtacaccagaaaattcatggaggggagaaatcctatgagtgtaatgaatgtggaaagaccttttttcggaagtcagccctggctgaacatttcaggtcacacacaggggagaagccttacgaatgcaaggaatgtggaaatgccttcagcaagaaatcgtatcttgttgtacatcaaagaactcacagaggagagaagccaaatgaatgtaaggaatgtgggaaaaccttcttctgtcagtcagcccttactgcgcatcagagaattcacacaggggaaaaaccctatgaatgtagtgaatgtgagaaaaccttcttttgtcaatctgccctcaatgtgcatcgaagaagtcatacaggagagaagccctatgaatgcagtcaatgtggaaaatttttatgtacgaaatcagccctcattgcacatcagataactcatagaggaaagaagtcttatgaatgtaatgaatgtgggaaatttttctgccataagtcaacactcactatacatcagagaacacacacaggagagaaacatggtgtgtttaataaatgtggtagaatctccattgtgaagtcaaactgcagtcagtgtaagagaatgaacacaaaggagaatctttatgagtgtagtgaacatgggcatgccgtcagcaaaaactcacacctcattgtacatcagagaactatatgggagagaccatatgaatgcaatgaatgtgggagaacctactgcaggaagtcagccctgactcaccatcagagaacacacacaggacagagaccctatgagtgtaatgaatgtgggaaaaccttctgtcagaagttctcctttgttgaacatcagcgaactcacactggggagaaaccatatgaatgtaatgaatgtgggaaatccttctgccataagtcagccttcagagtccatagaagaattcacacaggagagaaaccatatgaatgtaatcaatgtgggaaaacctaccgtcgcctgtggactctcactgaacatcagaaaatacacacaggagagaaaccttatgaatgtaacaaatgtgagaaaacatttcgccacaaatcaaactttcttttacatcagaaatcccacaaggaataagttccaacaaagtaataaattccaacaaagcaacaaatcaaataacttacacaatgctaaactgtgagtatgtatagaggagtaaaatcttataaatgtaatgaatatggaaaatttttctgccataagtcaaccctcaatgtaacatcagagaaatcatgtaggaaagaaataatttgtttaataaatgtattattcattgtgaactatgaaaatattcaacagc

SEQ ID NO: 321728 - protein, 680 aa, Artificial Sequence
  derived and/or modified sequence
MKMKKFQIPVSFQDLTVNFTQEEWQQLDPAQRLLYRDVMLENYSNLVSVGYHVSKPDVIFKLEQGEEPWIVEEFSNQNYPDIDDALEKNKEIQDKHLTQTVFFSNKTLITERENVFGKTLNLGMNSVPSRKMPYKCNPGGNSLKTNSEVIVAKKSKENRKIPDGYSGFGKHEKSHLGMKKYRYNPMRKASNQNENLILHQNIQILKQPFDYNKCGKTFFKRAILITQKGRQTERKPNECNECRKTFSKRSTLIVHQRIHTGEKPYVCSDCRKTFRVKTSLTRHRRIHTGERPYECSECRKTFIDKSALIVHQKIHGGEKSYECNECGKTFFRKSALAEHFRSHTGEKPYECKECGNAFSKKSYLVVHQRTHRGEKPNECKECGKTFFCQSALTAHQRIHTGEKPYECSECEKTFFCQSALNVHRRSHTGEKPYECSQCGKFLCTKSALIAHQITHRGKKSYECNECGKFFCHKSTLTIHQRTHTGEKHGVFNKCGRISIVKSNCSQCKRMNTKENLYECSEHGHAVSKNSHLIVHQRTIWERPYECNECGRTYCRKSALTHHQRTHTGQRPYECNECGKTFCQKFSFVEHQRTHTGEKPYECNECGKSFCHKSAFRVHRRIHTGEKPYECNQCGKTYRRLWTLTEHQKIHTGEKPYECNKCEKTFRHKSNFLLHQKSHKE

SEQ ID NO: 321729 - protein, 642 aa, Artificial Sequence
  derived and/or modified sequence
MLENYSNLVSVGYHVSKPDVIFKLEQGEEPWIVEEFSNQNYPDIDDALEKNKEIQDKHLTQTVFFSNKTLITERENVFGKTLNLGMNSVPSRKMPYKCNPGGNSLKTNSEVIVAKKSKENRKIPDGYSGFGKHEKSHLGMKKYRYNPMRKASNQNENLILHQNIQILKQPFDYNKCGKTFFKRAILITQKGRQTERKPNECNECRKTFSKRSTLIVHQRIHTGEKPYVCSDCRKTFRVKTSLTRHRRIHTGERPYECSECRKTFIDKSALIVHQKIHGGEKSYECNECGKTFFRKSALAEHFRSHTGEKPYECKECGNAFSKKSYLVVHQRTHRGEKPNECKECGKTFFCQSALTAHQRIHTGEKPYECSECEKTFFCQSALNVHRRSHTGEKPYECSQCGKFLCTKSALIAHQITHRGKKSYECNECGKFFCHKSTLTIHQRTHTGEKHGVFNKCGRISIVKSNCSQCKRMNTKENLYECSEHGHAVSKNSHLIVHQRTIWERPYECNECGRTYCRKSALTHHQRTHTGQRPYECNECGKTFCQKFSFVEHQRTHTGEKPYECNECGKSFCHKSAFRVHRRIHTGEKPYECNQCGKTYRRLWTLTEHQKIHTGEKPYECNKCEKTFRHKSNFLLHQKSHKE

SEQ ID NO: 321730 - DNA, 2467 bp, Artificial Sequence
  derived and/or modified sequence
tcttccgggtgagggtcctgcagcccgtgaatccctggtcccgccgagacttggacctggtgcgaactggaggcgaagcgggtgcacccacaacctataggaagggctggcggcgagctctgagcactcgggcgtcggagggaacgctctgctttcaacactcttggccctttctcaagagaacatgaaaatgaaaaaatttcagataccagtttcattccaggacctgactgtgaacttcacccaagaggaatggcagcaactggaccctgctcagaggctcctgtacagggatgtgatgctggagaactacagcaacttggtctctgtggggtatcatgttagcaaaccagatgtgattttcaaattggagcaaggagaagagccatggatagtggaggaattctcaaatcagaactacccagacattgatgatgccttagagaagaacaaggaaatccaagataaacatttgacacaaactgtattcttcagcaacaaaacactgattacagaaagagagaatgtatttgggaaaacacttaatctgggcatgaatagtgttccctcaagaaaaatgccctataaatgtaatccaggaggaaacagtttgaaaactaattcagaagtaattgttgcaaagaaaagcaaagaaaacagaaagattcctgatggatacagtggatttgggaagcatgagaaaagtcatttgggaatgaaaaaatacagatacaatccaatgaggaaagccagcaatcaaaacgaaaatcttattctgcaccagaacattcagattttgaaacaaccgtttgactataataaatgtgggaaaaccttcttcaagagggcaattctcattacacaaaaggggagacagactgaaaggaaaccaaatgaatgtaatgaatgtaggaaaaccttttctaagagatctaccctcattgtacatcagagaattcatacaggggagaaaccgtatgtttgtagtgattgtaggaaaacttttcgtgtgaagacaagcctcactcgacaccgaagaattcatactggagagagaccctatgaatgcagtgaatgcaggaaaaccttcattgacaaatctgcccttattgtacaccagaaaattcatggaggggagaaatcctatgagtgtaatgaatgtggaaagaccttttttcggaagtcagccctggctgaacatttcaggtcacacacaggggagaagccttacgaatgcaaggaatgtggaaatgccttcagcaagaaatcgtatcttgttgtacatcaaagaactcacagaggagagaagccaaatgaatgtaaggaatgtgggaaaaccttcttctgtcagtcagcccttactgcgcatcagagaattcacacaggggaaaaaccctatgaatgtagtgaatgtgagaaaaccttcttttgtcaatctgccctcaatgtgcatcgaagaagtcatacaggagagaagccctatgaatgcagtcaatgtggaaaatttttatgtacgaaatcagccctcattgcacatcagataactcatagaggaaagaagtcttatgaatgtaatgaatgtgggaaatttttctgccataagtcaacactcactatacatcagagaacacacacaggagagaaacatggtgtgtttaataaatgtggtagaatctccattgtgaagtcaaactgcagtcagtgtaagagaatgaacacaaaggagaatctttatgagtgtagtgaacatgggcatgccgtcagcaaaaactcacacctcattgtacatcagagaactatatgggagagaccatatgaatgcaatgaatgtgggagaacctactgcaggaagtcagccctgactcaccatcagagaacacacacaggacagagaccctatgagtgtaatgaatgtgggaaaaccttctgtcagaagttctcctttgttgaacatcagcgaactcacactggggagaaaccatatgaatgtaatgaatgtgggaaatccttctgccataagtcagccttcagagtccatagaagaattcacacaggagagaaaccatatgaatgtaatcaatgtgggaaaacctaccgtcgcctgtggactctcactgaacatcagaaaatacacacaggagagaaaccttatgaatgtaacaaatgtgagaaaacatttcgccacaaatcaaactttcttttacatcagaaatcccacaaggaataagttccaacaaagtaataaattccaacaaagcaacaaatcaaataacttacacaatgctaaactgtgagtatgtatagaggagtaaaatcttataaatgtaatgaatatggaaaatttttctgccataagtcaaccctcaatgtaacatcagagaaatcatgtaggaaagaaataatttgtttaataaatgtattattcattgtgaactatgaaaatattcaacagcaaaaaaaaaaaaaa

SEQ ID NO: 321731 - DNA, 2043 bp, Artificial Sequence
  derived and/or modified sequence
atgaagatgaagaagttccagatccccgtgagcttccaggacctgaccgtgaacttcacccaggaggagtggcagcagctggaccccgcccagagactgctgtacagagacgtgatgctggagaactacagcaacctggtgagcgtgggctaccacgtgagcaagcccgacgtgatcttcaagctggagcagggcgaggagccctggatcgtggaggagttcagcaaccagaactaccccgacatcgacgacgccctggagaagaacaaggagatccaggacaagcacctgacccagaccgtgttcttcagcaacaagaccctgatcaccgagagagagaacgtgttcggcaagaccctgaacctgggcatgaacagcgtgcccagcagaaagatgccctacaagtgcaaccccggcggcaacagcctgaagaccaacagcgaggtgatcgtggccaagaagagcaaggagaacagaaagatccccgacggctacagcggcttcggcaagcacgagaagagccacctgggcatgaagaagtacagatacaaccccatgagaaaggccagcaaccagaacgagaacctgatcctgcaccagaacatccagatcctgaagcagcccttcgactacaacaagtgcggcaagaccttcttcaagagagccatcctgatcacccagaagggcagacagaccgagagaaagcccaacgagtgcaacgagtgcagaaagaccttcagcaagagaagcaccctgatcgtgcaccagagaatccacaccggcgagaagccctacgtgtgcagcgactgcagaaagaccttcagagtgaagaccagcctgaccagacacagaagaatccacaccggcgagagaccctacgagtgcagcgagtgcagaaagaccttcatcgacaagagcgccctgatcgtgcaccagaagatccacggcggcgagaagagctacgagtgcaacgagtgcggcaagaccttcttcagaaagagcgccctggccgagcacttcagaagccacaccggcgagaagccctacgagtgcaaggagtgcggcaacgccttcagcaagaagagctacctggtggtgcaccagagaacccacagaggcgagaagcccaacgagtgcaaggagtgcggcaagaccttcttctgccagagcgccctgaccgcccaccagagaatccacaccggcgagaagccctacgagtgcagcgagtgcgagaagaccttcttctgccagagcgccctgaacgtgcacagaagaagccacaccggcgagaagccctacgagtgcagccagtgcggcaagttcctgtgcaccaagagcgccctgatcgcccaccagatcacccacagaggcaagaagagctacgagtgcaacgagtgcggcaagttcttctgccacaagagcaccctgaccatccaccagagaacccacaccggcgagaagcacggcgtgttcaacaagtgcggcagaatcagcatcgtgaagagcaactgcagccagtgcaagagaatgaacaccaaggagaacctgtacgagtgcagcgagcacggccacgccgtgagcaagaacagccacctgatcgtgcaccagagaaccatctgggagagaccctacgagtgcaacgagtgcggcagaacctactgcagaaagagcgccctgacccaccaccagagaacccacaccggccagagaccctacgagtgcaacgagtgcggcaagaccttctgccagaagttcagcttcgtggagcaccagagaacccacaccggcgagaagccctacgagtgcaacgagtgcggcaagagcttctgccacaagagcgccttcagagtgcacagaagaatccacaccggcgagaagccctacgagtgcaaccagtgcggcaagacctacagaagactgtggaccctgaccgagcaccagaagatccacaccggcgagaagccctacgagtgcaacaagtgcgagaagaccttcagacacaagagcaacttcctgctgcaccagaagagccacaaggagtag

SEQ ID NO: 321732 - DNA, 2043 bp, Artificial Sequence
  derived and/or modified sequence
atgaagatgaaaaagttccaaatccctgtctcttttcaggatctgacagtgaactttactcaggaggagtggcagcagctggaccccgctcagcggctgctgtaccgcgacgtgatgcttgagaactactcgaatcttgtgagtgtgggctatcatgtcagcaagccagacgtcatatttaagcttgaacagggcgaggaaccatggattgtggaggagttttctaaccaaaactatcctgacattgatgatgcacttgaaaagaataaagaaattcaggataagcacctaacacagacagtgttttttagtaataagactctgattaccgaacgggagaatgtctttggcaagaccttaaatctggggatgaacagcgtgccgagtaggaagatgccgtacaagtgcaaccccggcggcaactcactgaagacaaactcagaagtgattgtagcaaagaaatctaaggagaatagaaagatacctgatggctactctgggttcggaaagcatgagaaaagccaccttgggatgaagaagtatagatacaatcctatgaggaaggcctccaatcaaaacgaaaatctgatcctgcatcagaatattcagattctgaaacagccttttgattataataagtgcggaaaaacattcttcaagcgagcaatattaattactcagaaagggaggcagacagaacgtaagcccaacgaatgcaacgagtgtcgcaaaactttctccaagcggtccacactcatagtccatcagcgtatccacacaggcgaaaagccttatgtgtgttcagactgcaggaaaaccttccgagtgaagacctctctgaccaggcaccggcggattcataccggcgaaagaccctatgaatgcagcgaatgcagaaagacatttatagacaagtccgcccttatcgtacatcagaagatacatggcggcgaaaagtcgtacgagtgtaacgaatgcggcaaaacttttttcaggaagagcgccttggccgagcactttagatcgcacacaggcgagaaaccttacgaatgcaaagaatgcggcaatgctttcagcaagaaaagttacctcgttgtgcaccagcgcacgcacagaggcgagaaacccaacgaatgcaaggagtgcggcaagacctttttttgccaaagcgcattaaccgctcaccagcgaatccacaccggggagaaaccctacgaatgttctgaatgtgagaagacctttttctgccagtcagcattgaatgtgcacaggaggtcacatactggggaaaaaccctacgagtgtagccaatgcgggaagttcctgtgcaccaaatccgcgttaattgctcaccagatcactcatagagggaaaaaatcatacgaatgtaatgaatgtggtaagtttttttgtcataagagtaccctaactattcatcagagaacccataccggcgaaaagcacggggtattcaataaatgtggtcggatcagcatcgtgaaatcaaattgttcgcagtgtaaaaggatgaatactaaggagaacctgtacgaatgtagcgagcacgggcacgcagtctctaagaattcacaccttattgttcaccagaggaccatctgggagagaccatatgaatgcaacgaatgcggccgcacctactgtcggaaatctgctctgacccaccaccagaggacccacacgggacaacggccttacgaatgtaatgagtgtggcaagacattctgtcagaaattttccttcgtagaacaccagcggacacatactggcgagaagccctatgaatgcaatgagtgcgggaagagcttttgtcataaatcagccttcagagtacataggaggatacacacaggcgagaagccttacgagtgcaatcagtgcgggaaaacttataggcggctgtggaccctcaccgaacaccaaaagatccacacaggagagaagccgtacgagtgtaacaagtgcgagaagacattccgacacaagtcaaatttcctgttacaccagaagagccataaggagtag

SEQ ID NO: 321733 - DNA, 2043 bp, Artificial Sequence
  derived and/or modified sequence
atgaagatgaagaagttccagatccctgtgtccttccaggacctgactgtgaacttcacccaggaggagtggcagcagctggaccctgcccagaggctgctgtacagagatgtgatgctggagaactacagcaacctggtgtctgtgggctaccacgtgtccaagccagatgtgatcttcaagctggagcagggcgaggagccctggatcgtggaggagttcagcaaccagaactacccagacattgatgatgccctggagaagaacaaggagatccaggacaagcacctgacccagaccgtcttcttcagcaacaagaccctcatcacagaaagagaaaatgtgtttgggaagaccctgaacctgggcatgaacagcgtgcccagcaggaagatgccctacaagtgcaaccctgggggcaacagcctgaagaccaacagcgaggtgattgtggccaagaagagcaaagaaaataggaagatcccagatggctacagcggctttgggaagcatgagaagagccacctgggcatgaagaagtaccgctacaaccccatgaggaaggccagcaaccagaatgaaaacctgatcctgcaccagaacatccagatcctgaagcagccctttgactacaacaagtgtgggaagaccttcttcaagagggccatcctgatcacccagaagggccggcagacagagaggaagcccaatgaatgtaatgaatgtaggaagaccttcagcaagaggagcaccctgattgtgcaccagaggatccacactggagagaagccctacgtgtgcagcgactgcaggaagaccttccgggtgaagaccagcctgaccaggcaccggcgcatccacactggagagcggccctatgagtgcagtgaatgtaggaagaccttcatcgacaagagcgccctgattgtgcaccagaagatccatggaggagagaagagctatgagtgcaatgaatgtgggaagaccttcttcaggaagagcgccctggccgagcacttccgcagccacactggagagaagccctatgagtgcaaggaatgtggaaatgccttcagcaagaagagctacctggtggtgcaccagaggacccacagaggagagaagcccaatgaatgcaaggaatgtgggaagaccttcttctgccagagcgccctgacagcccaccagaggatccacactggagagaagccctatgagtgcagtgaatgtgagaagaccttcttctgccagagcgccctgaatgtgcaccggcgcagccacactggagagaagccctatgagtgcagccagtgtgggaagttcctgtgcaccaagagcgccctgattgcccaccagatcacccaccggggcaagaagagctatgagtgcaatgaatgtgggaagttcttctgccacaagagcaccctgaccatccaccagaggacccacactggagagaagcacggcgtcttcaacaagtgtggccgcatcagcatcgtgaagagcaactgcagccagtgcaagaggatgaacaccaaggagaacctgtatgagtgcagcgagcacggccatgctgtgtccaagaacagccacctgattgtgcaccagaggaccatctgggagcggccctatgaatgtaatgaatgtggccgcacctactgcaggaagagcgccctgacccaccaccagaggacccacacaggccagaggccctatgaatgtaatgaatgtgggaagaccttctgccagaagttctcctttgtggagcaccagaggacccacactggagagaagccctatgaatgtaatgaatgtgggaagagcttctgccacaagagcgccttccgggtgcaccggcgcatccacactggagagaagccctatgagtgcaaccagtgtgggaagacctaccgccgcctgtggaccctgacagagcaccagaagatccacactggagagaagccctatgagtgcaacaagtgtgagaagaccttccgccacaagagcaacttcctgctgcaccagaagagccacaaggagtag

SEQ ID NO: 321734 - DNA, 2043 bp, Artificial Sequence
  derived and/or modified sequence
atgaagatgaagaagttccagatccccgtgagcttccaggacctgaccgtcaatttcacccaagaagagtggcaacagcttgatcctgcccagcggctcctgtaccgggatgtcatgctggagaattacagcaatttagtcagcgtgggataccacgtctccaagcctgacgtgattttcaaattagaacagggagaggaaccatggatcgtagaagagttctccaatcagaactatccagacattgatgatgcccttgaaaagaacaaggagatccaggataagcacctgacacagactgtgttcttttctaacaaaacactaattaccgagcgtgagaatgtgttcggtaaaacccttaatctggggatgaattctgttcccagcaggaaaatgccatataagtgtaatcccggcggtaactctctgaagacaaactcggaagtcattgtggcgaagaaatcgaaagagaatcgaaagatccccgacggctactcgggatttgggaagcacgagaagtctcatttaggaatgaaaaaatatcgttacaaccctatgagaaaggcctccaaccagaatgagaatctcattcttcatcagaacattcagatcctgaagcagccattcgactataacaagtgcggaaagaccttcttcaagcgagccatcctgatcacccaaaagggcaggcagacagagcgcaagcccaatgagtgtaatgagtgccgcaaaacattttcaaagcgctcaactctgattgtccaccagcggattcatactggggagaagccctacgtatgctccgactgtcgaaagacattcagagtcaagacgagcttgacccggcataggcgaatccatacaggagagaggccatatgagtgctccgaatgccggaagaccttcatcgataagtctgccctgattgtgcatcagaagatccatggaggcgagaaaagctacgaatgtaatgaatgtggaaaaaccttcttcaggaagagtgcacttgcagagcactttagaagccataccggtgagaagccctatgaatgtaaagagtgcggtaatgccttttcgaagaaatcgtaccttgtggtccaccagcggactcatagaggggagaagcccaacgagtgcaaggaatgcggcaaaacattcttctgccaaagcgctctcacagctcaccaacgcatccacacaggggaaaagccctacgaatgctcagagtgcgagaagacctttttttgtcagagcgctttaaacgttcaccgtcggagccataccggggagaaaccctacgagtgttctcagtgcggcaagttcttgtgcacaaagtcagcgctgatagcccaccagattactcaccggggcaagaaatcctacgaatgcaacgaatgcgggaagtttttctgtcacaaatccacactgacaatccaccagaggacccacactggagaaaaacatggtgtgtttaacaaatgtgggagaattagcatagtgaaaagcaactgttcccaatgcaagagaatgaacaccaaggagaatctttacgaatgttctgaacatggccacgcagtctctaaaaattctcacctgatcgtacaccaacgaaccatttgggaaaggccttatgagtgcaacgaatgcggccgaacatactgcagaaagtctgccctaacgcaccatcaaagaactcataccggccagcgaccctacgagtgtaatgagtgcggcaagacattctgtcagaagttcagtttcgttgagcaccagcggactcacaccggagagaagccttacgaatgtaacgagtgcggcaagagtttttgtcacaagagcgcattccgcgtgcaccggcggatccacaccggggaaaagccttacgagtgtaaccagtgcgggaagacatatagacggttgtggactctgacggagcatcagaagattcacacaggagagaagccttacgagtgcaataagtgtgagaagacattccggcataagtcgaacttcctcttacatcagaaaagtcacaaggagtag

SEQ ID NO: 321735 - DNA, 2043 bp, Artificial Sequence
  derived and/or modified sequence
atgaagatgaagaaatttcagatcccggtttcctttcaggatctgacagtgaattttacacaggaggagtggcagcagctggaccccgctcagcgactgctgtatagagatgttatgcttgagaactactcaaacctggtttccgtcggctaccatgtgtccaaacccgatgtgatctttaaactggaacagggagaggaaccgtggatcgtggaggaattcagtaatcaaaactacccggacatcgatgacgctctcgaaaaaaacaaggaaattcaggataagcaccttacccaaacagtgttctttagtaacaagaccctgattacagagcgcgagaacgtatttggcaagactctcaatctggggatgaactcagtcccttcccgcaagatgccatacaaatgcaaccccggtggaaatagtctgaagactaattccgaggtaatcgtggcaaaaaaatctaaagaaaaccggaagattcccgacgggtacagcggcttcggaaaacacgaaaaaagccacctgggaatgaaaaagtaccggtataaccccatgcgcaaggcctcgaatcaaaacgagaatctcatcctgcaccaaaacatacagatcctcaaacagccctttgactacaacaaatgtggcaagaccttctttaagagagccatcctgatcacgcagaaaggaaggcagacagagcgcaaaccgaacgagtgcaatgagtgtcgcaaaactttctctaagcgttcaacactcatcgttcatcagaggattcacacaggcgagaagccgtacgtttgttccgactgtcggaagacgtttcgtgtgaaaacctccctgaccaggcatcgacgaatccacaccggtgaacgcccttatgagtgtagcgagtgcaggaagaccttcattgataagtcagcacttattgtccatcaaaaaatacatggcggagagaagtcctatgagtgcaacgaatgcggaaaaaccttcttccggaagtctgcccttgccgaacacttcaggtcacatactggtgagaaaccctacgagtgtaaagaatgcggtaacgctttttccaaaaagagctacctcgtcgtgcatcagaggacccaccggggagagaagcccaacgagtgtaaagaatgcggcaagaccttcttttgtcagtcagccttgaccgcacatcaacgcatccatactggggagaaaccgtatgaatgctccgaatgcgagaaaaccttcttctgtcagtcggccctcaatgtgcatcgtcgctcccacacaggtgaaaaaccttatgaatgttcccaatgtggaaaattcttgtgcacaaaatccgcccttattgctcaccagattacccatcggggaaaaaaaagttacgagtgtaacgagtgtggtaaatttttctgccacaagtctaccctgaccattcaccagaggactcacacaggcgagaagcatggggtgtttaataaatgcggcaggatttccatcgtcaagtcaaattgctcccagtgtaagagaatgaatactaaggagaatttgtatgaatgctcagagcatggccacgccgtcagcaagaacagtcatctgatcgtccatcagagaacaatttgggagcggccatatgaatgcaacgaatgtggtcgaacctattgccgtaagtcagccctcacccaccaccagaggacacataccggacagaggccgtacgaatgcaacgaatgtggcaagaccttctgccagaagtttagctttgtggagcaccagagaacccacactggggaaaagccctacgaatgcaacgagtgcggcaagagcttctgtcacaagtccgcttttagagtccataggcgcattcacactggagaaaagccctacgagtgtaaccaatgcgggaaaacatatcggcgactgtggacactcaccgagcatcagaaaatccatactggcgagaagccatatgaatgtaacaagtgtgagaagacatttaggcacaagagcaactttctgcttcaccagaaatcacacaaagagtag

SEQ ID NO: 321736 - DNA, 2430 bp, Artificial Sequence
  derived and/or modified sequence
cttccgggtgagggtcctgcagcccgtgaatccctggtcccgccgagacttggacctggtgcgaactggaggcgaagcgggtgcacccacaacctataggaagggctggcggcgagctctgagcactcgggcgtcggagggaacgctctgctttcaacactcttggccctttctcaagagaacatgaaaatgaaaaaatttcagataccagtttcattccaggacctgactgtgaacttcacccaagaggaatggcagcaactggaccctgctcagaggctcctgtacagggatgtgatgctggagaactacagcaacttggtctctgtggggtatcatgttagcaaaccagatgtgattttcaaattggagcaaggagaagagccatggatagtggaggaattctcaaatcagaactacccagacattgatgatgccttagagaagaacaaggaaatccaagataaacatttgacacaaactgtattcttcagcaacaaaacactgattacagaaagagagaatgtatttgggaaaacacttaatctgggcatgaatagtgttccctcaagaaaaatgccctataaatgtaatccaggaggaaacagtttgaaaactaattcagaagtaattgttgcaaagaaaagcaaagaaaacagaaagattcctgatggatacagtggatttgggaagcatgagaaaagtcatttgggaatgaaaaaatacagatacaatccaatgaggaaagccagcaatcaaaacgaaaatcttattctgcaccagaacattcagattttgaaacaaccgtttgactataataaatgtgggaaaaccttcttcaagagggcaattctcattacacaaaaggggagacagactgaaaggaaaccaaatgaatgtaatgaatgtaggaaaaccttttctaagagatctaccctcattgtacatcagagaattcatacaggggagaaaccgtatgtttgtagtgattgtaggaaaacttttcgtgtgaagacaagcctcactcgacaccgaagaattcatactggagagagaccctatgaatgcagtgaatgcaggaaaaccttcattgacaaatctgcccttattgtacaccagaaaattcatggaggggagaaatcctatgagtgtaatgaatgtggaaagaccttttttcggaagtcagccctggctgaacatttcaggtcacacacaggggagaagccttacgaatgcaaggaatgtggaaatgccttcagcaagaaatcgtatcttgttgtacatcaaagaactcacagaggagagaagccaaatgaatgtaaggaatgtgggaaaaccttcttctgtcagtcagcccttactgcgcatcagagaattcacacaggggaaaaaccctatgaatgtagtgaatgtgagaaaaccttcttttgtcaatctgccctcaatgtgcatcgaagaagtcatacaggagagaagccctatgaatgcagtcaatgtggaaaatttttatgtacgaaatcagccctcattgcacatcagataactcatagaggaaagaagtcttatgaatgtaatgaatgtgggaaatttttctgccataagtcaacactcactatacatcagagaacacacacaggagagaaacatggtgtgtttaataaatgtggtagaatctccattgtgaagtcaaactgcagtcagtgtaagagaatgaacacaaaggagaatctttatgagtgtagtgaacatgggcatgccgtcagcaaaaactcacacctcattgtacatcagagaactatatgggagagaccatatgaatgcaatgaatgtgggagaacctactgcaggaagtcagccctgactcaccatcagagaacacacacaggacagagaccctatgagtgtaatgaatgtgggaaaaccttctgtcagaagttctcctttgttgaacatcagcgaactcacactggggagaaaccatatgaatgtaatgaatgtgggaaatccttctgccataagtcagccttcagagtccatagaagaattcacacaggagagaaaccatatgaatgtaatcaatgtgggaaaacctaccgtcgcctgtggactctcactgaacatcagaaaatacacacaggagagaaaccttatgaatgtaacaaatgtgagaaaacatttcgccacaaatcaaactttcttttacatcagaaatcccacaaggaataagttccaacaaagtaataaattccaacaaagcaacaaatcaaataacttacacaatgctaaactgtgagtatgtatagaggagtaaaatcttataaatgtaatgaatatggaaaatttttctgccataagtcaaccctcaatgtaacatcagagaaatcatgtaggaaagaaataatttgtttaataaatgtattattcattgtg

SEQ ID NO: 321737 - DNA, 1929 bp, Artificial Sequence
  derived and/or modified sequence
atgctggagaactacagcaacctggtgagcgtgggctaccacgtgagcaagcccgacgtgatcttcaagctggagcagggcgaggagccctggatcgtggaggagttcagcaaccagaactaccccgacatcgacgacgccctggagaagaacaaggagatccaggacaagcacctgacccagaccgtgttcttcagcaacaagaccctgatcaccgagagagagaacgtgttcggcaagaccctgaacctgggcatgaacagcgtgcccagcagaaagatgccctacaagtgcaaccccggcggcaacagcctgaagaccaacagcgaggtgatcgtggccaagaagagcaaggagaacagaaagatccccgacggctacagcggcttcggcaagcacgagaagagccacctgggcatgaagaagtacagatacaaccccatgagaaaggccagcaaccagaacgagaacctgatcctgcaccagaacatccagatcctgaagcagcccttcgactacaacaagtgcggcaagaccttcttcaagagagccatcctgatcacccagaagggcagacagaccgagagaaagcccaacgagtgcaacgagtgcagaaagaccttcagcaagagaagcaccctgatcgtgcaccagagaatccacaccggcgagaagccctacgtgtgcagcgactgcagaaagaccttcagagtgaagaccagcctgaccagacacagaagaatccacaccggcgagagaccctacgagtgcagcgagtgcagaaagaccttcatcgacaagagcgccctgatcgtgcaccagaagatccacggcggcgagaagagctacgagtgcaacgagtgcggcaagaccttcttcagaaagagcgccctggccgagcacttcagaagccacaccggcgagaagccctacgagtgcaaggagtgcggcaacgccttcagcaagaagagctacctggtggtgcaccagagaacccacagaggcgagaagcccaacgagtgcaaggagtgcggcaagaccttcttctgccagagcgccctgaccgcccaccagagaatccacaccggcgagaagccctacgagtgcagcgagtgcgagaagaccttcttctgccagagcgccctgaacgtgcacagaagaagccacaccggcgagaagccctacgagtgcagccagtgcggcaagttcctgtgcaccaagagcgccctgatcgcccaccagatcacccacagaggcaagaagagctacgagtgcaacgagtgcggcaagttcttctgccacaagagcaccctgaccatccaccagagaacccacaccggcgagaagcacggcgtgttcaacaagtgcggcagaatcagcatcgtgaagagcaactgcagccagtgcaagagaatgaacaccaaggagaacctgtacgagtgcagcgagcacggccacgccgtgagcaagaacagccacctgatcgtgcaccagagaaccatctgggagagaccctacgagtgcaacgagtgcggcagaacctactgcagaaagagcgccctgacccaccaccagagaacccacaccggccagagaccctacgagtgcaacgagtgcggcaagaccttctgccagaagttcagcttcgtggagcaccagagaacccacaccggcgagaagccctacgagtgcaacgagtgcggcaagagcttctgccacaagagcgccttcagagtgcacagaagaatccacaccggcgagaagccctacgagtgcaaccagtgcggcaagacctacagaagactgtggaccctgaccgagcaccagaagatccacaccggcgagaagccctacgagtgcaacaagtgcgagaagaccttcagacacaagagcaacttcctgctgcaccagaagagccacaaggagtag

SEQ ID NO: 321738 - DNA, 1929 bp, Artificial Sequence
  derived and/or modified sequence
atgctcgaaaactattccaaccttgtttctgtaggttaccatgtctccaagccggacgtgatctttaaattagagcaaggggaggaaccttggattgtagaagaattcagcaatcagaactatcctgacatcgacgatgccctggagaaaaacaaggaaatccaggacaagcacctgacccaaactgtgtttttttctaacaagaccctgatcacagagcgagaaaatgtttttggcaagactttgaacctgggtatgaactcagttccatccagaaaaatgccttacaagtgtaatcctggtgggaactcactgaagactaatagcgaggtgatagtcgccaagaaatctaaggagaatcgaaaaattcctgacggctattccgggtttggaaagcatgagaaaagccatctgggcatgaaaaagtaccggtataatcccatgcgtaaggcgagtaaccaaaacgagaatctgatccttcatcagaacattcagatcctgaaacagccctttgattataacaaatgtggaaaaactttttttaaaagagcaatcctgatcacgcagaaaggtcgtcagacagaacgaaagcctaacgaatgtaatgagtgtaggaagacattcagtaagcgtagcaccttgatcgttcaccaacgcattcacactggggaaaaaccctatgtgtgttccgactgccggaagactttccgtgtgaaaacctcacttacccggcatagacgcatacatacaggtgagcggccttatgaatgttccgaatgccggaagacctttatcgacaagagtgcgctgatagtccaccaaaaaattcacggtggcgagaaatcatatgagtgtaacgagtgtgggaagaccttctttcgaaaaagcgctttagcagagcacttccgttctcacacgggagaaaaaccatatgagtgcaaagagtgcgggaacgctttcagcaaaaaatcttacttggtggttcaccaacggactcacagaggtgaaaaaccaaacgagtgcaaggaatgcggcaaaacctttttctgccaaagcgcccttactgcccaccagcgcattcataccggtgaaaaaccatacgagtgcagcgagtgcgaaaagactttcttctgccaaagtgcgctgaatgtccatcgcagaagtcacaccggggaaaagccctatgagtgtagccagtgtggaaaattcctctgcacaaaatccgcgctgattgcgcaccaaattacccacaggggaaaaaagagctatgagtgtaacgagtgcggaaagttcttctgtcacaaaagcaccctcacaatccaccaaagaacacacactggtgagaagcatggggtcttcaacaaatgtggccggatcagtatagttaaaagtaactgcagtcaatgcaagcgcatgaacaccaaagagaacctgtatgagtgcagcgagcacggccacgctgtgagtaagaacagtcaccttatcgtccaccagcgcacaatatgggagagaccatacgaatgcaatgagtgtggccgaacttattgtagaaagtctgccctgactcatcatcagcggactcatacaggccaaaggccctacgaatgcaatgaatgcgggaaaactttttgtcagaagttttcctttgtcgaacatcaacgaacccatacaggtgagaaaccctacgaatgtaatgaatgcggaaagagcttttgccataaaagcgcttttcgggttcaccgcagaatccatacaggtgagaagccatacgagtgcaatcagtgcggaaagacctaccgacgactgtggaccttgacagaacatcagaagattcacaccggggaaaaaccatatgagtgcaacaagtgtgagaagacatttcgtcacaaatctaactttttactgcatcaaaagagtcataaagagtag

SEQ ID NO: 321739 - DNA, 1929 bp, Artificial Sequence
  derived and/or modified sequence
atgctggagaactacagcaacctggtgtctgtgggctaccacgtgtccaagccagatgtgatcttcaagctggagcagggcgaggagccctggatcgtggaggagttcagcaaccagaactacccagacattgatgatgccctggagaagaacaaggagatccaggacaagcacctgacccagaccgtcttcttcagcaacaagaccctcatcacagaaagagaaaatgtgtttgggaagaccctgaacctgggcatgaacagcgtgcccagcaggaagatgccctacaagtgcaaccctgggggcaacagcctgaagaccaacagcgaggtgattgtggccaagaagagcaaagaaaataggaagatcccagatggctacagcggctttgggaagcatgagaagagccacctgggcatgaagaagtaccgctacaaccccatgaggaaggccagcaaccagaatgaaaacctgatcctgcaccagaacatccagatcctgaagcagccctttgactacaacaagtgtgggaagaccttcttcaagagggccatcctgatcacccagaagggccggcagacagagaggaagcccaatgaatgtaatgaatgtaggaagaccttcagcaagaggagcaccctgattgtgcaccagaggatccacactggagagaagccctacgtgtgcagcgactgcaggaagaccttccgggtgaagaccagcctgaccaggcaccggcgcatccacactggagagcggccctatgagtgcagtgaatgtaggaagaccttcatcgacaagagcgccctgattgtgcaccagaagatccatggaggagagaagagctatgagtgcaatgaatgtgggaagaccttcttcaggaagagcgccctggccgagcacttccgcagccacactggagagaagccctatgagtgcaaggaatgtggaaatgccttcagcaagaagagctacctggtggtgcaccagaggacccacagaggagagaagcccaatgaatgcaaggaatgtgggaagaccttcttctgccagagcgccctgacagcccaccagaggatccacactggagagaagccctatgagtgcagtgaatgtgagaagaccttcttctgccagagcgccctgaatgtgcaccggcgcagccacactggagagaagccctatgagtgcagccagtgtgggaagttcctgtgcaccaagagcgccctgattgcccaccagatcacccaccggggcaagaagagctatgagtgcaatgaatgtgggaagttcttctgccacaagagcaccctgaccatccaccagaggacccacactggagagaagcacggcgtcttcaacaagtgtggccgcatcagcatcgtgaagagcaactgcagccagtgcaagaggatgaacaccaaggagaacctgtatgagtgcagcgagcacggccatgctgtgtccaagaacagccacctgattgtgcaccagaggaccatctgggagcggccctatgaatgtaatgaatgtggccgcacctactgcaggaagagcgccctgacccaccaccagaggacccacacaggccagaggccctatgaatgtaatgaatgtgggaagaccttctgccagaagttctcctttgtggagcaccagaggacccacactggagagaagccctatgaatgtaatgaatgtgggaagagcttctgccacaagagcgccttccgggtgcaccggcgcatccacactggagagaagccctatgagtgcaaccagtgtgggaagacctaccgccgcctgtggaccctgacagagcaccagaagatccacactggagagaagccctatgagtgcaacaagtgtgagaagaccttccgccacaagagcaacttcctgctgcaccagaagagccacaaggagtag

SEQ ID NO: 321740 - DNA, 1929 bp, Artificial Sequence
  derived and/or modified sequence
atgctggagaactacagcaacctggtgagcgtgggctaccacgtgtcaaaacccgatgtgatctttaaactggagcagggggaggaaccttggattgtggaagagttctccaaccagaactatccggatatcgatgatgctctcgagaagaacaaggaaattcaggacaaacaccttacccaaaccgtgttcttcagtaataagactctcatcacggaacgcgaaaatgtgttcgggaagacacttaacttaggaatgaacagcgtgcctagcagaaaaatgccgtataaatgcaacccaggaggcaatagcctgaagaccaattcagaggtgatcgtggccaaaaagtccaaagaaaaccgcaagattcctgatggttactccggtttcggcaagcatgagaagtcgcacctgggaatgaaaaagtaccggtacaatcctatgcgaaaagctagcaatcaaaacgaaaaccttatcttgcaccagaacattcaaattttgaagcagccttttgattacaataaatgcgggaaaaccttctttaaacgcgccatcttgatcactcagaaggggcgccagactgagagaaagccaaatgagtgcaatgaatgccggaaaacatttagtaagcgatccacacttattgtccaccagcgcatccacacgggggaaaaaccatacgtatgctctgattgccggaagaccttcagggtcaaaacctcactgactagacaccgccggattcatacaggcgaacggccgtacgagtgctccgagtgtaggaagacgtttattgataagtcagcattgatcgtgcatcaaaagatccacgggggggaaaagtcctacgaatgtaacgaatgcggaaagactttttttaggaaaagcgcccttgctgagcacttcagaagccacaccggagaaaaaccctacgaatgcaaggagtgcggaaacgcattttctaagaaaagctatctggtggttcaccagaggacccatcgtggagagaagcctaatgagtgcaaggagtgtgggaagacatttttctgtcagagcgcgctgacagctcaccagaggattcacacgggagaaaagccctacgagtgttccgagtgcgaaaaaaccttcttttgtcaaagcgccctgaatgtgcacaggagatcccacaccggagaaaagccttacgagtgttcccagtgcggcaaattcctctgcaccaagagcgccctaattgctcaccagataacccacagaggaaagaaaagctacgaatgcaatgaatgcgggaagttcttctgccacaaaagtacactgacgatccaccagaggacacataccggagaaaagcatggcgtgtttaataagtgcggacggatcagtatcgtgaagtccaactgttctcagtgcaagaggatgaacacaaaagagaacctatatgaatgcagtgagcacggtcacgccgttagtaagaatagccatcttatagtgcaccagcggacaatttgggagaggccatatgagtgcaatgagtgcgggaggacttattgtcggaagtctgctctcacacaccatcagcgcacccacacaggccaacggccttacgaatgtaacgaatgcggcaaaactttttgccagaagttcagcttcgtagaacatcagcgaactcacaccggtgaaaaaccatatgagtgtaacgagtgtggaaagagtttctgccacaaaagtgctttcagagtgcatcggcgcatacacactggcgagaagccatacgaatgcaaccagtgcggcaaaacataccgcaggctgtggactttaaccgaacaccagaagatccataccggcgaaaaaccatatgaatgcaataagtgtgagaaaacctttcggcataagtcgaacttccttctgcatcagaaaagccataaggaatag

SEQ ID NO: 321741 - DNA, 1929 bp, Artificial Sequence
  derived and/or modified sequence
atgctcgaaaactacagcaatctcgtgagcgtagggtaccatgttagtaagcctgatgtgatcttcaagctcgagcagggtgaggaaccttggatcgtggaggaattcagtaaccagaactatccagatatagacgatgctctggaaaaaaataaagagattcaggataaacaccttactcagacagtgttctttagcaacaaaacattgattacggaacgcgagaacgtgttcggcaaaaccctcaacctcggcatgaactcagtcccttccaggaagatgccgtacaagtgcaaccccggaggcaactcccttaagaccaattctgaggttattgtagccaaaaaatccaaagaaaacagaaaaatccccgatggttacagcggctttggcaagcacgagaaatcgcatctgggcatgaaaaagtatcgttataaccccatgcggaaagctagtaatcaaaatgaaaacctgatactccaccagaatattcaaatactcaaacagccattcgactacaacaaatgtgggaaaacgtttttcaaaagggctatcttgattacccaaaaaggacgtcaaactgagcggaaacccaacgagtgtaatgagtgccggaagaccttttccaaacgatctaccctgatcgtacatcagcgcattcacaccggggagaagccatacgtctgttcagattgccgaaagactttccgcgttaagacctccttaactcgtcaccggaggattcacactggagagaggccatatgaatgctctgaatgtcgcaagacattcatcgataagtcggcattgatcgtacaccagaagatccacgggggtgaaaagtcttatgaatgcaacgagtgtggcaaaacatttttccgcaagtcagcactagcagaacactttaggagccacactggagagaagccatacgagtgcaaggaatgtggaaatgccttttccaaaaaatcctacctggtggtgcaccaacgaactcacaggggagaaaagcccaacgaatgcaaagagtgcggaaagacctttttttgtcaatctgccctgaccgctcatcaacgtatccacaccggcgagaagccctatgagtgttccgaatgtgaaaagactttcttctgtcagagcgcgttgaatgtgcaccgaaggagccatacgggcgagaaaccctacgaatgcagccagtgtggaaagtttttgtgtactaagagcgctcttattgctcaccagattacgcaccgtggaaagaagagttacgagtgcaatgagtgtggcaagttcttctgtcacaagtctacccttaccatccaccagcgaactcataccggcgagaaacacggagtgtttaacaagtgtggccgaatttcaatagttaaatccaactgcagccagtgcaagcggatgaataccaaggagaacctctatgagtgctcagaacacgggcatgcagtctctaagaatagccacttaatagttcatcagaggactatctgggagagaccctacgaatgtaacgagtgtggcagaacctactgtcggaaatctgccctgacacaccatcagagaactcacacagggcagagaccgtatgaatgtaatgaatgtggaaaaaccttctgtcagaagttctcattcgtggaacaccagcgtacacacacaggtgagaagccctacgaatgcaacgaatgtggaaaatccttttgccataagtctgccttccgagttcatcgcagaatccacaccggggagaagccttatgaatgtaatcaatgcggtaaaacttatagacgcctctggacactcacagagcaccagaaaatccacacaggagaaaagccctacgagtgtaataaatgcgagaaaacctttcgccataagtccaattttcttctgcaccaaaagtctcataaggagtag

SEQ ID NO: 321742 - DNA, 414 bp, Artificial Sequence
  derived and/or modified sequence
atggcagccctctcgcgagctctgggcccactgcgcaccccagcaccccctctgtggattggcctatttctcgtcgctacgggatcccagcagagtttggcgcaacccttgccgggaaacacgacagaggccactcctcggtcactcagagcctcgggctctctgtgcgggccacacgccaaggccccttacctttgcgaggcaacccacgagcctgcagcggcacgcatacgggctcaggtacccgatacccgctggtcccgtgtgggcggacagaggttctatagtcgagtcctctcaccacttcaccgcggacctagtgggcatacagaagcatccgcccagcgcagccatatgggcaaattgaaagagcctcagccacaggatcacaaacccggactcggtgcctcttag

SEQ ID NO: 321743 - DNA, 240 bp, Artificial Sequence
  derived and/or modified sequence
atggccagccctcgcacccggaaggtgttaaaggaggttcgcgtgcaagatgaaaataatgtgtgtttcgagtgcggggcgttcaacccccagtgggtgtcagtcacttacggcatctggatttgtctcgaatgtagtggaagacatcggggattaggcgtccatctcagtttcgtaaggagcgtgacaatggacaagtggaaggacatcgagctagagaaaatgaaggccggcggctag

SEQ ID NO: 321744 - DNA, 369 bp, Artificial Sequence
  derived and/or modified sequence
atggctagtccccgaacgaggaaagttctgaaagaggtgcgagtgcaggacgaaaataacgtgtgtttcgagtgcggggcctttaacccacagtgggtgtcagtgacctatggcatttggatctgcctagagtgttccggccggcaccgggggttaggcgtacatctttcatttgtacgtagcgttaccatggacaagtggaaggatatcgaattagagaaaatgaaagccggcggaaatgcaaaatttcgcgagttccttgagtcccaggaggattacgacccgtgttggtctcttcaggaaaaatacaattctagggccgctgcactgtttcgtgataaagtggtcgcccttgccgagggccggtag

SEQ ID NO: 321745 - DNA, 579 bp, Artificial Sequence
  derived and/or modified sequence
gcaaagcgcaacgtagccggaagctggtggcggctggtgggcgaccgggcgcatcctcattgcagtgcggcggccctacctcggccctggcctgaccccggcggccctgcccgcccctccctccagtcggctgtataggtggatgctcagtttgatgacggtatccgcctgaatgagtcatgctgggggtccaagtcctgcggtcaggagtgagcattcagatgtctgcctcatgatctgtggttcctggacactcttacagaaggcacagaattatggagcagaagggagcccagggtgaacttttggttttgttttgatgaactgcagaaaacagcatcatggccagcccaagaaccaggaaggttcttaaagaagtcagggtgcaggatgagaacaacgtttgttttgagtgtggcgcgttcaatcctcagtgggtcagtgtgacctacggcatctggatctgcctggagtgctcggggagacaccgcgggcttggggttcacctcagctttgtgcgctctgttactatggacaagtggaaggacattgagcttgagaagatgaaagctggtggga

SEQ ID NO: 321746 - DNA, 572 bp, Artificial Sequence
  derived and/or modified sequence
cttttcccgagctccttcggacccaggactcggcctggacacatcccagtcaggtggcctctgaagcccggtggggcttccaccccctaagaagtgagggtcctaagaaggagatatatttttacatcttggtttcaagcgttcagagtttttgcgttatttttcaagataaactatatttgtacttttgaaggttaggagcatcatggccagcccaagaaccaggaaggttcttaaagaagtcagggtgcaggatgagaacaacgtttgttttgagtgtggcgcgttcaatcctcagtgggtcagtgtgacctacggcatctggatctgcctggagtgctcggggagacaccgcgggcttggggttcacctcagctttgtgcgctctgttactatggacaagtggaaggacattgagcttgagaagatgaaagctggtgggaatgctaagttccgagagttcctggagtctcaggaggattacgatccttgctggtccttgcaggagaagtacaacagcagagccgcggccctctttagggataaggtggtcgctctggccgaaggcagag

SEQ ID NO: 321747 - DNA, 240 bp, Artificial Sequence
  derived and/or modified sequence
atggccagccccaggaccaggaaggtgctgaaggaggtgcgggtgcaggatgagaacaacgtgtgctttgaatgtggggccttcaacccccagtgggtgtctgtgacctacggcatctggatctgcctggagtgcagcggccgccaccggggcctgggcgtgcacctgagctttgtgcgctctgtgaccatggacaagtggaaggacatcgagctggagaagatgaaggccggcggctag

SEQ ID NO: 321748 - DNA, 369 bp, Artificial Sequence
  derived and/or modified sequence
atggccagccccaggaccaggaaggtgctgaaggaggtgcgggtgcaggatgagaacaacgtgtgctttgaatgtggggccttcaacccccagtgggtgtctgtgacctacggcatctggatctgcctggagtgcagcggccgccaccggggcctgggcgtgcacctgagctttgtgcgctctgtgaccatggacaagtggaaggacatcgagctggagaagatgaaggccggcggcaatgccaagttccgggagttcctggagagccaggaggactatgacccctgctggagcctgcaggagaagtacaacagcagagctgctgccctcttccgggacaaggtggtggccctggccgagggccgctag

SEQ ID NO: 321749 - DNA, 240 bp, Artificial Sequence
  derived and/or modified sequence
atggccagcccccggacccggaaggtgctgaaggaggtgcgggtgcaagatgagaacaatgtgtgtttcgagtgcggggccttcaatcctcagtgggtcagtgtgacctacggtatatggatttgtctcgagtgctcgggtcgacatcgcggcttgggtgtgcaccttagctttgtcagatctgtgacgatggacaaatggaaggacatagaattggagaaaatgaaggccgggggatag

SEQ ID NO: 321750 - DNA, 369 bp, Artificial Sequence
  derived and/or modified sequence
atggccagcccccggacccggaaggtgctgaaggaggtgcgggtgcaggacgaaaacaatgtatgctttgaatgcggcgccttcaacccccagtgggtttccgtcacctacggcatctggatttgtctcgagtgcagtggacgccacaggggacttggggtccatctatccttcgtgcggagcgtgactatggacaagtggaaagatattgaactggagaagatgaaagctgggggcaatgctaagtttagggagtttctcgaatcccaggaggattatgacccctgttggtcgcttcaagaaaagtacaattcccgggctgctgctctgttccgagacaaagtggtggcactggccgagggcagatag

SEQ ID NO: 321751 - DNA, 240 bp, Artificial Sequence
  derived and/or modified sequence
atggcatccccccgtactaggaaggtcctcaaggaggtgagagtgcaagatgagaataacgtctgctttgagtgtggagccttcaatccacagtgggtcagcgtgacatatggcatctggatttgtttggaatgcagcggaagacatcgtggactgggcgtgcatctgtcttttgtccgctctgtcacaatggataaatggaaagacattgagctggaaaaaatgaaggccggtggatag

SEQ ID NO: 321752 - DNA, 369 bp, Artificial Sequence
  derived and/or modified sequence
atggcttctccacgaacaagaaaggtactgaaggaagtgagggtgcaggacgagaataatgtctgtttcgagtgcggggcttttaatccccaatgggtgagcgtcacgtacggcatctggatctgtctggaatgctccggaagacatagaggtttaggtgtgcatttgtccttcgtccgctcagtgaccatggataagtggaaggatattgagctcgagaaaatgaaagccggaggaaacgctaagttccgggagtttctagaaagccaggaagactacgatccctgttggtcgcttcaggagaagtataactctcgagctgcagccctgtttcgagataaggttgtggccctagctgagggtcggtag

SEQ ID NO: 321753 - DNA, 240 bp, Artificial Sequence
  derived and/or modified sequence
atggccagccccagaaccagaaaggtgctgaaggaggtgagagtgcaggacgagaacaacgtgtgcttcgagtgcggcgccttcaacccccagtgggtgagcgtgacctacggcatctggatctgcctggagtgcagcggcagacacagaggcctgggcgtgcacctgagcttcgtgagaagcgtgaccatggacaagtggaaggacatcgagctggagaagatgaaggccggcggctag

SEQ ID NO: 321754 - DNA, 369 bp, Artificial Sequence
  derived and/or modified sequence
atggccagccccagaaccagaaaggtgctgaaggaggtgagagtgcaggacgagaacaacgtgtgcttcgagtgcggcgccttcaacccccagtgggtgagcgtgacctacggcatctggatctgcctggagtgcagcggcagacacagaggcctgggcgtgcacctgagcttcgtgagaagcgtgaccatggacaagtggaaggacatcgagctggagaagatgaaggccggcggcaacgccaagttcagagagttcctggagagccaggaggactacgacccctgctggagcctgcaggagaagtacaacagcagagccgccgccctgttcagagacaaggtggtggccctggccgagggcagatag

SEQ ID NO: 321755 - DNA, 114 bp, Artificial Sequence
  derived and/or modified sequence
atgatggttcgctgggctttgctgtgcggcgaatgtagaatactgggaaggcattgccaggggatcttgctggaagattctatgccgtggcctatacctagcgtccaactgtag

SEQ ID NO: 321756 - DNA, 114 bp, Artificial Sequence
  derived and/or modified sequence
atgatggtgagatgggccctgctgtgcggcgagtgcagaatcctgggcagacactgccagggcatcctgctggaggacagcatgccctggcccatccccagcgtgcagctgtag

SEQ ID NO: 321757 - DNA, 1956 bp, Artificial Sequence
  derived and/or modified sequence
atgatggtgagatgggcactcctctgcgagttctggggcgatattgcaaaggaattttactggaagaccccatgccccggacccttcttgcggtacaatttcgacgttacgaaggggaagatattcatagagtggatgaagggtgcaaccacgaacatctgttataacgtgctcgatcggaatgtgcatgagaaaaaattaggcgataaagtggcgttctactgggagggcaacgagccaggcgagacgacccagatcacctaccatcagttgttggttcaggtctgccagtttagcaatgtcctgcgcaagcaggggattcagaagggcgaccgagtagcgatctatatgcctatgatcccagagttggttgtggctatgcttgcctgcgcccgtatcggcgcgctgcattccatcgtgtttgccgggttttcttctgaatccctctgcgagaggatattggactcaagttgctctctgctgataactacagacgccttttaccgcggggagaaactggtgaacctcaaggaattggccgatgaagccctgcagaaatgccaggagaagggctttccggtgcgctgctgcatcgtcgtgaagcaccttggccgcgccgagctgggcatgggggactccacgagtcagagcccaccgattaaacggtcttgtcccgacgtgcagatttcttggaaccaagggattgatctgtggtggcatgaactgatgcaggaggctggcgacgagtgtgaaccagaatggtgtgatgctgaggatccactgtttatcctgtatacaagcggctccactggcaaacctaaaggtgtcgtccacactgttggagggtatatgctttacgtggccaccactttcaagtatgtctttgatttccatgcggaagacgttttttggtgcactgcagacatcggatggatcaccgggcacagctatgtgacgtacggtccactggcgaatggggccacttctgtacttttcgagggaatacctacctatccagatgtgaatcggctgtggagtatcgtagataaatacaaggtgacgaaattttacactgcccccaccgcgatccgcttgttaatgaaattcggtgacgagccagtaacaaagcatagtagagcaagtctgcaggtgctagggacagtaggagagcccatcaacccagaggcttggctatggtatcacagagtggtgggtgcccaacgctgccctatcgtcgatactttttggcagacagaaaccggaggtcacatgctaacacccctcccaggagccacccccatgaagcctggtagcgcaaccttcccctttttcggggtggcccctgcaatcctgaacgaatcgggggaggagctggagggagaggctgagggatatttagtatttaagcagccgtggccaggaatcatgcgcactgtttatggtaaccacgaacgatttgagaccacgtattttaaaaaattccccggttattacgtgaccggagatggttgtcagcgggaccaggatggctattactggataacagggcgcattgacgatatgctgaacgtatcaggtcatctattgtcaaccgccgaagttgagtccgcattggtcgagcatgaagccgtcgccgaggccgctgtcgtgggccacccacaccctgtgaagggcgagtgcttgtattgctttgtgactctctgcgacgggcacaccttcagtcccaagctcacagaggaactgaagaagcagattagggagaaaattgggcccattgctactcccgattatatacagaacgcacccggacttcccaaaacacgctctgggaagatcatgaggcgcgtgctgaggaagatcgcccagaatgaccacgatcttggggatatgtccaccgtcgcagacccttccgtcattagtcacctgttcagtcaccgctgtctcacaatccaatag

SEQ ID NO: 321758 - DNA, 1956 bp, Artificial Sequence
  derived and/or modified sequence
atgatggtgcgctgggccctgctgtgtgagttctggggagacatcgccaaggagttctactggaagaccccctgccccggccccttcctgcgctacaactttgatgtgaccaagggcaagatcttcatcgagtggatgaagggggccaccaccaacatctgctacaacgtgctggacagaaatgtgcatgagaagaagctgggggacaaggtggccttctactgggagggcaatgagcccggggagaccacccagatcacctaccaccagctgctggtgcaggtgtgccagttcagcaatgtgctgaggaagcagggcatccagaagggggacagagtggccatctacatgcccatgatccctgagctggtggtggccatgctggcctgtgccagaattggagccctgcacagcatcgtgtttgctggcttcagcagcgagagcctgtgtgagcgcatcctggacagcagctgcagcctgctgatcaccacagatgccttctacagaggagagaagctggtgaacctgaaggagctggctgatgaggccctgcagaagtgccaggagaagggcttccctgtgcgctgctgcatcgtggtgaagcacctgggccgggcagagctgggcatgggagacagcaccagccagagcccccccatcaagaggagctgcccagatgtgcagatctcctggaaccagggcatcgacctgtggtggcatgagctgatgcaggaggccggagatgaatgtgagcctgagtggtgtgatgctgaggaccccctcttcatcctgtacaccagcggcagcacaggcaagcccaagggcgtggtgcacacagtgggcggctacatgctgtatgtggccaccaccttcaagtatgtgtttgacttccacgccgaggatgtgttctggtgcacagctgacatcggctggatcaccggccacagctatgtgacctacggccccctggccaatggagccacctctgtgctgtttgagggcatccccacctacccagatgtgaaccggctgtggagcatcgtggacaagtacaaggtgaccaagttctacacagcccccacagccatccggctgctgatgaagtttggagatgagcctgtgaccaagcacagccgggccagcctgcaggtgctgggcaccgtgggggagcccatcaaccctgaggcctggctgtggtaccaccgggtggtgggcgcccagcgctgccccatcgtggacaccttctggcagacagagaccggcggccacatgctgacccccctgcccggggccacccccatgaagccaggcagcgccaccttccccttcttcggcgtggccccagccatcctgaatgaaagtggagaggagctggagggggaggccgagggctacctggtgttcaagcagccctggccaggcatcatgaggacagtgtatggcaaccacgagagatttgagaccacctacttcaagaagtttcctggctactacgtgactggagatggctgccagagggaccaggacggctactactggatcaccggcagaattgatgacatgctgaatgtgtctggccacctgctgagcacagctgaggtggagagcgccctggtggagcatgaagctgtggccgaggccgctgtggtgggccacccccaccctgtgaagggagaatgtctgtactgctttgtgaccctgtgtgatggccacaccttcagccccaagctgacagaggagctgaagaagcagatccgggagaagattggccccatcgccaccccagactacatccagaatgcccctggcctgcccaagaccaggtctgggaagatcatgagaagagtgctgaggaagatcgcccagaatgaccatgacctgggggacatgagcacagtggccgaccccagcgtcatcagccacctgttcagccaccgctgcctgaccatccagtag

SEQ ID NO: 321759 - DNA, 1956 bp, Artificial Sequence
  derived and/or modified sequence
atgatggtgcggtgggccctgctgtgcgagttctggggcgacatcgctaaggaattttattggaaaactccgtgtcccgggccttttctgcgttacaacttcgacgtcaccaagggcaaaatctttattgaatggatgaagggagccactactaatatctgctataatgtcctcgacaggaacgtgcacgaaaaaaagcttggtgacaaggtcgctttttactgggagggcaacgagccaggagagactacacagatcacgtaccaccagctgctggtgcaggtttgccagttctccaatgttttgcggaagcagggcatccagaaaggagatcgggtcgccatctacatgccaatgatacctgagctggtggttgccatgcttgcctgtgccagaataggagctctacactccattgtctttgccggattttctagcgagagtttatgcgaaagaatcctggacagctcatgctctctgcttattacaaccgacgccttttaccgtggggagaaactggttaacctgaaagaattagcagacgaagctctccagaaatgccaggagaaggggttccctgtgcgctgctgtatcgtggtaaagcaccttggtcgcgccgaactagggatgggcgactccacttcgcagtcgccaccgatcaagcgttcttgcccggatgtacagatctcttggaaccaggggatagatctctggtggcatgagctgatgcaggaggctggtgatgagtgtgagccagagtggtgtgacgctgaagaccctctttttatcctgtatacaagtggttctacagggaagccgaaaggcgtcgtacatacagtcgggggttacatgctgtatgtcgctacaacttttaaatacgtgttcgatttccacgcagaggatgtcttttggtgtaccgccgatataggctggatcacaggtcactcctacgtgacatacgggccgctggctaacggcgctaccagtgtgttgttcgaagggataccaacatatccagacgtgaataggctgtggagcattgtggacaaatataaggtgacaaagttctatactgcccctactgccattcgactgctcatgaagttcggcgatgaaccagtcaccaaacattctcgcgcctcattacaggttttaggtacagtgggtgagccgatcaaccccgaggcctggctttggtaccaccgggtagtcggggcccagcgctgtcccatcgtcgacaccttttggcagacagagaccgggggccacatgctgacccccctcccaggggctacacctatgaaacctggtagtgccaccttccctttcttcggagtggcgcccgcaattttgaatgagtccggagaggagctggagggggaagctgagggttacctggtttttaagcagccttggcccggcatcatgaggactgtgtatggaaatcacgagcgatttgaaacaacctactttaagaaattccccggatattatgtgaccggcgacggatgtcaaagagaccaggatgggtattattggatcacaggaagaatcgatgacatgctgaatgtgtccgggcacctcctgagcacggctgaggttgagagcgccctggtggagcatgaggctgtcgctgaggcggcagttgtggggcacccccacccggttaagggtgaatgtctgtattgctttgtgacactttgtgacgggcacacattctcaccgaaacttacagaggaactcaagaagcagatcagagagaagatcggcccaatcgccacgcccgattacattcaaaatgctcctggcttgccaaaaaccagatctggtaaaatcatgaggcgagtgcttcggaagatcgcccagaatgaccatgatttgggcgatatgtctacagttgccgacccttccgtaataagtcaccttttttcccaccgctgcctgaccatccagtag

SEQ ID NO: 321760 - DNA, 1956 bp, Artificial Sequence
  derived and/or modified sequence
atgatggtacgttgggccttgctgtgcgagttctggggggacattgccaaggaattctactggaagactccatgcccgggaccatttctccgctacaattttgatgtgactaagggtaaaatatttatagagtggatgaaaggcgcaactactaacatttgctacaatgtgctggaccgaaacgttcacgaaaagaagttgggcgataaagtggctttctactgggagggtaacgagcctggcgaaaccacccagattacctaccaccaactcctggttcaggtgtgtcagttttccaacgtcctgcgtaaacagggaattcaaaagggcgatcgagtggcaatctacatgccaatgatccccgagctcgtggtggcgatgttggcatgcgcaagaatcggagccctccattctattgtctttgcgggatttagtagcgagtctctttgtgaacggattctcgactcaagttgttctctgctgattaccactgatgccttctatcgcggtgagaagctggttaatttaaaggagctcgccgacgaggcgctacagaagtgtcaggagaagggtttcccagtgcgatgctgcatagtagtgaagcacctgggaagagcagagctcggcatgggggactctaccagccaatccccacccatcaagcggtcctgcccggacgtgcagatcagctggaaccagggcattgatctatggtggcacgagttgatgcaggaagccggagacgaatgcgagcctgaatggtgcgatgccgaagaccccctcttcatcctgtacactagtgggtctacaggtaagccaaagggggttgtgcacacggtggggggatacatgctttatgtcgcaactacatttaagtacgtgttcgatttccacgccgaagacgtgttctggtgcaccgccgacattggctggatcaccggtcactcatacgtgacctacggcccactggcgaatggagccacctccgtcctattcgagggcattccaacataccccgacgtaaatagactgtggtccattgtcgataaatacaaggtgacaaagttctacactgcccctacggcaataagactcttgatgaaatttggagacgagccagtgacaaagcactccagagcttccctccaagtgttgggaaccgttggggaacccattaaccctgaagcctggctttggtaccatagagtggttggggcacagcgttgccctattgtagacaccttttggcagaccgagaccggcggacacatgctgactcccctgcccggagctacaccgatgaagccgggatccgcaactttcccattctttggcgttgcacccgcaatccttaacgagtctggagaggagctcgagggagaggccgaggggtacttagttttcaagcaaccatggcccggtatcatgcggacagtctacgggaatcacgagcgtttcgagaccacttactttaagaagttcccaggatactatgtaacaggtgacgggtgccagcgcgatcaagacggctactactggatcaccgggaggatcgacgacatgctcaatgtgtcaggtcacctcctgtcaactgccgaggtagagtccgccctcgtggagcacgaggctgtggcggaggctgccgtggtggggcacccgcaccccgtaaaaggggaatgtctgtactgttttgttacgctctgcgatggccatacgttcagccctaagctgaccgaagagctgaagaagcagatccgggagaaaattggccctattgccacgcctgactatatccagaacgcccctgggctacctaagacacgttccggcaaaatcatgaggagggtactacgcaaaatcgctcagaatgaccacgaccttggagacatgtctaccgtggccgacccttctgtcatatctcacctgttttcacacaggtgccttaccattcagtag

SEQ ID NO: 321761 - DNA, 1956 bp, Artificial Sequence
  derived and/or modified sequence
atgatggtgagatgggccctgctgtgcgagttctggggcgacatcgccaaggagttctactggaagaccccctgccccggccccttcctgagatacaacttcgacgtgaccaagggcaagatcttcatcgagtggatgaagggcgccaccaccaacatctgctacaacgtgctggacagaaacgtgcacgagaagaagctgggcgacaaggtggccttctactgggagggcaacgagcccggcgagaccacccagatcacctaccaccagctgctggtgcaggtgtgccagttcagcaacgtgctgagaaagcagggcatccagaagggcgacagagtggccatctacatgcccatgatccccgagctggtggtggccatgctggcctgcgccagaatcggcgccctgcacagcatcgtgttcgccggcttcagcagcgagagcctgtgcgagagaatcctggacagcagctgcagcctgctgatcaccaccgacgccttctacagaggcgagaagctggtgaacctgaaggagctggccgacgaggccctgcagaagtgccaggagaagggcttccccgtgagatgctgcatcgtggtgaagcacctgggcagagccgagctgggcatgggcgacagcaccagccagagcccccccatcaagagaagctgccccgacgtgcagatcagctggaaccagggcatcgacctgtggtggcacgagctgatgcaggaggccggcgacgagtgcgagcccgagtggtgcgacgccgaggaccccctgttcatcctgtacaccagcggcagcaccggcaagcccaagggcgtggtgcacaccgtgggcggctacatgctgtacgtggccaccaccttcaagtacgtgttcgacttccacgccgaggacgtgttctggtgcaccgccgacatcggctggatcaccggccacagctacgtgacctacggccccctggccaacggcgccaccagcgtgctgttcgagggcatccccacctaccccgacgtgaacagactgtggagcatcgtggacaagtacaaggtgaccaagttctacaccgcccccaccgccatcagactgctgatgaagttcggcgacgagcccgtgaccaagcacagcagagccagcctgcaggtgctgggcaccgtgggcgagcccatcaaccccgaggcctggctgtggtaccacagagtggtgggcgcccagagatgccccatcgtggacaccttctggcagaccgagaccggcggccacatgctgacccccctgcccggcgccacccccatgaagcccggcagcgccaccttccccttcttcggcgtggcccccgccatcctgaacgagagcggcgaggagctggagggcgaggccgagggctacctggtgttcaagcagccctggcccggcatcatgagaaccgtgtacggcaaccacgagagattcgagaccacctacttcaagaagttccccggctactacgtgaccggcgacggctgccagagagaccaggacggctactactggatcaccggcagaatcgacgacatgctgaacgtgagcggccacctgctgagcaccgccgaggtggagagcgccctggtggagcacgaggccgtggccgaggccgccgtggtgggccacccccaccccgtgaagggcgagtgcctgtactgcttcgtgaccctgtgcgacggccacaccttcagccccaagctgaccgaggagctgaagaagcagatcagagagaagatcggccccatcgccacccccgactacatccagaacgcccccggcctgcccaagaccagaagcggcaagatcatgagaagagtgctgagaaagatcgcccagaacgaccacgacctgggcgacatgagcaccgtggccgaccccagcgtgatcagccacctgttcagccacagatgcctgaccatccagtag

SEQ ID NO: 321762 - DNA, 2708 bp, Artificial Sequence
  derived and/or modified sequence
atgatggtgaggtgggcacttctttgtgaattctggggagacattgccaaggaattttactggaagactccatgccctggcccattccttcggtacaactttgatgtgactaaagggaaaatcttcattgagtggatgaaaggagcaactaccaacatctgctacaatgtactggatcgaaatgtccatgagaaaaagcttggagataaagttgctttttactgggagggcaatgagccaggggagaccactcagatcacataccatcagcttctggtccaagtgtgtcagttcagcaatgttctccgaaaacagggcattcagaagggggaccgagtggccatctacatgcctatgatcccagagcttgtggtggccatgctggcatgtgcccgcattggggctttgcactccattgtgtttgcaggcttctcttcagagtctctatgtgaacggatcttggattccagctgcagtcttctcatcactacagatgccttctacaggggggaaaagcttgtgaacctgaaggagctggctgacgaggccctgcagaagtgtcaggagaagggtttcccagtaagatgctgcattgtggtcaagcacctggggcgggcagagctcggcatgggtgactccaccagccagtcccccccaattaagaggtcatgcccagatgtgcagatctcatggaaccaagggattgacttgtggtggcatgagctcatgcaagaggcaggggatgagtgtgagcccgagtggtgtgatgccgaggacccactcttcatcctgtacaccagtggctccacaggcaaacccaagggtgtggttcacacagttgggggctacatgctctatgtagccacaaccttcaagtatgtgtttgacttccatgcagaggatgtgttctggtgcacggcagacattggttggatcactggtcattcctacgtcacctatgggccactggccaatggtgccaccagtgttttgtttgaggggattcccacatatccggacgtgaaccgcctgtggagcattgtggacaaatacaaggtgaccaagttctacacagcacccacagccatccgtctgctcatgaagtttggagatgagcctgtcaccaagcatagccgggcatccttgcaggtgttaggcacagtgggtgaacccatcaaccctgaggcctggctatggtaccaccgggtggtaggtgcccagcgctgccccatcgtggacaccttctggcaaacagagacaggtggccacatgttgactccccttcctggtgccacacccatgaaacccggttctgctactttcccattctttggtgtagctcctgcaatcctgaatgagtccggggaagagttggaaggtgaagctgaaggttatctggtgttcaagcagccctggccagggatcatgcgcacagtctatgggaaccacgaacgctttgagacaacctactttaagaagtttcctggatactatgttacaggagatggctgccagcgggaccaggatggctattactggatcactggcaggattgatgacatgctcaatgtatctggacacctgctgagtacagcagaggtggagtcagcacttgtggaacatgaggctgttgcagaggcagctgtggtgggccaccctcatcctgtgaagggtgaatgcctctactgctttgtcaccttgtgtgatggccacaccttcagccccaagctcaccgaggagctcaagaagcagattagagaaaagattggccccattgccacaccagactacatccagaatgcacctggcttgcctaaaacccgctcagggaaaatcatgaggcgagtgcttcggaagattgctcagaatgaccatgacctcggggacatgtctactgtggctgacccatctgtcatcagtcacctcttcagccaccgctgcctgaccatccagtgaacatgatcctgacctttacctaggattcctcctgctccaaactttgcccatcctctttgccccctcaggagtgctgagggccagtgttgacccacactaccctcccttgaccagctgtctgggaccggaaaccagctttgtctccaggtagagacaacatcctgtgactgccaggcagaaaggacagggcccaggtcagcctcagtctgctgtgcctccagactgcagagctctcagaacccagaacagagacgaaaaggctacctctcctacccaagttaagtgttcaaaggggatgtgagggcctccactgaagcagggaggcagctgtgtaatcctatgtcagctctcttaggaagccccagtacttatattgggcatgcacttgcccttaaaaacaatgatttgtgagtccaggaacaatttactatttttaaaatattttgctgcttctgttctgggtctgaattcccttttgtgccagatgccagtactgtctgcccattggctccaggggctgtatgggcagattcagtctccagagggtattcagatcatctgcttctttgaaggagtaaatgtgttttgttcctagggccagaggagcttgtcttccttgtcctctgttcccaccctcccctgaacagaacccagcccataagagacattctcagatgaaactctgttttcttgccccagtcaggctcaagccctgtggttgtaggaataaagcctgtgatctcaagaagtgg

SEQ ID NO: 321763 - protein, 852 aa, Artificial Sequence
  derived and/or modified sequence
MGPPSLVLCLLSATVFSLLGGSSAFLSHHRLKGRFQRDRRNIRPNIILVLTDDQDVELGSMQVMNKTRRIMEQGGAHFINAFVTTPMCCPSRSSILTGKYVHNHNTYTNNENCSSPSWQAQHESRTFAVYLNSTGYRTAFFGKYLNEYNGSYVPPGWKEWVGLLKNSRFYNYTLCRNGVKEKHGSDYSKDYLTDLITNDSVSFFRTSKKMYPHRPVLMVISHAAPHGPEDSAPQYSRLFPNASQHITPSYNYAPNPDKHWIMRYTGPMKPIHMEFTNMLQRKRLQTLMSVDDSMETIYNMLVETGELDNTYIVYTADHGYHIGQFGLVKGKSMPYEFDIRVPFYVRGPNVEAGCLNPHIVLNIDLAPTILDIAGLDIPADMDGKSILKLLDTERPVNRFHLKKKMRVWRDSFLVERGKLLHKRDNDKVDAQEENFLPKYQRVKDLCQRAEYQTACEQLGQKWQCVEDATGKLKLHKCKGPMRLGGSRALSNLVPKYYGQGSEACTCDSGDYKLSLAGRRKKLFKKKYKASYVRSRSIRSVAIEVDGRVYHVGLGDAAQPRNLTKRHWPGAPEDQDDKDGGDFSGTGGLPDYSAANPIKVTHRCYILENDTVQCDLDLYKSLQAWKDHKLHIDHEIETLQNKIKNLREVRGHLKKKRPEECDCHKISYHTQHKGRLKHRGSSLHPFRKGLQEKDKVWLLREQKRKKKLRKLLKRLQNNDTCSMPGLTCFTHDNQHWQTAPFWTLGPFCACTSANNNTYWCMRTINETHNFLFCEFATGFLEYFDLNTDPYQLMNAVNTLDRDVLNQLHVQLMELRSCKGYKQCNPRTRNMDLGLKDGGSYEQYRGQLWEGWEG

SEQ ID NO: 321764 - DNA, 2559 bp, Artificial Sequence
  derived and/or modified sequence
atgggcccccccagcctggtgctgtgcctgctgagcgccaccgtgttcagcctgctgggcggcagcagcgccttcctgagccaccacagactgaagggcagattccagagagacagaagaaacatcagacccaacatcatcctggtgctgaccgacgaccaggacgtggagctgggcagcatgcaggtgatgaacaagaccagaagaatcatggagcagggcggcgcccacttcatcaacgccttcgtgaccacccccatgtgctgccccagcagaagcagcatcctgaccggcaagtacgtgcacaaccacaacacctacaccaacaacgagaactgcagcagccccagctggcaggcccagcacgagagcagaaccttcgccgtgtacctgaacagcaccggctacagaaccgccttcttcggcaagtacctgaacgagtacaacggcagctacgtgccccccggctggaaggagtgggtgggcctgctgaagaacagcagattctacaactacaccctgtgcagaaacggcgtgaaggagaagcacggcagcgactacagcaaggactacctgaccgacctgatcaccaacgacagcgtgagcttcttcagaaccagcaagaagatgtacccccacagacccgtgctgatggtgatcagccacgccgccccccacggccccgaggacagcgccccccagtacagcagactgttccccaacgccagccagcacatcacccccagctacaactacgcccccaaccccgacaagcactggatcatgagatacaccggccccatgaagcccatccacatggagttcaccaacatgctgcagagaaagagactgcagaccctgatgagcgtggacgacagcatggagaccatctacaacatgctggtggagaccggcgagctggacaacacctacatcgtgtacaccgccgaccacggctaccacatcggccagttcggcctggtgaagggcaagagcatgccctacgagttcgacatcagagtgcccttctacgtgagaggccccaacgtggaggccggctgcctgaacccccacatcgtgctgaacatcgacctggcccccaccatcctggacatcgccggcctggacatccccgccgacatggacggcaagagcatcctgaagctgctggacaccgagagacccgtgaacagattccacctgaagaagaagatgagagtgtggagagacagcttcctggtggagagaggcaagctgctgcacaagagagacaacgacaaggtggacgcccaggaggagaacttcctgcccaagtaccagagagtgaaggacctgtgccagagagccgagtaccagaccgcctgcgagcagctgggccagaagtggcagtgcgtggaggacgccaccggcaagctgaagctgcacaagtgcaagggccccatgagactgggcggcagcagagccctgagcaacctggtgcccaagtactacggccagggcagcgaggcctgcacctgcgacagcggcgactacaagctgagcctggccggcagaagaaagaagctgttcaagaagaagtacaaggccagctacgtgagaagcagaagcatcagaagcgtggccatcgaggtggacggcagagtgtaccacgtgggcctgggcgacgccgcccagcccagaaacctgaccaagagacactggcccggcgcccccgaggaccaggacgacaaggacggcggcgacttcagcggcaccggcggcctgcccgactacagcgccgccaaccccatcaaggtgacccacagatgctacatcctggagaacgacaccgtgcagtgcgacctggacctgtacaagagcctgcaggcctggaaggaccacaagctgcacatcgaccacgagatcgagaccctgcagaacaagatcaagaacctgagagaggtgagaggccacctgaagaagaagagacccgaggagtgcgactgccacaagatcagctaccacacccagcacaagggcagactgaagcacagaggcagcagcctgcaccccttcagaaagggcctgcaggagaaggacaaggtgtggctgctgagagagcagaagagaaagaagaagctgagaaagctgctgaagagactgcagaacaacgacacctgcagcatgcccggcctgacctgcttcacccacgacaaccagcactggcagaccgcccccttctggaccctgggccccttctgcgcctgcaccagcgccaacaacaacacctactggtgcatgagaaccatcaacgagacccacaacttcctgttctgcgagttcgccaccggcttcctggagtacttcgacctgaacaccgacccctaccagctgatgaacgccgtgaacaccctggacagagacgtgctgaaccagctgcacgtgcagctgatggagctgagaagctgcaagggctacaagcagtgcaaccccagaaccagaaacatggacctgggcctgaaggacggcggcagctacgagcagtacagaggccagctgtgggagggctgggagggctag

SEQ ID NO: 321765 - DNA, 2559 bp, Artificial Sequence
  derived and/or modified sequence
atgggaccacctagtcttgtattgtgcttattaagtgctacagtgttctcactgctgggcggctctagcgcttttctctctcaccacagacttaaaggacgattccagcgcgatcgtcgaaacatcaggccaaatatcatcttggttttgactgacgaccaagatgtagaactggggtccatgcaagtgatgaacaagacacgcaggataatggagcaggggggggcccatttcattaacgcgtttgtcaccacccccatgtgttgcccatcacggagctctatacttactggaaagtatgtacataatcacaatacatacacaaataatgaaaattgtagcagtccttcctggcaggcgcagcatgagtctcgcacgtttgccgtgtatctgaacagcaccggctaccgcacagctttctttggtaagtatctgaacgaatataatggcagctatgtgcccccaggatggaaagagtgggtgggtcttttgaagaacagtcgtttctacaactatacactgtgcagaaatggggtgaaagagaagcacggcagcgactatagtaaggattatctgacagatctcatcacgaacgacagtgtgagctttttccggacttcaaaaaagatgtatccccaccgccccgtcttgatggtgatatctcacgctgctccccacggacctgaggactccgcaccgcagtactcccgccttttcccaaatgcctcccagcacatcactccatcttacaattatgcccccaaccccgacaagcattggattatgagatacaccgggcctatgaagccaatccatatggagttcacaaatatgttacagaggaaacgcctgcagaccttgatgtcggtagacgattcgatggagacaatctacaatatgctggtagaaaccggagaacttgacaatacttacattgtgtatacggctgaccacggctatcacataggccagttcgggttggttaagggtaagtcgatgccatacgagttcgacatccgcgtccctttctacgtccggggtcctaacgttgaagccggatgtctcaatcctcacatcgtgctaaacatcgatctcgcccctactatcttggacatcgcaggtttggatattcccgcagacatggacggtaaaagtatcctgaagctgctcgatacggagcggcccgtgaatcgctttcacttgaagaaaaagatgcgtgtgtggcgcgatagcttcctggtcgagcgaggcaagcttctccataagagagacaacgacaaggtcgacgcccaggaggaaaatttcttgccaaagtatcaaagggtcaaggacctctgccagcgcgccgaatatcagaccgcatgcgaacaattgggacagaagtggcagtgcgtcgaagacgccacaggaaaactgaagttgcataagtgtaagggtcccatgcgtctgggagggagccgtgctctgtcaaacttagtgcctaaatattacggacaagggtccgaggcctgcacatgcgactcaggcgactataagctgtccctcgccggtcgaagaaagaagctattcaagaagaagtacaaagcttcatacgtccgctctcgctcaatccgaagcgttgcgatcgaggtcgacggacgtgtgtaccatgtgggcttgggcgacgcagcccagcccagaaacttaacaaagaggcattggcctggcgctcctgaggatcaggacgataaggacgggggtgatttcagcgggacgggaggactgcctgactattcagctgcaaatcctattaaggttactcaccgatgctacatccttgaaaacgatactgttcagtgcgacttggacttgtataagtcactacaggcttggaaggatcataagttgcacatcgaccacgaaatagagacactacagaacaaaatcaagaatctaagagaggtgagggggcatctgaaaaaaaagcggcccgaggaatgcgattgccacaagatcagctatcatacccagcataagggacggctgaagcaccgcggaagcagccttcacccattccgtaagggcctccaggagaaagacaaggtttggctgctccgcgaacagaaaaggaaaaagaaactgagaaaactcttgaaacgtcttcagaacaatgatacttgtagtatgccaggtctcacctgtttcactcatgataatcaacattggcagaccgccccattttggacactggggcccttctgcgcctgtacaagcgcaaacaacaacacctattggtgtatgcggacaattaatgagacccataatttcctgttctgcgaattcgccactggattcctggaatattttgaccttaacaccgatccctaccaactcatgaatgccgtgaatacgttggacagagacgtgctgaaccagttgcacgttcaactgatggagctgaggtcgtgtaagggctacaaacagtgcaacccacgaacgaggaatatggacctgggtctgaaggatgggggttcttacgagcagtacagaggacagttgtgggagggctgggagggttag

SEQ ID NO: 321766 - DNA, 2559 bp, Artificial Sequence
  derived and/or modified sequence
atgggcccccccagcctggtgctgtgcctgctgagcgccaccgtcttcagcctgctgggcggcagcagcgccttcctgagccaccaccggctgaagggccgcttccagagggacagaagaaacatccggcccaacatcatcctggtgctgacagatgaccaggatgtggagctgggctccatgcaggtgatgaacaagacccggcgcatcatggagcagggcggggcccacttcatcaatgcctttgtgaccacccccatgtgctgccccagccgcagcagcatcctgaccgggaagtatgtgcacaaccacaacacctacaccaacaatgaaaactgcagcagccccagctggcaggcccagcacgagagcaggacctttgctgtgtacctgaacagcacaggctacagaacagccttcttcggcaagtacctgaatgagtacaacggcagctatgtgcccccaggctggaaggagtgggtgggcctgctgaagaacagccgcttctacaactacaccctgtgcagaaatggagtgaaggagaagcacggcagtgactacagcaaggactacctgacagacctgatcaccaatgacagcgtgtccttcttccgcaccagcaagaagatgtacccccacaggcctgtgctgatggtgatcagccatgctgccccccacggcccagaagattctgccccccagtacagccgcctcttccccaatgccagccagcacatcacccccagctacaactatgcccccaacccagacaagcactggatcatgagatacacaggccccatgaagcccatccacatggagttcaccaacatgctgcagaggaagaggctgcagaccctgatgtctgtggatgacagcatggagaccatctacaacatgctggtggagaccggggagctggacaacacctacatcgtgtacacagctgaccacggctaccacatcggccagtttggcctggtgaagggcaagtccatgccctatgaatttgacatccgggtgcccttctacgtgcggggccccaacgtggaggccggctgcctgaacccccacatcgtgctgaacatcgacctggcccccaccatcctggacattgctggcctggacatcccagctgacatggatggcaagagcatcctgaagctgctggacacagagaggcctgtgaaccgcttccacctgaagaagaagatgagggtgtggagggacagcttcctggtggagcggggcaagctgctgcacaagagggacaatgacaaggtggatgcccaggaggagaacttcctgcccaagtaccagagggtgaaggacctgtgccagagagctgagtaccagacagcctgtgagcagctgggccagaagtggcagtgtgtggaggatgccaccgggaagctgaagctgcacaagtgcaagggccccatgaggctgggcggcagccgggccctgagcaacctggtgcccaagtactacggccagggcagcgaggcctgcacctgtgacagcggggactacaagctgagcctggccggccgcaggaagaagctgttcaagaagaagtacaaggccagctatgtgcgcagccgcagcatccgctctgtggccatcgaggtggatggccgggtgtaccacgtgggcctgggagatgctgcccagcccaggaacctgaccaagaggcactggccaggggcccctgaggaccaggatgacaaggatggaggagacttctctggaactggaggcctgcctgactacagcgctgccaaccccatcaaggtgacccaccgctgctacatcctggagaatgacacagtgcagtgtgacctggacctgtacaagagcctgcaggcctggaaggaccacaagctgcacatcgaccatgaaattgagaccctgcagaacaagatcaagaacctgcgggaggtgcggggccacctgaagaagaagaggccagaagaatgtgactgccacaagatctcctaccacacccagcacaagggccgcctgaagcaccggggcagcagcctgcaccccttcaggaagggcctgcaggagaaggacaaggtgtggctgctgcgggagcagaagaggaagaagaagctgaggaagctgctgaagaggctgcagaacaatgacacctgcagcatgcctggcctgacctgcttcacccatgacaaccagcactggcagacagcccccttctggaccctgggccccttctgtgcctgcaccagcgccaacaacaacacctactggtgcatgaggaccatcaatgagacccacaacttcctgttctgtgaatttgccaccggcttcctggagtactttgacctgaacacagacccctaccagctgatgaatgctgtgaacaccctggacagagatgtgctgaaccagctgcacgtgcagctgatggagctgcggagctgcaagggctacaagcagtgcaaccccaggaccaggaacatggacctgggcctgaaggatggcggcagctatgagcagtaccggggccagctgtgggagggctgggagggctag

SEQ ID NO: 321767 - DNA, 2559 bp, Artificial Sequence
  derived and/or modified sequence
atgggcccccccagcctggtgctgtgcctgctgagcgccaccgtgttcagcttacttggaggaagcagtgccttcctgtctcaccatcggcttaaaggccgcttccaacgagacaggcgcaatatccgcccaaacattatcttagttctcacagatgatcaagacgtggaactggggtcaatgcaggtcatgaacaagactaggaggatcatggagcagggcggcgcacatttcatcaacgccttcgtgacaacacccatgtgctgtccatcgcgctcttcgatcctgaccggcaaatatgttcacaaccacaacacctataccaataacgaaaattgttccagcccttcttggcaggctcaacacgaatccagaacttttgcagtatacctcaacagcactgggtacaggacagcattttttggaaagtacctgaacgagtacaatgggagttacgtccctcccggatggaaagagtgggtaggtctgttaaaaaactctaggttctacaattacaccctgtgtaggaacggagtgaaggagaagcatggcagcgattactcgaaagactatttaactgatctcatcacaaacgacagcgtttcctttttccgcacctctaagaagatgtacccccacaggccagtgttgatggtgatttcacacgccgcaccacacggtcctgaggactccgccccccagtattcccgcctcttcccaaatgcaagccagcacattactccctcttacaactatgcacctaatcccgacaaacattggatcatgcgctacaccggacccatgaagccgattcatatggagttcaccaacatgctgcagcgcaagcgcctgcaaacactcatgtcagtggacgatagtatggaaaccatctacaacatgctggttgagacaggagagctggataacacgtacatagtgtacacagctgaccacgggtaccatatagggcagttcggtctggtcaagggtaagagcatgccctacgagtttgatatccgcgtccccttttatgtgaggggtccgaacgtggaagccggctgtctcaatccacatatagtgctgaatatcgacctcgctcctacaatcttggacattgccggcctggatattcctgctgatatggatggcaagtcgatcctaaagctcctggacacggaacggcccgtcaaccgttttcacctgaaaaaaaaaatgcgcgtctggcgtgatagttttcttgtcgagagaggtaagcttctgcataagcgggacaacgacaaggtggatgcccaggaagaaaatttcttaccaaaatatcaacgggtcaaggacttgtgtcagagggcggaataccaaaccgcttgcgagcagttggggcaaaagtggcaatgcgtcgaagacgctaccggtaagctgaaacttcataagtgtaaaggccccatgcgtctgggagggtcaagggccttgtccaatttggtgccaaaatattatgggcagggatctgaggcatgtacatgtgattccggcgattacaagttgagtctggccgggaggcgcaagaaattgtttaagaagaaatacaaggccagttacgtacgctctagatcaattaggagtgttgccatagaggtggacggcagagtgtaccacgtggggctcggtgacgctgcacagccgagaaacctcacaaaaagacattggcccggggctccagaggatcaagatgataaagatggaggtgacttctcaggaaccgggggattacccgactattccgccgctaatcctatcaaagtgacacacaggtgctatattttagagaatgacaccgtccagtgcgatctggatctctacaaaagtcttcaggcgtggaaggaccacaagctgcacatcgaccacgagattgagacgcttcaaaacaaaatcaaaaaccttagagaggtccgcggacacttgaaaaaaaagaggccggaggaatgtgactgtcacaagatcagctaccacactcagcacaaagggcgcctgaaacaccggggttcttcgcttcatccttttaggaagggcctccaggagaaggacaaagtgtggctcttgcgggagcagaaaagaaaaaaaaagctgcggaagctcctgaagcgtctccaaaataacgatacttgcagcatgcccgggctgacatgttttactcatgataaccaacactggcagacagcaccattttggacactgggaccgttctgcgcatgtacttccgcaaataacaatacttactggtgcatgaggaccatcaatgaaacccacaacttcctgttctgcgaattcgccacgggatttcttgagtacttcgacctcaataccgacccctatcaactcatgaatgcggtaaatacgctggatcgggatgtgttaaaccagctgcacgtgcagcttatggaactccgttcttgcaagggctacaagcaatgtaacccccgcacaagaaacatggatcttggacttaaggatggtggaagctatgagcagtatcgggggcagctatgggagggatgggaagggtag

SEQ ID NO: 321768 - DNA, 2559 bp, Artificial Sequence
  derived and/or modified sequence
atgggccctccaagcctcgtgctttgtttacttagcgctaccgtgttcagcttgctcggcggaagctcagccttcctgtcacatcatagacttaaaggccgattccagcgcgacagaaggaatatacgtcctaacatcatcctggtcctgactgatgatcaggacgtcgagctgggcagtatgcaagttatgaataagaccaggcgcatcatggagcagggcggagcacactttattaatgcctttgtgaccacccctatgtgctgtccttcccggtcgtccattctgaccgggaagtacgttcataatcacaacacatacacgaataacgagaattgttcaagtccctcttggcaggcccagcacgaaagtcgcacgtttgcggtttatctgaactctaccggttacaggaccgccttttttggcaagtacctgaacgaatacaatggatcatatgttccccctggttggaaggagtgggtgggactcctgaaaaattcgcggttttataactataccctttgccgaaatggcgtgaaagagaagcacgggtctgactactctaaggactacctaactgacctgatcacaaatgacagtgtgtcattcttccggacctccaagaaaatgtatccacacaggcctgttctgatggtgatttcccatgcagcccctcatggaccagaggactctgctcctcagtatagcagactcttccccaacgcttctcagcacattactcctagttataattacgcacctaatcctgataagcactggatcatgcgctatacagggccaatgaaacctatacacatggagtttactaacatgctacagcggaagagactgcaaaccctcatgagtgtagacgatagcatggaaacaatctataacatgctcgtagaaacaggagaactcgacaatacctacatcgtctacaccgcagaccacggatatcacattggccagtttgggctggttaagggcaaatccatgccctatgaatttgatatcagggtgccattctatgtccgaggtccaaacgtcgaggctgggtgtttgaacccccacatagtgttgaacatcgacctggcgcctaccattctggatatcgctggcctggacatacccgcagatatggacggcaagtctatactcaagctgctcgatactgagcgaccagtcaaccggtttcaccttaaaaaaaagatgcgagtgtggagggatagctttctggtagagcggggtaaactgttgcacaaaagggataatgacaaagtggacgcgcaggaggagaatttcttacccaaataccagagagtcaaggatctttgccaacgggctgagtaccagaccgcgtgtgagcaactggggcagaagtggcaatgcgtggaagacgcgaccggaaagctgaagctgcacaaatgcaaaggcccaatgagacttggcggatcccgggctttgagcaacctggttccaaagtattacgggcaagggagcgaggcctgtacttgtgacagcggagactacaagctgtctttagctggacgtcggaagaaattgttcaagaagaaatataaagcttcctatgtccggagtagatctatccgatcagtcgccattgaggttgatgggagagtgtaccacgtcggcctcggggacgccgcacagcctcggaacttgaccaagcgtcactggcctggcgcacctgaagaccaggacgacaaggacggtggcgattttagtgggactggcggtttgccagactactctgccgctaacccaatcaaagtcactcacagatgctatatcctggaaaatgatactgtgcagtgcgacctcgatctttacaagtccttgcaggcatggaaagaccacaagttgcatattgatcacgaaattgagactttacaaaacaaaattaagaatttgcgagaggtgaggggacatctaaaaaagaagagacctgaggaatgcgattgtcacaagatttcttaccatacccaacacaagggtcggctgaaacatcgcggttccagcctgcatcccttcaggaaaggattgcaggaaaaagataaggtttggttgctgcgcgagcagaagcgcaaaaaaaaactgagaaagctgttaaaacggctgcagaataacgacacttgttccatgcccggattaacctgtttcacacacgacaaccaacattggcaaactgcgccattctggacgctggggccattttgcgcttgtacaagtgcaaacaacaacacgtactggtgtatgagaacaatcaatgaaacacacaattttctgttctgcgagttcgcaaccggatttctagaatattttgatctcaacaccgatccatatcaattgatgaacgccgtaaacacactcgaccgtgacgtccttaaccagctgcatgtgcaactcatggaactaaggtcttgtaagggctataagcaatgcaacccaagaaccaggaatatggacttgggcctgaaggatgggggttcctacgaacaataccgcggacaactgtgggagggatgggagggctag

SEQ ID NO: 321769 - DNA, 4183 bp, Artificial Sequence
  derived and/or modified sequence
gggccatttctggacaacagctgctattttcacttgagccgaagttaatttctcggggagttctcgggcgcgcacaggcagctcggtttgccctgcgattgagctgcgggtcgcggccggcgccggcctctccaatggcaaatgtgtgtggctggaggcgagcgcgaggctttcggcaaaggcagtcgagtgtttgcagaccggggcgagtcctgtgaaagcagataaaagaaaacatttattaacgtgtcattacgaggggagcgcccggccggggctgtcgcactccccgcggaacatttggctccctccagctccgagagaggagaagaagaaagcggaaaagaggcagattcacgtcgtttccagccaagtggacctgatcgatggccctcctgaatttatcacgatatttgatttattagcgatgccccctggtttgtgtgttacgcacacacacgtgcacacaaggctctggctcgcttccctccctcgtttccagctcctgggcgaatcccacatctgtttcaactctccgccgagggcgagcaggagcgagagtgtgtcgaatctgcgagtgaagagggacgagggaaaagaaacaaagccacagacgcaacttgagactcccgcatcccaaaagaagcaccagatcagcaaaaaaagaagatgggccccccgagcctcgtgctgtgcttgctgtccgcaactgtgttctccctgctgggtggaagctcggccttcctgtcgcaccaccgcctgaaaggcaggtttcagagggaccgcaggaacatccgccccaacatcatcctggtgctgacggacgaccaggatgtggagctgggttccatgcaggtgatgaacaagacccggcgcatcatggagcagggcggggcgcacttcatcaacgccttcgtgaccacacccatgtgctgcccctcacgctcctccatcctcactggcaagtacgtccacaaccacaacacctacaccaacaatgagaactgctcctcgccctcctggcaggcacagcacgagagccgcacctttgccgtgtacctcaatagcactggctaccggacagctttcttcgggaagtatcttaatgaatacaacggctcctacgtgccacccggctggaaggagtgggtcggactccttaaaaactcccgcttttataactacacgctgtgtcggaacggggtgaaagagaagcacggctccgactactccaaggattacctcacagacctcatcaccaatgacagcgtgagcttcttccgcacgtccaagaagatgtacccgcacaggccagtcctcatggtcatcagccatgcagccccccacggccctgaggattcagccccacaatattcacgcctcttcccaaacgcatctcagcacatcacgccgagctacaactacgcgcccaacccggacaaacactggatcatgcgctacacggggcccatgaagcccatccacatggaattcaccaacatgctccagcggaagcgcttgcagaccctcatgtcggtggacgactccatggagacgatttacaacatgctggttgagacgggcgagctggacaacacgtacatcgtatacaccgccgaccacggttaccacatcggccagtttggcctggtgaaagggaaatccatgccatatgagtttgacatcagggtcccgttctacgtgaggggccccaacgtggaagccggctgtctgaatccccacatcgtcctcaacattgacctggcccccaccatcctggacattgcaggcctggacatacctgcggatatggacgggaaatccatcctcaagctgctggacacggagcggccggtgaatcggtttcacttgaaaaagaagatgagggtctggcgggactccttcttggtggagagaggcaagctgctacacaagagagacaatgacaaggtggacgcccaggaggagaactttctgcccaagtaccagcgtgtgaaggacctgtgtcagcgtgctgagtaccagacggcgtgtgagcagctgggacagaagtggcagtgtgtggaggacgccacggggaagctgaagctgcataagtgcaagggccccatgcggctgggcggcagcagagccctctccaacctcgtgcccaagtactacgggcagggcagcgaggcctgcacctgtgacagcggggactacaagctcagcctggccggacgccggaaaaaactcttcaagaagaagtacaaggccagctatgtccgcagtcgctccatccgctcagtggccatcgaggtggacggcagggtgtaccacgtaggcctgggtgatgccgcccagccccgaaacctcaccaagcggcactggccaggggcccctgaggaccaagatgacaaggatggtggggacttcagtggcactggaggccttcccgactactcagccgccaaccccattaaagtgacacatcggtgctacatcctagagaacgacacagtccagtgtgacctggacctgtacaagtccctgcaggcctggaaagaccacaagctgcacatcgaccacgagattgaaaccctgcagaacaaaattaagaacctgagggaagtccgaggtcacctgaagaaaaagcggccagaagaatgtgactgtcacaaaatcagctaccacacccagcacaaaggccgcctcaagcacagaggctccagtctgcatcctttcaggaagggcctgcaagagaaggacaaggtgtggctgttgcgggagcagaagcgcaagaagaaactccgcaagctgctcaagcgcctgcagaacaacgacacgtgcagcatgccaggcctcacgtgcttcacccacgacaaccagcactggcagacggcgcctttctggacactggggcctttctgtgcctgcaccagcgccaacaataacacgtactggtgcatgaggaccatcaatgagactcacaatttcctcttctgtgaatttgcaactggcttcctagagtactttgatctcaacacagacccctaccagctgatgaatgcagtgaacacactggacagggatgtcctcaaccagctacacgtacagctcatggagctgaggagctgcaagggttacaagcagtgtaacccccggactcgaaacatggacctgggacttaaagatggaggaagctatgagcaatacaggggacaactgtgggaaggctgggaaggttaagaaacaacagaggtggacctccaaaaacatagaggcatcacctgactgcacaggcaatgaaaaaccatgtgggtgatttccagcagacctgtggtattggccaggaggcctgagaaagcaagcacgcactctcagtcaacatgacagattctggaggataaccagcaggagcagagataacttcaggaagtccatttttgcccctgcttttgctttggattatacctcaccagctgcacaaaatgcattttttcgtatcaaaaagtcaccactaaccctcccccagaagctcacaaaggaaaacggagagagcgagcgagagagatttccttggaaatttctcccaagggcgaaagtcattggaatttttaaatcataggggaaaagcagtcctgttctaaatcctcttattcttttggtttgtcacaaagaaggaactaagaagcaggacagaggcaacgtggagaggctgaaaacagtgcagagacgtttgacaatgagtcagtagcacaaaagagatgacatttacctagcactataaaccctggttgcctctgaagaaactgccttcattgtatatatgtgactatttacatgtaatcaacatgggaacttttaggggaacctaataagaaatcccaattttcaggagtggtggtgtcaataaacgctctgtggccagtgtaaaagaaaatccctcgcagttgtggacatttctgttcctgtccagataccatttctcctagtatttctttgttatgtcccagaactgatgttttttttttaaggtactgaaaagaaatgaagttgatgtatgtcccaagttttgatgaaactgtatttgtaaaaaaaattttgtagtttaagtattgtcatacagtgttcaaaaccccagccaatgaccagcagttggtatgaagaacctttgacattttgtaaaaggccatttcttggg

SEQ ID NO: 321770 - DNA, 249 bp, Artificial Sequence
  derived and/or modified sequence
atgcagtgcctgtacttcatcctgatcctgaagggctacttccaccagcagcaccacaccctgctgatcaccatcgccctgtgcttcctgcagcagcagcaggagaccaacctgctggccaacctgaccaccaacgacgccagagacaacagcaaggacttccagaacagcaaggtgggcgccgccgccaccagcagagacgagggcgagacccagaagtgcatccagaagcccctgcacgagaagtag

SEQ ID NO: 321771 - DNA, 249 bp, Artificial Sequence
  derived and/or modified sequence
atgcagtgcctgtacttcatcctgatcctgaagggctacttccaccagcagcaccacaccctgctgatcaccatcgccctgtgcttcctgcagcagcagcaggagaccaacctgctggccaacctgaccaccaatgatgcccgggacaacagcaaggacttccagaacagcaaggtgggcgccgccgccaccagcagagatgaaggagagacccagaagtgcatccagaagcccctgcacgagaagtag

SEQ ID NO: 321772 - protein, 276 aa, Artificial Sequence
  derived and/or modified sequence
MSRRKQAKPQHINSEEDQGEQQPQQQTPEFADAAPAAPAAGELGRSSLPSTFIRAPPTYVKVEVPGTFVGPSTLSPGMTPLLAAQPRRQAKQHGCTRCGKNFSSASALQIHERTHTGEKPFVCNICGRAFTTKGNLKVHYMTHGANNNSARRGRKLAIENTMALLGTDGKRVSEIFPKEILAPSVNVDPVVWNQYTSMLNGGLAVKTNEISVIQSGGVPTLPVSLGATSVVNNATVSKMDGSQSGISADVEKPSATDGVPKHQFPHFLEENKIAVS

SEQ ID NO: 321773 - DNA, 186 bp, Artificial Sequence
  derived and/or modified sequence
atggaggagagaagaccccacctggacgccagacccagaaacagccacaccaaccacagaggccccgtggacggcgagctgccccccagagccgagatcatgcccctgcacagcagcctgggcgacagaagcaagaccctgagccagaagaagaagagcttcttcctggtgctggcccccacctag

SEQ ID NO: 321774 - DNA, 186 bp, Artificial Sequence
  derived and/or modified sequence
atggaggagaggcgaccacacctggacgcaagaccccggaatagccacaccaaccaccggggcccagttgatggtgagctgcctccaagagcagaaatcatgcctctgcattcaagtctgggtgaccgttctaaaaccctatcacaaaagaagaaatcgttttttcttgtgttagctccgacatag

SEQ ID NO: 321775 - DNA, 186 bp, Artificial Sequence
  derived and/or modified sequence
atggaggagcggcggccccacctggatgcccggcccaggaacagccacaccaaccaccggggccctgtggatggagagctgccccccagggctgagatcatgcccctgcacagcagcctgggggacaggagcaagaccctgagccagaagaagaagagcttcttcctggtgctggcccccacctag

SEQ ID NO: 321776 - DNA, 186 bp, Artificial Sequence
  derived and/or modified sequence
atggaggagcggcggccccacctggacgcccggccccggaacagccacaccaaccataggggccccgtggacggtgagctccctccgagggctgagatcatgcccctgcacagctccctgggtgaccggtccaagaccctttcccagaaaaagaagagtttcttcctggtcctggcccctacttag

SEQ ID NO: 321777 - DNA, 186 bp, Artificial Sequence
  derived and/or modified sequence
atggaagagcggcgacctcatctagatgccaggccaagaaactctcatacaaatcatagaggcccagtagacggtgaactacctccaagagcagaaattatgcctttacattcttccctgggagaccggtccaaaactttgtcgcagaagaaaaagtctttcttcctggtgttggccccaacttag

SEQ ID NO: 321778 - DNA, 1174 bp, Artificial Sequence
  derived and/or modified sequence
cagttttccagataacagaaagtaacgtgaaggaattcaggtgactcagacatggaggagagaagacctcatctggatgccaggcccaggaattcccataccaaccacagaggccctgtggatggagagttaccaccaagagctgagatcatgccattgcactccagtctgggcgacaggagcaagactctgtctcaaaaaaaaaaatcattctttttagtcttagcacctacttaaggatccacttttagggctcacccacatttgtttctagatttacccctgcgctagagtaagcactttatctccagaactgagagcaaagttaacaaatctcaccccttctctcctgcaaattagtggacagactccctggaacatgtttggggcttccacctagggccacctagtggtatctctgggtctttacttggtcagatgtttattctacattgttccccaggaacagagtatgagctcattgatgcagaccgattctaattgccaggccctaatttgcagactaactctcataataaacagaggcccatagttgtttatgaactgcttatcccttaaaggagcacaagaacccctccctgccctccttgggcaccctgcctccaggagatggaggcacgtgataagacaaaagactgcaccaactcaccctgacacagttacatagtcactgagagtggggaagatgggacagcccacatgctgcataagatgggccttatgcagcaggcccaggtcgtcattaaggagtgacccctttcctgtaacctgcactttgggatggtagaagtttctttacctgctgacaggtttggtggcactgctggttacccctgggccctgaatggagctaaaatcacatttggtaccagcagcacctatcccaagtgtgatccttcatcccaacactccctcttggagctgttccctgggtagagctagcatgccagcagcttctgcaggctccaaacccaggccagaagccagacccaggcctgctgcctgcatctgcattccctccttccagtgttccttagaacagacatttaggtatctcaggtcctttctaagtgtccctttcctatgtatgcatttcctttttttgtctttactatgcactttagcttataaagccaattaaaaacaatgattg

SEQ ID NO: 321779 - DNA, 816 bp, Artificial Sequence
  derived and/or modified sequence
atgatcagataccagtaccccaccatggacgagctggccgagatgctgccccccgtgctgacccacctgagcctgaagagcatcatcggcatcggcgtgggcgccggcgcctacatcctgagcagattcgccctgaaccaccccgagctggtggagggcctggtgctgatcaacgtggacccctgcgccaagggctggatcgactgggccgccagcaagctgagcggcctgaccaccaacgtggtggacatcatcctggcccaccacttcggccaggaggagctgcaggccaacctggacctgatccagacctacagaatgcacatcgcccaggacatcaaccaggacaacctgcagctgttcctgaacagctacaacggcagaagagacctggagatcgagagacccatcctgggccagaacgacaacaagagcaagaccctgaagtgcagcaccctgctggtggtgggcgacaacagccccgccgtggaggccgtggtggagtgcaacagcagactgaaccccatcaacaccaccctgctgaagatggccgactgcggcggcctgccccaggtggtgcagcccggcaagctgaccgaggccttcaagtacttcctgcagggcatgggctacatccccagcgccagcatgaccagactggccagaagcagaacccacagcaccagcagcagcctgggcagcggcgagagccccttcagcagaagcgtgaccagcaaccagagcgacggcacccaggagagctgcgagagccccgacgtgctggacagacaccagaccatggaggtgagctgctag

SEQ ID NO: 321780 - DNA, 816 bp, Artificial Sequence
  derived and/or modified sequence
atgatccgctaccagtaccctaccatggacgagctggctgaaatgttgcctccggtgctcacacacctaagcctcaagagtatcatcggcattggagtgggtgctggtgcctacatcctaagtcgattcgccctgaaccacccagagcttgtcgagggattagttctgatcaacgtcgacccttgtgcgaagggctggatcgactgggctgcttccaagttgagcgggctgactaccaatgtggtcgacataattcttgcacatcactttggacaggaggaactgcaggcaaacctggatctgatccagacctatagaatgcatatcgcccaggacatcaatcaagataacctgcagctctttctgaattcgtataacgggcgccgcgatttagagatcgaaaggccgatcctcggccagaatgataacaaatcgaagacactgaaatgctccacattgttggtggtgggagacaacagtcccgcagtcgaggctgttgtggaatgtaattctcggctgaacccaatcaacacaaccctactgaagatggccgattgtggcggccttcctcaggtcgtccagcctggcaaactgactgaagcctttaaatacttcctgcaggggatggggtacatcccttccgcttctatgacacgacttgcccgaagcaggacccactctacttcatcttcactcggctcaggagagtccccgtttagccgtagtgtcacctctaaccagagcgacggtacacaggaaagctgtgagtctcctgatgttctagatcgtcatcaaactatggaggtgagttgctag

SEQ ID NO: 321781 - DNA, 816 bp, Artificial Sequence
  derived and/or modified sequence
atgatccgctaccagtaccccaccatggatgagctggccgagatgctgccccctgtgctgacccacctgagcctgaagagcatcattggaattggagtgggcgctggggcctacatcctgagcagatttgccctgaaccaccctgagctggtggagggcctggtgctgatcaacgtggacccctgtgccaagggctggattgactgggccgccagcaagctgagcggcctgaccaccaacgtggtggacatcatcctggcccaccacttcggccaggaggagctgcaggccaacctggacctgatccagacctacaggatgcacatcgcccaggacatcaaccaggacaacctgcagctgttcctgaacagctacaacggccggcgggacctggagattgagcggcccatcctgggccagaatgacaacaagagcaagaccctgaagtgcagcaccctgctggtggtgggggacaacagccctgctgtggaggccgtggtggagtgcaacagccggctgaaccccatcaacaccaccctgctgaagatggctgactgtggcggcctgccccaggtggtgcagcccgggaagctgacagaggccttcaagtacttcctgcagggcatgggctacatccccagcgcctccatgacccggctggcccggagcaggacccacagcaccagcagcagcctgggcagcggggagagccccttcagccgctctgtgaccagcaaccagagtgatggcacccaggagagctgtgagagcccagatgtgctggacagacaccagaccatggaggtgtcctgctag

SEQ ID NO: 321782 - DNA, 816 bp, Artificial Sequence
  derived and/or modified sequence
atgatccggtaccagtaccccaccatggacgagctggccgagatgctgccacccgtcttaacgcatctgtccctgaagtctattatcgggatcggcgttggagcaggagcctatattcttagcagattcgctctgaatcacccagagctggttgaggggctcgttctgatcaatgtcgacccctgcgcgaaggggtggatcgactgggccgccagtaaactctcaggacttaccacaaacgtggtggacatcattctagctcaccatttcggccaggaagagttacaggccaacctagacttgattcagacataccggatgcatattgcacaggatattaatcaggacaacttacagctttttttgaactcttacaatgggcggcgggatctagaaatcgagcgccccattctaggacaaaacgataataaaagtaaaacactcaagtgttctaccttactagtggtcggggataactcccctgcagtagaggcggtagtagaatgtaactcccgcctgaacccaatcaatacgactttgctgaaaatggctgactgcggcgggctgcctcaggtggtccagccgggaaagctaaccgaggcattcaagtatttcctgcagggaatggggtacataccgagcgccagtatgaccagactcgccaggtccaggactcacagcactagcagcagcctgggctctggggaaagccccttcagtagaagcgttacttcgaatcagagtgacggaactcaagagagctgtgagagtccagacgtacttgacagacaccagactatggaggtgagctgctag

SEQ ID NO: 321783 - DNA, 1332 bp, Artificial Sequence
  derived and/or modified sequence
actgacggcgggtgcccgcgcctcagagttactgatttattcttgagattcctctactctcgttatctgacctcatggatgaacttcaggatgttcagctcacagagatcaaaccacttctaaatgataaggtatcagtaccccacaatggatgagctggctgaaatgctgcctcctgttcttacccacctaagcctgaaaagcatcattggaattggagttggagctggagcttacatcctcagcagatttgcactcaaccatccagagcttgtggaaggccttgtgctcattaatgttgacccttgcgctaaaggctggattgactgggcagcttccaaactctctggcctgacaaccaatgttgtggacattattttggctcatcactttgggcaggaagagttacaggccaacctggacctgatccaaacctacagaatgcatattgcccaagacatcaaccaagacaacctgcagctcttcttgaattcctacaatggacgcagagacctggagatcgaaagacccatactgggccaaaatgataacaaatcaaaaacattaaagtgttctactttactggtggtaggggacaattcgcctgcagttgaggctgtggtcgaatgcaattcccgcctgaaccctataaatacaactttgctaaagatggcggactgtgggggactgccccaggtagttcagcctgggaagctcaccgaggccttcaagtactttttgcagggaatgggctacataccatctgccagcatgactcggctcgcccgatcacgaacccactcaacctcgagtagcctcggctctggagaaagtcccttcagccggtctgtcaccagcaatcagtcagatggaactcaagaatcctgtgagtcccctgatgtcctggacagacaccagaccatggaggtgtcctgctaagcagatgctcctcccctggaccattgcaagtccatccttcaaatgaccactccataatataacatttcatccagtaaactggcctctactatctttaactcatgcatggccactgaacctctctctagtagcctggatttatcattctctctgcctgcccacccccttttttgtatagcccaagaaccacttccatgccatactgtaacattccaacatctttagctgatcagatctctccatatcctctcttgccagctttttcccgtgctcccccaactatgtatcagataagattctttgatcccgactctgtgtgtgcgagcacgcgtgtctgtgtttgtgtgtgcatagttctgtggttttagacacgctttcttgtagtgcttctgc

SEQ ID NO: 321784 - DNA, 816 bp, Artificial Sequence
  derived and/or modified sequence
atgattaggtaccaatatcctactatggatgaattagctgagatgttgccccctgtgctgacccacctgtcactcaaaagtatcattggcattggggtgggcgctggagcgtacatcctgtcccggtttgcgttaaatcacccagagctggtagaaggactcgtccttattaatgtcgatccatgtgcgaaggggtggatagattgggcagcctctaaactgtctggtctgacaacgaatgtcgtggatatcatcctagctcaccacttcggccaggaagagctgcaggcaaaccttgaccttattcagacttacaggatgcacattgcccaggatataaatcaggacaatctgcagctgtttttgaattcttacaacggtaggcgcgatctcgaaattgaacggccaatactagggcagaatgataataagagcaaaaccctaaagtgctctaccctcctggtagtgggggataactctcccgctgtggaggctgtggtggaatgcaacagtagattaaatccgattaacaccaccctcctgaaaatggcagattgcggagggctgcctcaggtggttcaaccaggcaaactgacagaggcctttaaatactttctgcagggcatgggctacattccttccgcctcgatgacccgcttggccagatctcgaacccactcgacatccagttcactgggtagtggggagtcaccgttctccagatctgtgaccagtaatcaatccgatgggacgcaggagtcgtgcgagagccccgacgtgctcgaccggcaccaaaccatggaggtttcatgttag

SEQ ID NO: 321785 - protein, 280 aa, Artificial Sequence
  derived and/or modified sequence
MVQETSRTLTVRYQYPTMDELAEMLPPVLTHLSLKSIIGIGVGAGAYILSRFALNHPELVEGLVLINVDPCAKGWIDWAASKLSGLTTNVVDIILAHHFGQEELQANLDLIQTYRMHIAQDINQDNLQLFLNSYNGRRDLEIERPILGQNDNKSKTLKCSTLLVVGDNSPAVEAVVECNSRLNPINTTLLKMADCGGLPQVVQPGKLTEAFKYFLQGMGYIPSASMTRLARSRTHSTSSSLGSGESPFSRSVTSNQSDGTQESCESPDVLDRHQTMEVSC

SEQ ID NO: 321786 - DNA, 843 bp, Artificial Sequence
  derived and/or modified sequence
atggtgcaggagaccagcagaaccctgaccgtgagataccagtaccccaccatggacgagctggccgagatgctgccccccgtgctgacccacctgagcctgaagagcatcatcggcatcggcgtgggcgccggcgcctacatcctgagcagattcgccctgaaccaccccgagctggtggagggcctggtgctgatcaacgtggacccctgcgccaagggctggatcgactgggccgccagcaagctgagcggcctgaccaccaacgtggtggacatcatcctggcccaccacttcggccaggaggagctgcaggccaacctggacctgatccagacctacagaatgcacatcgcccaggacatcaaccaggacaacctgcagctgttcctgaacagctacaacggcagaagagacctggagatcgagagacccatcctgggccagaacgacaacaagagcaagaccctgaagtgcagcaccctgctggtggtgggcgacaacagccccgccgtggaggccgtggtggagtgcaacagcagactgaaccccatcaacaccaccctgctgaagatggccgactgcggcggcctgccccaggtggtgcagcccggcaagctgaccgaggccttcaagtacttcctgcagggcatgggctacatccccagcgccagcatgaccagactggccagaagcagaacccacagcaccagcagcagcctgggcagcggcgagagccccttcagcagaagcgtgaccagcaaccagagcgacggcacccaggagagctgcgagagccccgacgtgctggacagacaccagaccatggaggtgagctgctag

SEQ ID NO: 321787 - DNA, 843 bp, Artificial Sequence
  derived and/or modified sequence
atggtgcaggagacatcccgtacgctcacagtacgttaccagtatcctacaatggatgagctcgcagaaatgttaccacctgtgttgacccatctatctttgaagtccatcattgggatcggggtcggggcaggagcgtatatcttaagcagatttgctctgaatcaccccgagttagttgaagggctggtgctgatcaatgttgatccatgcgctaagggctggattgactgggcggcgtccaagctgtccggccttacaacaaatgtggtggacatcatacttgcccatcacttcggacaggaggagttgcaagctaaccttgatcttatccaaacgtaccgcatgcacattgcacaagacataaatcaagacaaccttcagctcttcttaaattcttataacgggcgcagggacctcgaaatcgagcgtcccatcctgggacaaaacgacaataagagtaaaactctgaagtgctctaccttgctagtggtgggagataactccccggcggtggaagcggtagtcgaatgtaattctagactgaaccctattaacaccactctgcttaaaatggccgattgtggaggactgcctcaggtcgtgcagccaggcaagctgacagaagcctttaagtatttcctccaaggcatggggtatatcccttctgccagcatgacaaggttggctagatccagaacacattccacatcatccagcctcggttctggtgaatcaccattttcaaggtctgtcaccagcaaccaatccgatggcactcaggagtcttgcgagagcccagatgtgctggatcgtcatcagactatggaagtctcatgctag

SEQ ID NO: 321788 - DNA, 843 bp, Artificial Sequence
  derived and/or modified sequence
atggtgcaggagaccagcaggaccctgactgtgcgctaccagtaccccaccatggatgagctggccgagatgctgccccctgtgctgacccacctgagcctgaagagcatcatcggcatcggcgtgggcgctggggcctacatcctgagcagatttgccctgaaccaccctgagctggtggagggcctggtgctgatcaacgtggacccctgtgccaagggctggattgactgggccgccagcaagctgagcggcctgaccaccaacgtggtggacatcatcctggcccaccacttcggccaggaggagctgcaggccaacctggacctgatccagacctacaggatgcacatcgcccaggacatcaaccaggacaacctgcagctgttcctgaacagctacaatggaagaagagacctggagattgaaagacccatcctgggccagaatgacaacaagagcaagaccctgaagtgcagcaccctgctggtggtgggggacaacagccctgctgtggaggccgtggtggagtgcaacagccggctgaaccccatcaacaccaccctgctgaagatggctgactgtggcggcctgccccaggtggtgcagcccgggaagctgacagaggccttcaagtacttcctgcagggcatgggctacatccccagcgcctccatgacccggctggcccggagcaggacccacagcaccagcagcagcctgggcagcggggagagccccttcagccgctctgtgaccagcaaccagagtgatggcacccaggagagctgtgagagcccagatgtgctggacagacaccagaccatggaggtgtcctgctag

SEQ ID NO: 321789 - DNA, 843 bp, Artificial Sequence
  derived and/or modified sequence
atggtgcaggagaccagccggaccctgaccgtgcggtaccagtacccaactatggacgaacttgctgaaatgcttccccccgtgctaactcacctgagcttgaaaagcataataggcattggtgtgggggcaggagcctatatcctgagcaggtttgccctgaatcaccctgaactggttgagggtctggttttgatcaacgtggacccttgcgcaaaaggttggatagattgggcagcgagcaaactgagtggcctgaccacgaatgtcgtggacataatcctcgcccatcatttcggacaggaggagctccaggctaacctggacttgatccagacctatcggatgcacatcgcccaggatataaatcaggataatctccaactgttcctgaacagttacaacggccgaagagacctagaaatcgagagaccgattctgggccagaatgacaataagtccaagactctcaaatgctcgacactgctcgtggtgggcgacaactctcctgcagtggaggcagtcgtggaatgtaactctaggctgaatcccattaacacaacgctcctgaaaatggccgattgcggaggactcccacaggtggtacaaccaggcaaactcacagaagccttcaaatattttctccagggcatgggttatatccccagcgcgagcatgactcggctcgcccgctcaaggactcactctacttcctcctcgctgggctctggcgagagtccattctcacgcagcgttacttccaatcagtctgacggcacacaggagagctgtgaatctcctgatgttctggacagacatcagaccatggaagtgtcgtgttag

SEQ ID NO: 321790 - DNA, 2098 bp, Artificial Sequence
  derived and/or modified sequence
tcagagttactgatttattcttgagattcctctactctcgttatctgacctcatggatgaacttcaggatgttcagctcacagagatcaaaccacttctaaatgataagaatggtacaagaaacttccaggactttgactgtcaggtatcagtaccccacaatggatgagctggctgaaatgctgcctcctgttcttacccacctaagcctgaaaagcatcattggaattggagttggagctggagcttacatcctcagcagatttgcactcaaccatccagagcttgtggaaggccttgtgctcattaatgttgacccttgcgctaaaggctggattgactgggcagcttccaaactctctggcctgacaaccaatgttgtggacattattttggctcatcactttgggcaggaagagttacaggccaacctggacctgatccaaacctacagaatgcatattgcccaagacatcaaccaagacaacctgcagctcttcttgaattcctacaatggacgcagagacctggagatcgaaagacccatactgggccaaaatgataacaaatcaaaaacattaaagtgttctactttactggtggtaggggacaattcgcctgcagttgaggctgtggtcgaatgcaattcccgcctgaaccctataaatacaactttgctaaagatggcggactgtgggggactgccccaggtagttcagcctgggaagctcaccgaggccttcaagtactttttgcagggaatgggctacataccatctgccagcatgactcggctcgcccgatcacgaacccactcaacctcgagtagcctcggctctggagaaagtcccttcagccggtctgtcaccagcaatcagtcagatggaactcaagaatcctgtgagtcccctgatgtcctggacagacaccagaccatggaggtgtcctgctaagcagatgctcctcccctggaccattgcaagtccatccttcaaatgaccactccataatataacatttcatccagtaaactggcctctactatctttaactcatgcatggccactgaacctctctctagtagcctggatttatcattctctctgcctgcccacccccttttttgtatagcccaagaaccacttccatgccatactgtaacattccaacatctttagctgatcagatctctccatatcctctcttgccagctttttcccgtgctcccccaactatgtatcagataagattctttgatcccgactctgtgtgtgcgagcacgcgtgtctgtgtttgtgtgtgcatagttctgtggttttagacacgctttcttgtagtgcttctgcaaaaaacaaaaaagggacttattttgcattctcaatggtgtttttaagggaattaggcagaacagatttctaggttgggtaggccactgcattctcttttgtttgcaaattggtcaacaaaatttgcaaagtgatttcaggagagagcagctttgaggaatgtggaaaatcataattgccgtctggaccattgattgattgtgaccagtagcagaagggtgcctgttacatagagaggctccttctgtccaaatgaatttctgtatactcttctataaataaaagggaggaatatattctgctggaagcccatgaaccatcgctgaggttctgatacaacatagagttttttccaaggagtgaatgtggtttaattactggactctcttagcacaggaaggtggaaacaaaatgccaggcctctgctctgaagagcaaaactgctgtcgctgcagtatctgataccagacatccacatatccacaagaagtgcctcttaggtctgtgacagagagtgtgtctccattcctcagttcccagaaaggggagaggtttggcctaaaaagcatgtagatgggggagaaatgggtggggggagaggaacagccattaacacagtatcatgtttaacaagtatagccttgatttcagtagatgtaatggaagccaaattaaattgatacagaacccatttctcagagtctttttttttttttgagacagagtctcgctgttacccaggctggagtgca

SEQ ID NO: 321791 - DNA, 843 bp, Artificial Sequence
  derived and/or modified sequence
atggtgcaggaaaccagcaggaccttaaccgtccgctaccaataccctactatggatgagttagccgagatgttaccgccagtcttaacccacctttccctgaagagcattattggcatcggggttggggctggagcatacattcttagcaggttcgcccttaaccatcccgaactggtcgagggcctggtgttgatcaacgtggacccttgcgctaagggatggattgactgggccgctagtaaactgtccggcctgaccacaaacgtggttgacatcatcctggcccaccacttcggacaggaggagttacaggcgaacctagatctcatccagacctatcgcatgcacatcgctcaggatattaatcaggacaacctgcagctctttctgaactcttataacggacgcagagacctggagatcgaacgcccaatcttaggccagaacgacaataagtctaagactcttaagtgctctacacttctggtggttggtgacaacagcccagcagttgaggctgttgttgaatgcaatagccgcttaaaccccatcaacacaactcttctgaagatggccgactgtggaggcttgccccaggtggtccagccaggcaaactaacggaggcttttaagtattttcttcagggcatggggtatatccctagcgcctccatgacacgcttggcacgcagtagaacacattccacttccagctcactgggctcaggcgaatcccccttcagtcgctccgtcacctctaaccagtctgacggtacgcaggagagctgcgagagtcctgacgtgctggaccggcaccagaccatggaggtcagttgctag

SEQ ID NO: 321792 - DNA, 288 bp, Artificial Sequence
  derived and/or modified sequence
atggcgcatttcaaggacgacctgcagaccaacgtcgagatcatacccggagagtcagcgcctcgcaaagagagtcccaggcccccagccccacccagtagcgcagcaggggtcggagggtgctctaaccactccccaagtgtgcaggagtcacctctctctcctccagctctcgcccaattggggtctgcccagcagcctagcatgagaaccgagctcagtttctccgagaagaaggatacaatgattatctggcaaatcaccattaccgtgtggtgtcaacgctag

SEQ ID NO: 321793 - protein, 1316 aa, Artificial Sequence
  derived and/or modified sequence
MSSGDPAHLGLCLWLWLGATLGREQVQASGLLRLAVLPEDRLQMKWRESEGSGLGYLVQVKPMAGDSEQEVILTTKTPKATVGGLSPSKGYTLQIFELTGSGRFLLARREFVIEDLKSSSLDRSSQRPLGSGAPEPTPSHTGSPDPEQASEPQVAFTPSQDPRTPAGPQFRCLPPVPADMVFLVDGSWSIGHSHFQQVKDFLASVIAPFEIGPDKVQVGLTQYSGDAQTEWDLNSLSTKEQVLAAVRRLRYKGGNTFTGLALTHVLGQNLQPAAGLRPEAAKVVILVTDGKSQDDVHTAARVLKDLGVNVFAVGVKNADEAELRLLASPPRDITVHSVLDFLQLGALAGLLSRLICQRLQGGSPRQGPAAAPALDTLPAPTSLVLSQVTSSSIRLSWTPAPRHPLKYLIVWRASRGGTPREVVVEGPAASTELHNLASRTEYLVSVFPIYEGGVGEGLRGLVTTAPLPPPRALTLAAVTPRTVHLTWQPSAGATHYLVRCSPASPKGEEEEREVQVGRPEVLLDGLEPGRDYEVSVQSLRGPEGSEARGIRARTPTLAPPRHLGFSDVSHDAARVFWEGAPRPVRLVRVTYVSSEGGHSGQTEAPGNATSATLGPLSSSTTYTVRVTCLYPGGGSSTLTGRVTTKKAPSPSQLSMTELPGDAVQLAWVAAAPSGVLVYQITWTPLGEGKAHEISVPGNLGTAVLPGLGRHTEYDVTILAYYRDGARSDPVSLRYTPSTVSRSPPSNLALASETPDSLQVSWTPPLGRVLHYWLTYAPASGLGPEKSVSVPGARSHVTLPDLQAATKYRVLVSAIYAAGRSEAVSATGQTACPALRPDGSLPGFDLMVAFSLVEKAYASIRGVAMEPSAFGGTPTFTLFKDAQLTRRVSDVYPAPLPPEHTIVFLVRLLPETPREAFALWQMTAEDFQPLLGVLLDAGKKSLTYFHRDPRAALQEATFDPQEVRKIFFGSFHKVHVAVGRSKVRLYVDCRKVAERPLGEMGSPPAAGFVTLGRLAKARGPRSSSAAFQLQMLQIVCSDTWADEDRCCELPASRDGETCPAFVSACSCSSETPGPPGPQGPPGLPGRNGTPGEQGFPGPRGEPGPPGQMGPEGPGGQQGSPGTQGRAVQGPVGPPGVKGEKGDHGLPGLQGHPGHQGIPGRVGLQGPKGMRGLEGTAGLPGPPGPRGFQGMAGARGTSGERGPPGTVGPTGLPGPKGERGEKGEPQSLATLYQLVSQASHVSKFDSFHENTRPPMPILEQKLEPGTEPLGSPGTRSKALVPGEWGRGGRHLEGRGEPGAVGQMGSPGQQGASTQGLWE

SEQ ID NO: 321794 - DNA, 3951 bp, Artificial Sequence
  derived and/or modified sequence
atgagcagcggcgaccccgcccacctgggcctgtgcctgtggctgtggctgggcgccaccctgggcagagagcaggtgcaggccagcggcctgctgagactggccgtgctgcccgaggacagactgcagatgaagtggagagagagcgagggcagcggcctgggctacctggtgcaggtgaagcccatggccggcgacagcgagcaggaggtgatcctgaccaccaagacccccaaggccaccgtgggcggcctgagccccagcaagggctacaccctgcagatcttcgagctgaccggcagcggcagattcctgctggccagaagagagttcgtgatcgaggacctgaagagcagcagcctggacagaagcagccagagacccctgggcagcggcgcccccgagcccacccccagccacaccggcagccccgaccccgagcaggccagcgagccccaggtggccttcacccccagccaggaccccagaacccccgccggcccccagttcagatgcctgccccccgtgcccgccgacatggtgttcctggtggacggcagctggagcatcggccacagccacttccagcaggtgaaggacttcctggccagcgtgatcgcccccttcgagatcggccccgacaaggtgcaggtgggcctgacccagtacagcggcgacgcccagaccgagtgggacctgaacagcctgagcaccaaggagcaggtgctggccgccgtgagaagactgagatacaagggcggcaacaccttcaccggcctggccctgacccacgtgctgggccagaacctgcagcccgccgccggcctgagacccgaggccgccaaggtggtgatcctggtgaccgacggcaagagccaggacgacgtgcacaccgccgccagagtgctgaaggacctgggcgtgaacgtgttcgccgtgggcgtgaagaacgccgacgaggccgagctgagactgctggccagcccccccagagacatcaccgtgcacagcgtgctggacttcctgcagctgggcgccctggccggcctgctgagcagactgatctgccagagactgcagggcggcagccccagacagggccccgccgccgcccccgccctggacaccctgcccgcccccaccagcctggtgctgagccaggtgaccagcagcagcatcagactgagctggacccccgcccccagacaccccctgaagtacctgatcgtgtggagagccagcagaggcggcacccccagagaggtggtggtggagggccccgccgccagcaccgagctgcacaacctggccagcagaaccgagtacctggtgagcgtgttccccatctacgagggcggcgtgggcgagggcctgagaggcctggtgaccaccgcccccctgcccccccccagagccctgaccctggccgccgtgacccccagaaccgtgcacctgacctggcagcccagcgccggcgccacccactacctggtgagatgcagccccgccagccccaagggcgaggaggaggagagagaggtgcaggtgggcagacccgaggtgctgctggacggcctggagcccggcagagactacgaggtgagcgtgcagagcctgagaggccccgagggcagcgaggccagaggcatcagagccagaacccccaccctggccccccccagacacctgggcttcagcgacgtgagccacgacgccgccagagtgttctgggagggcgcccccagacccgtgagactggtgagagtgacctacgtgagcagcgagggcggccacagcggccagaccgaggcccccggcaacgccaccagcgccaccctgggccccctgagcagcagcaccacctacaccgtgagagtgacctgcctgtaccccggcggcggcagcagcaccctgaccggcagagtgaccaccaagaaggcccccagccccagccagctgagcatgaccgagctgcccggcgacgccgtgcagctggcctgggtggccgccgcccccagcggcgtgctggtgtaccagatcacctggacccccctgggcgagggcaaggcccacgagatcagcgtgcccggcaacctgggcaccgccgtgctgcccggcctgggcagacacaccgagtacgacgtgaccatcctggcctactacagagacggcgccagaagcgaccccgtgagcctgagatacacccccagcaccgtgagcagaagcccccccagcaacctggccctggccagcgagacccccgacagcctgcaggtgagctggaccccccccctgggcagagtgctgcactactggctgacctacgcccccgccagcggcctgggccccgagaagagcgtgagcgtgcccggcgccagaagccacgtgaccctgcccgacctgcaggccgccaccaagtacagagtgctggtgagcgccatctacgccgccggcagaagcgaggccgtgagcgccaccggccagaccgcctgccccgccctgagacccgacggcagcctgcccggcttcgacctgatggtggccttcagcctggtggagaaggcctacgccagcatcagaggcgtggccatggagcccagcgccttcggcggcacccccaccttcaccctgttcaaggacgcccagctgaccagaagagtgagcgacgtgtaccccgcccccctgccccccgagcacaccatcgtgttcctggtgagactgctgcccgagacccccagagaggccttcgccctgtggcagatgaccgccgaggacttccagcccctgctgggcgtgctgctggacgccggcaagaagagcctgacctacttccacagagaccccagagccgccctgcaggaggccaccttcgacccccaggaggtgagaaagatcttcttcggcagcttccacaaggtgcacgtggccgtgggcagaagcaaggtgagactgtacgtggactgcagaaaggtggccgagagacccctgggcgagatgggcagcccccccgccgccggcttcgtgaccctgggcagactggccaaggccagaggccccagaagcagcagcgccgccttccagctgcagatgctgcagatcgtgtgcagcgacacctgggccgacgaggacagatgctgcgagctgcccgccagcagagacggcgagacctgccccgccttcgtgagcgcctgcagctgcagcagcgagacccccggcccccccggcccccagggcccccccggcctgcccggcagaaacggcacccccggcgagcagggcttccccggccccagaggcgagcccggcccccccggccagatgggccccgagggccccggcggccagcagggcagccccggcacccagggcagagccgtgcagggccccgtgggcccccccggcgtgaagggcgagaagggcgaccacggcctgcccggcctgcagggccaccccggccaccagggcatccccggcagagtgggcctgcagggccccaagggcatgagaggcctggagggcaccgccggcctgcccggcccccccggccccagaggcttccagggcatggccggcgccagaggcaccagcggcgagagaggcccccccggcaccgtgggccccaccggcctgcccggccccaagggcgagagaggcgagaagggcgagccccagagcctggccaccctgtaccagctggtgagccaggccagccacgtgagcaagttcgacagcttccacgagaacaccagaccccccatgcccatcctggagcagaagctggagcccggcaccgagcccctgggcagccccggcaccagaagcaaggccctggtgcccggcgagtggggcagaggcggcagacacctggagggcagaggcgagcccggcgccgtgggccagatgggcagccccggccagcagggcgccagcacccagggcctgtgggagtag

SEQ ID NO: 321795 - DNA, 3951 bp, Artificial Sequence
  derived and/or modified sequence
atgtcttccggggacccagctcacttggggctgtgtctgtggctttggctgggggccacactcgggagggagcaggtccaggcttctggcctcctccggctggccgtgttgcctgaagacaggttgcagatgaaatggagggaaagtgagggaagcggactgggatacctggtgcaggttaagcctatggccggagatagcgaacaggaggtcatactgacaaccaaaactcccaaggctacagttggaggattgtctccttcaaaaggttacacactacaaatctttgaactgactggctccgggcgctttttactggctcggcgcgagttcgttatagaggacctcaagtctagctccttggacaggtcctcccaaaggccgctcggaagcggtgcacctgaacctactccctcccataccggctctccagaccctgaacaagcaagcgagccacaggtggccttcactccgagtcaggatccaagaacacctgctggcccacaatttaggtgcttacccccagtgccagctgacatggtgttccttgtggatgggtcctggtccatcgggcacagtcactttcagcaggtcaaggatttcctggccagtgttatcgcaccattcgaaattgggcctgacaaagtgcaggttggcttgacacagtactcaggcgatgcccagactgaatgggatttaaactccctgtccaccaaggagcaggttctggccgcagtgcgtaggctccgatacaagggtggcaatacattcactgggctggcactgacgcacgtacttgggcagaatttgcagcctgctgctggtctgagaccagaggctgcaaaagtggttattctggtgactgacgggaagtcccaggacgacgtgcacaccgcagccagggttttgaaagatttaggcgtgaatgtgttcgccgtcggtgttaaaaatgccgacgaagctgaattaaggctgctggcctccccgccgagggacataacagttcattcggtgttggattttcttcagttaggggcgctggccggcttgctgagccgacttatttgtcaacgcctccaagggggaagtccaaggcaggggcccgccgccgccccagccctcgacacactgcctgcccctacctccctggttctgagtcaggtgacatcgtcttcaattcgactgtcgtggacccctgcacctaggcatccgctaaaatacctgatcgtttggagagccagtcggggaggcacaccgagagaggtcgtcgtcgagggccctgcagctagcacagagttgcacaatctagccagccggactgagtatttggtgagcgtgttcccgatttatgaaggcggagtcggagagggcttgcgcggcctggtgactacggccccactgccaccgccacgggctctgactttggccgccgtcacccctcgcaccgtgcatctaacttggcagccctccgcaggcgcaacccattacctcgtgcgctgtagccccgcttctccaaagggagaagaggaagaacgagaggtgcaggttggaaggccagaggtgctgttggacgggctggagccaggaagagactatgaagtgtctgtccagagtctgcgcggccccgaagggagtgaggctcgagggatccgcgccagaacacctacactggctcctccacggcacctaggatttagcgatgtaagccatgatgctgctcgagtgttctgggagggggcaccaagacctgtcagattggttagggtaacctacgtcagttcggagggcggccatagcggtcaaacggaagctcccggcaatgcgacgagcgctacactcgggcctctgtcctcatccactacttatacagttcgagtcacatgcttgtaccctggcggtggcagctccaccttgacggggagagtgaccaccaaaaaggcccctagtccatcccaactttccatgaccgaactgcccggcgacgccgtgcaacttgcctgggtagccgccgccccatcaggcgtcctcgtgtatcagatcacatggactccgttaggagagggtaaggcccatgagatatcggtcccagggaacctgggaacagccgtgttacccggactaggtagacacacagagtacgatgtcactatacttgcctattatcgggacggtgccagatctgaccccgtttcacttcggtacacgccctcaacagttagccgcagcccacctagcaatctggcactcgcatccgagactccggacagtctgcaggtgtcttggacccccccactggggagagtcctacattattggctgacctacgccccagcttctggactgggacctgaaaagagtgttagtgtgcccggcgctcgcagccacgttacattgccagatctccaggccgccacaaagtatagagttttagtgtcagcaatctatgcagccgggcgcagcgaggccgtgtccgctactggccaaactgcctgtccagctctgaggccagacggcagccttcccggtttcgacctcatggtggcatttagtcttgtggagaaagcttatgcaagcataagaggggtggcgatggaacccagtgccttcggaggcacccctaccttcaccctctttaaggatgcccaacttacccgccgagtgtctgatgtgtaccctgctccccttccccccgaacataccatcgtcttccttgttcggctgctccctgagaccccaagagaggccttcgcgctgtggcagatgactgcagaggactttcagcctctgctaggagtccttctggatgccgggaaaaaatccctgacctacttccatcgggacccccgcgccgccttgcaggaggccaccttcgatccccaggaggtgagaaagatctttttcgggagctttcacaaggtgcacgtggcagtcggtcggtccaaagtcagattatacgtcgattgcagaaaggtggccgaacgtccccttggggaaatggggtcccccccagcagccggatttgtgaccctgggacggctggccaaagctcgtggtccccggagtagctccgccgcttttcagctgcagatgctccaaatagtatgtagcgatacttgggccgatgaagacagatgttgtgaactacccgcttcccgggacggagagacctgcccagcctttgtgtctgcttgctcttgttctagcgagaccccaggacccccagggcctcaaggcccgccaggactgcctggtcgaaacggcacccctggtgaacagggattccccgggcccaggggtgagcccggtccgccaggacagatgggccccgagggccccggaggacaacagggaagtccagggacacaggggcgcgccgtccagggacctgtgggtccgcctggcgtgaaaggcgaaaaaggcgaccacggcctgcctgggctgcagggacatccggggcaccaggggataccaggtagagtcggactgcaagggcccaaagggatgcgaggcctggagggtaccgccggactgccgggcccgcctggaccaagggggttccaaggaatggccggcgcccgcggcacgagcggcgaacgtggacctccgggtacagtcgggcctactggtctacctggaccaaagggggaaaggggagagaaaggcgagccccagtctctcgccacactctaccaacttgtgtcccaggcctctcacgtgtccaagtttgacagttttcatgaaaatacaagacctcctatgccaatactggagcagaagctggaacctgggaccgaaccactggggtctcccggcactcggtccaaggcattggtccccggagagtggggcaggggaggcagacatttagaaggtaggggggagccaggcgccgtgggccagatggggagccccgggcagcaaggcgctagcacacaagggctttgggaatag

SEQ ID NO: 321796 - DNA, 3951 bp, Artificial Sequence
  derived and/or modified sequence
atgagcagcggggaccctgcccacctgggcctgtgcctgtggctgtggctgggcgccaccctgggccgggagcaggtgcaggccagcggcctgctgcggctggccgtgctgcctgaagatcggctgcagatgaagtggagggagagcgagggcagcggcctgggctacctggtgcaggtgaagcccatggccggggacagcgagcaggaggtgatcctgaccaccaagacccccaaggccaccgtgggcggcctgagccccagcaagggctacaccctgcagatctttgagctgactggaagtggccgcttcctgctggcccggcgggagtttgtgattgaggacctgaagagcagcagcctggacaggagcagccagaggcccctgggcagcggggcccctgagcccacccccagccacacaggcagcccagaccctgagcaggccagcgagccccaggtggccttcacccccagccaggaccccaggaccccagctggcccccagttccgctgcctgccccctgtgcctgctgacatggtgttcctggtggatggctcctggagcatcggccacagccacttccagcaggtgaaggacttcctggccagcgtcatcgccccctttgaaattggaccagacaaggtgcaggtgggcctgacccagtacagcggagatgcccagacagagtgggacctgaacagcctgagcaccaaggagcaggtgctggccgctgtgcggcggctgcgctacaagggcggcaacaccttcaccggcctggccctgacccacgtgctgggccagaacctgcagcctgctgctggcctgcggcctgaggccgccaaggtggtgatcctggtgacagatggcaagagccaggatgatgtgcacacagctgcccgggtgctgaaggacctgggcgtgaatgtgtttgctgtgggcgtgaagaatgctgatgaagctgagctgcggctgctggccagccccccccgggacatcaccgtgcacagcgtgctggacttcctgcagctgggcgccctggccggcctgctgagccgcctcatctgccagaggctgcagggcggcagcccccggcagggccctgctgctgccccagccctggacaccctgcctgcccccaccagcctggtgctgagccaggtgaccagcagcagcatccggctgtcctggaccccagcccccaggcaccccctgaagtacctgattgtgtggagggccagccggggcggcaccccccgggaggtggtggtggagggccctgctgccagcacagagctgcacaacctggccagcaggacagagtacctggtgtctgtgttccccatctatgagggcggcgtgggggagggcctgcggggcctggtgaccacagcccccctgcccccaccccgggccctgaccctggccgctgtgacccccaggacagtgcacctgacctggcagcccagcgctggggccacccactacctggtgcgctgcagccctgccagccccaagggggaggaggaggagcgggaggtgcaggtgggccggcctgaggtgctgctggatggcctggagcccggccgggactatgaggtgtctgtgcagagcctgcggggccctgagggcagcgaggcccggggcatccgggcccggacccccaccctggccccacccaggcacctgggcttcagtgatgtgtcccatgatgctgcccgggtcttctgggagggcgcccccaggcctgtgcggctggtgcgggtgacctacgtgagcagcgagggcggccacagcggccagacagaggcccctggaaatgccaccagcgccaccctgggccccctgagcagcagcaccacctacacagtgcgggtgacctgcctgtacccaggcggcggcagcagcaccctgaccggccgggtgaccaccaagaaggcccccagccccagccagctgtccatgacagagctgcctggagatgctgtgcagctggcctgggtggccgccgcccccagcggcgtgctggtgtaccagatcacctggacccccctgggggagggcaaggcccacgagatctctgtgcccggcaacctgggcacagctgtgctgcccggcctgggccgccacacagaatatgatgtgaccatcctggcctactacagagatggagcccggagtgaccctgtgtccctgcgctacacccccagcacagtgagccgcagcccccccagcaacctggccctggccagcgagaccccagacagcctgcaggtgtcctggaccccacccctgggccgggtgctgcactactggctgacctacgccccagccagcggcctgggccctgagaagtctgtgtctgtgcctggggcccggagccacgtgaccctgcctgacctgcaggccgccaccaagtacagagtgctggtgtctgccatctatgctgctggccgctctgaggccgtgtctgccaccggccagacagcctgcccagccctgcggccagatggcagcctgcccggctttgacctgatggtggccttcagcctggtggagaaggcctatgccagcatccggggcgtggccatggagcccagcgcctttggaggcacccccaccttcaccctcttcaaggatgcccagctgaccaggagagtgtctgatgtgtacccagcccccctgcccccagagcacaccatcgtgttcctggtgcggctgctgcctgagaccccccgggaggcctttgccctgtggcagatgacagctgaggacttccagcccctgctgggcgtgctgctggatgctgggaagaagagcctgacctacttccaccgggacccccgggccgccctgcaggaggccacctttgacccccaggaggtgaggaagatcttcttcggcagcttccacaaggtgcacgtggccgtgggccgcagcaaggtgcggctgtatgtggactgcaggaaggtggccgagcggcccctgggggagatgggcagccccccagctgctggctttgtgaccctgggccgcctggccaaggcccggggccccaggagcagcagcgctgccttccagctgcagatgctgcagatcgtgtgcagcgacacctgggcagatgaggaccgctgctgtgagctgcctgccagcagagatggagagacctgcccagcctttgtgtctgcctgcagctgcagcagcgagaccccaggccccccaggcccccagggccccccaggcctgcctggaagaaatggcaccccaggagagcagggcttccctggccccagaggagagcccggccccccaggccagatgggccctgagggccctgggggccagcagggcagccctggcacccagggccgggctgtgcagggccctgtgggccccccaggagtgaagggggagaagggggaccacggcctgcccggcctgcagggccaccctggccaccagggcatccctggccgggtgggcctgcagggccccaagggcatgaggggcctggagggcacagctggcctgcccggccccccaggcccccggggcttccagggcatggccggggcccggggcaccagcggggagcggggccccccaggcaccgtgggccccaccggcctgcccggccccaagggggagcggggggagaagggggagccccagagcctggccaccctgtaccagctggtgtcccaggccagccacgtgtccaagtttgacagcttccacgagaacaccaggcctcccatgcccatcctggagcagaagctggagcccggcacagagcccctgggcagccctggcaccaggagcaaggccctggtgcctggagagtggggccggggcggccgccacctggagggccgcggggagcctggagctgtgggccagatgggcagccctggccagcagggcgccagcacccagggcctgtgggagtag

SEQ ID NO: 321797 - DNA, 3951 bp, Artificial Sequence
  derived and/or modified sequence
atgagcagcggcgaccccgcccacctgggcctgtgcctgtggctgtggttgggagctactcttggccgcgaacaggtgcaggcttctggtctgctgcgactggccgtgctcccagaggacaggcttcagatgaagtggcgcgagtcagaaggctctggattggggtatctggtgcaggtgaagccaatggcaggcgactccgaacaggaagtcatactgacgaccaagactcctaaagcaactgttggtggcctgtcaccttcaaagggctatactctgcaaattttcgagctgacagggtccggacggtttctcctcgcgagacgagagttcgtaatcgaagacctgaaatcaagcagtctggatagatcttcacaaagacccctcggtagcggggcgcctgaaccaactccttcgcacaccgggtcaccagatccagagcaggcgagcgagcctcaggttgcattcaccccgtcccaggatcccaggacccctgcaggacctcaatttcggtgccttcccccagtgcccgccgacatggtctttctggtggacggatcatggagcatagggcactctcactttcaacaagtgaaagattttctagctagcgtgatcgcacctttcgaaattggtccagacaaggttcaggtcggccttacgcagtactcgggcgacgcacagacagagtgggatctgaatagcctcagcacaaaggaacaggttcttgccgctgtgagaagactcagatataaaggcggaaacacctttacgggactggcgctaacccatgtactgggccagaatctgcagcccgcggctggcctgcgaccagaggcggctaaagtagtgattctagtgaccgacggcaagtcacaggatgatgtgcataccgcagcacgcgtccttaaggacctgggggttaatgtgtttgcagtgggagttaagaacgccgatgaggccgagcttcgattactggcctcacctccccgtgacattaccgtgcactcagtgctggatttcctgcagctgggcgctttagccggactcctgtctcgcctcatttgccagcgtcttcagggcggcagtcctcggcagggaccagctgctgcccccgcgttggacaccttgcctgccccgactagccttgtactgtcccaggtcacttcgtcatccattcgcctctcatggacaccagccccacggcacccactgaagtatttgatcgtctggagggcatccagaggaggcacgccacgtgaagtggtggtcgagggccctgcagcctctaccgaacttcataatcttgcaagccggactgagtacctggtcagtgtgtttcctatttacgagggtggagtgggcgaggggcttaggggcttggtaacgactgcacccttgcctccacccagagcattgacactagccgccgttaccccacggaccgtgcatcttacctggcagcccagtgcgggggccacccattatctggtgaggtgctctcccgcttccccgaagggtgaggaagaggagagagaggtgcaggttggtcgaccggaagttttgcttgacggtctggagcccggcagagattacgaagtctcagtgcaatcccttcggggacctgaaggcagcgaagcccgcggtatacgggccagaaccccaacactagctccacccaggcatctgggattttccgatgtctcgcacgatgccgcgcgcgttttttgggaaggagccccccgaccagtccgcttggttagggtgacctacgtgtcaagcgaaggggggcatagtggacagacagaggcccctgggaacgctaccagcgcaacactcggcccgttgtcctcatctaccacttacaccgtgcgggtgacctgcctgtatcccggaggaggatccagcacacttaccggacgggtcacaaccaaaaaggctcctagccctagccagctttctatgacggagctccctggcgatgccgtgcagcttgcctgggtcgccgcagcaccttcaggagtgttggtttaccagataacctggacaccactgggtgagggcaaggcccacgagatcagcgttcctggaaacttggggactgcagtgctgcccggactcggcaggcacacagaatatgacgtgaccatcttagcctactaccgtgacggcgcccgaagtgacccagtttccctgcgctatacaccttcaactgtttccagaagcccacccagtaatctggccttggcttcagaaaccccagacagcctccaggtcagctggacaccccccctgggtagagtgttgcactactggctgacatatgctccagcgtctgggctcgggcctgagaaatccgtttccgtgcccggggctcgaagccacgtgacactgccagacttacaagccgccactaagtacagggtcctggtgtccgcaatttatgccgcaggtcgctcagaagccgtaagtgccacagggcaaaccgcatgtcccgcactacggcccgatggaagcttgccggggttcgatctgatggtcgcgttctctctagtggagaaagcctacgctagcattaggggggttgccatggagccttccgctttcgggggcactccaacctttactctgtttaaggacgcccaactgacaaggcgcgtctcagatgtctatcccgcgcctttgcccccagagcatacaatcgtttttctggtacgtctgctgcctgaaactccccgagaggcctttgcgctctggcagatgacagctgaggatttccaacccctgctgggggtgctcttagatgccgggaaaaagtccctaacatatttccatcgagatccccgagcagccctgcaggaggcgacatttgatccacaggaagtcaggaagatttttttcggctcatttcacaaggttcatgtcgcagtggggcgctccaaagtgcgcctgtatgtggactgccgcaaggtagccgagcgacccctcggagagatgggcagccccccggccgccggctttgtgactttaggcagactcgccaaggctcgcggtccccgcagcagcagcgccgccttccagcttcaaatgctgcagattgtttgcagcgatacctgggcagatgaggatcgctgctgtgaattgccagcgtcacgcgatggcgaaacatgcccagctttcgtctccgcctgcagctgcagttctgaaactcccggacccccaggtccacaggggcccccgggattaccaggaagaaatgggacccccggcgagcagggctttcccggccccaggggggagccggggcctccaggacagatgggccccgagggcccgggaggacaacaggggtcccccggtacccaggggcgggctgtacaggggcccgtcggacctcctggagtgaaaggcgagaagggggaccacggacttcccggcctccagggacacccgggccaccaaggcattcccgggagagtgggcttgcagggtccgaagggcatgcgggggctggagggtactgcgggcctgcccggccctcccggaccaagaggcttccagggaatggcgggtgcacggggcacatccggggagcgagggccgcccgggacagttggacctactggcctgccaggtccaaagggggaacggggtgagaagggcgagccccaaagcctggccaccctgtaccagttagtttctcaggcatcccacgtatctaagttcgattcgtttcatgagaatactcggccacccatgccaatattagaacaaaagttggaaccaggtaccgaaccactagggtcacctggaacaaggagcaaagcacttgttccgggggaatggggccggggcggtcgtcatctcgaagggcgcggagagccaggagccgtcggtcagatgggcagccctggccaacagggggcttccactcagggtctctgggagtag

SEQ ID NO: 321798 - DNA, 4267 bp, Artificial Sequence
  derived and/or modified sequence
ataagctccagccttcctgtggccacagcaggaccagagtggaccagcacaccccaggagagaggactggggtcccaggagtaggaggagcccgagcaccatgagctccggagaccctgcacacctcggcctctgcctctggctgtggctgggcgccaccctgggaagagagcaagttcaagcaagcggtctcctgaggctggctgtgctgcctgaggaccggctgcagatgaagtggagagagtcggaggggagcggcctcggctacctggtgcaggtgaagcccatggcaggggactcggaacaggaggtgatactgaccaccaagacccctaaggccacagtggggggcctgagcccctccaagggctacaccttgcagatcttcgagctcactggctctgggcgcttcctgctagctcggagggagtttgtgattgaggatctgaagagtagctccctggacaggagcagccagaggcccctcggctctggagccccggagcccaccccctcccacacggggagcccagaccctgagcaggcttctgagccccaagttgccttcacaccaagccaggatccgcgcactcctgccggcccccagttccgctgcctgccccccgtgcctgctgacatggtcttcctggtggacgggtcctggagcattggccacagtcacttccagcaggtcaaggacttcctggccagtgtcatcgcaccctttgaaatcgggccggataaggtccaagtaggcctgactcagtacagcggggatgctcagactgagtgggacctgaactccctcagcaccaaggaacaggtgctggcagctgtgcgccgcctccgctacaagggggggaacacgttcacaggccttgccctgacccacgtgctggggcagaacctgcagccggcggctggcctccgtccagaggcagccaaggtggtgattctggtgacggacggcaagtcccaggacgatgtgcacactgctgcccgtgtcctcaaggacctgggcgtgaacgtcttcgctgtgggtgtgaagaacgccgatgaggctgagctgaggctcctggcgtccccgccgagggacatcaccgtccacagcgtgctggacttcctgcagctcggcgcgctggctggcctgctcagccgtctcatctgccagaggctccagggtgggagcccgcggcagggcccagcagcggctccagccctggacaccctccctgcccccaccagcctggtcctgagccaggtgacctcctccagcatccgcctgtcctggactccagccccccggcaccccctcaagtatctgatcgtttggcgagcctctagaggtggcacccccagggaggtggtggtggagggacccgccgcctccacggagctgcacaacctggcctcccgcacagagtacctggtctccgtgttccccatctatgagggcggggttggcgaaggcctgcggggcctggtgaccacagcacctctgcctccgccccgggcgctgaccctggccgcagtgacgcccagaaccgtccacctcacctggcagccctcggccggggccacccactacctggtgcgatgttctcctgcttcccccaagggtgaagaggaggagcgagaggtgcaggtcgggcggcccgaggtgctgctggatggcctggaacctggcagggactatgaggtctcggtgcagagcctgcgaggccctgagggcagcgaggcccggggcatccgtgccaggacccccaccctggcccccccgagacacctgggcttctcagacgtgagccacgacgcggcacgagtgttctgggagggtgccccgaggcctgtgcgcctggtcagggtcacctatgtgtccagcgagggtggacactcggggcagacagaggctcctgggaacgccacctcggccacgctggggcctctctcttcctccaccacctacactgtccgtgtcacctgcctctaccctgggggtggctcctctacgctgactggccgggtgaccaccaagaaagctcccagcccaagccagctgtccatgacggagctgccaggggatgcagtccagctggcgtgggtggccgcagccccgtctggcgtgcttgtctaccagatcacgtggacgcccctgggagaggggaaggctcacgagatctctgtcccagggaacctcggcacggccgtcctgcctggcctagggaggcacacagagtacgacgtcaccatcttggcctactacagggacggggcccgcagtgaccctgtgtccctccgctataccccctccacggtgagcaggagcccaccctccaacctggccctggcctcggagacccccgacagcctgcaggtcagctggacgcccccgcttggccgcgtgctccattactggctcacctacgcccccgcctctggcttgggacccgagaaatccgtctctgtgccaggagccaggagccacgtgacactgcccgacctgcaggcagccacgaagtacagggtcctggtctcagctatctatgcagcaggcaggagtgaggctgtgtctgccacgggccagacagcctgcccagccctccgccctgacggctccctcccagggtttgacctgatggtggccttcagcctggtggaaaaggcttatgcgtccatccggggcgtggccatggagccctctgccttcggtgggaccccgaccttcacgctcttcaaggacgcccagctgacaagacgggtcagtgacgtctacccagcccccctacctccagagcacaccatcgtcttccttgtgcgcctacttcccgagacaccccgtgaggccttcgcgctgtggcagatgacagccgaggacttccagcccctccttggggttctgctggatgccgggaagaagtccctgacctacttccaccgtgaccccagggctgccttgcaggaggccaccttcgacccgcaggaagtgaggaagattttcttcgggagcttccacaaggtgcacgtggctgtgggccgctccaaggtcaggctctatgtggactgccggaaggtggctgagcggccccttggggagatgggcagcccacccgctgcgggcttcgtcacgctggggaggctggccaaggccaggggcccccggagcagttcggccgcgtttcagctccagatgctgcagatcgtgtgcagtgacacctgggccgatgaggaccggtgctgtgagctccctgcctcgagggatggagagacctgccccgccttcgtgtctgcctgttcctgttcctcagagacccctgggcccccaggacctcaaggacccccaggcctccctgggaggaatggcaccccaggagagcagggcttcccagggcccaggggagagcccgggccacccggacagatgggaccagaaggtcctggaggccagcagggctcgccggggacccagggccgtgcagtccaggggcctgtgggtccaccaggggtcaaaggagagaagggagaccatgggcttccaggcttgcagggccaccccggccaccagggcatccccgggagagttggcctccagggaccaaagggaatgagaggcctggagggaactgctggcctgcctggaccccctggccccagggggttccagggcatggcaggggccaggggcactagtggagagcgaggacctccagggaccgtggggcccacaggactgccagggcccaaaggggaacgaggagagaagggcgagccgcagtcccttgccaccctctaccagcttgtgagccaggcctcacacgtgtcaaagttcgactccttccacgagaacaccaggccccccatgcccatcttggagcagaagctggagccgggcactgagcccctggggtcccctggcacccgcagcaaggccctggttcctggagaatgggggcgtggtggccgccaccttgagggcagaggggagcctggagctgttggtcagatgggcagccctgggcagcagggggctagcacccagggcctctgggagtgacaggacattttctgcactgccccgaggaacgctgagccttcctccctgggtttgtctggacaccgagagcgaccacatcctggagaagccaggagaaaagctcaggaagagcctgcaggtggaaggagagggaagcagcggcctcggccaaggcccaccccatactcttggctctgtagcatttccaagttcagataaacccctgagtgctcaccc

SEQ ID NO: 321799 - DNA, 3951 bp, Artificial Sequence
  derived and/or modified sequence
atgagctccggcgatcctgcccatctgggactctgtctctggctctggcttggagcgacgttagggcgagagcaggtgcaggctagcggcctgcttagactggccgtgctgccagaagatcgccttcagatgaagtggcgagagagtgagggaagcggactcggctatctcgttcaggtgaaaccgatggctggggactcagagcaggaagttatcctaactaccaaaactcccaaggcaaccgtcggtggattgtctcctagtaaaggatatactttacagatcttcgagctgaccggctcgggaaggttcttgctggctcggagggaattcgttatcgaagatctcaagagtagctcgctggacagatcttcgcaacggcctcttggatccggggcacccgaaccaacccccagtcataccgggtctcctgatcccgaacaggcatccgagccacaagtggccttcaccccctcacaggacccaaggactcccgcaggacctcaatttcggtgcctaccgccagtacctgcagatatggtgttcctggtggatggctcttggagtatcgggcattcccacttccagcaggttaaagatttcctagcctctgtcatagctccattcgaaataggcccagacaaagtgcaggttggactgacacagtatagtggggacgcacaaacagagtgggatttgaatagcttatcaacaaaagaacaggtcctggctgcggtcaggcggcttcggtacaagggtgggaatacttttacgggcctggcgctcactcacgtcctgggacaaaacttgcagccggctgccggactccgcccagaggctgctaaagtcgttatcctggtgacagacggtaagtctcaggatgacgttcataccgctgcacgggtgctgaaggatctaggtgttaatgtattcgcagtcggggttaaaaacgccgacgaggcagagctccgcctgctcgccagccccccaagagatatcacggtgcactccgtcctggacttcctccagctgggagccttagccggtcttctgtcccggctgatctgtcaacggttgcagggcggaagtccaagacagggcccagcagctgccccagcgctcgacactcttccggcaccaacttctttggtgcttagccaggtgaccagcagctccatcaggctgtcctggactcccgcacccagacaccccctcaagtatttgattgtttggcgcgcaagccgtggaggcaccccaagggaagtagtggtggagggccctgcagccagcacagagctgcataacctcgccagtcggaccgagtacctggtttccgtatttccaatctatgaaggtggcgtgggggaagggctgagaggattggtgactacagcgcctctcccccctcctcgggctttaaccctggctgctgttacacctcgaacagtacatctcacctggcagcctagcgcaggggctacccactacctagtccggtgttcaccagcatctcctaaaggagaggaggaagagcgcgaggttcaggtgggcagaccagaagtgcttctggatggtctcgaaccagggcgtgattacgaagtctcggtccagtccctccggggtccagaagggtcggaggcgcgaggaattcgagcgagaacccccacgctggccccacctcgccatctgggcttctccgacgtgtcccatgatgcggcacgcgtgttttgggaaggcgcaccgcgacctgttcgccttgtgcgagtgacatacgtttcctcggagggcggtcattctggccaaaccgaggcacctggcaacgctacttcagccactcttggacccctcagctcaagtacgacctatactgtgcgagtgacctgcctgtatcccggtggcggtagctcaacactgactgggagagttactacaaagaaggcaccatctccctcacagctatctatgactgagcttcctggagacgctgtccagctggcctgggtggccgcagcaccatcaggagtcctagtataccagatcacatggactcccttaggggaaggcaaagcccacgaaatctcagtgccagggaacctcgggacggcggtactgcctggattaggccgtcataccgagtacgatgttaccatcctggcttattatcgcgatggcgctcggtctgatcctgtcagtttgcgatacaccccctcgacagtaagtaggagccccccatccaatttggccctggctagtgagactcccgactcgctgcaggtgtcttggactccacctctgggacgagtcctccactactggttaacttacgctcccgctagtggcctaggccctgaaaaatcagtctctgtaccaggcgctagatcacatgtcacacttccagatcttcaggctgcaacaaagtaccgagtgctggtgtccgcaatctatgccgctggaaggtctgaggccgtgagtgctaccgggcagactgcgtgccccgctcttcggcctgatggctctcttccgggttttgacctgatggtcgcattcagcctcgtcgagaaagcctacgccagcatccggggagttgcaatggaaccatctgccttcggcggtacacccacctttacactatttaaagacgctcagctaacaaggagggtgtccgacgtgtacccggcacctctgccccctgaacacaccatcgtattcctggttcggctgctgcccgaaacaccgagagaggccttcgccctctggcagatgactgctgaggactttcagccgctgctgggcgtgctgcttgatgccggaaagaagtccttgacctacttccacagggatccccgagcagccctgcaagaggcaacatttgatccccaggaggtccggaaaatattcttcgggagttttcacaaggtgcacgtcgccgttggccgatccaaagtgagattatatgtcgattgccggaaggtggcagagagacctctgggcgaaatgggatcccccccagctgccggatttgtaacactaggccgtctggcgaaggcgagaggtccaaggtcctcatccgcggcatttcagttgcagatgctgcaaatcgtatgctccgatacatgggccgacgaagaccggtgttgcgagctcccagccagcagagatggtgaaacttgccctgcattcgtaagtgcctgctcctgttcttctgaaaccccaggcccacccggacctcaggggcctccgggactccccggaaggaacgggacacccggagaacagggttttccgggacccagaggggagccaggccctccaggtcagatgggaccagagggacctgggggacagcagggatcaccaggcacgcaggggagggcagtgcaggggcctgtgggaccaccaggagtgaaaggagaaaagggggatcatgggctgcctggactccagggccacccgggacaccagggtatcccgggaagggttggtctgcagggtccaaaaggcatgcgcggtttggaaggtactgctggcctaccaggcccacctggcccaaggggatttcagggtatggccggagcaagaggcacgagcggcgagcgcggacctcctggcacagtgggcccaacgggtctgcctggccctaaaggagagcgtggagagaagggggagccccagtcactggctacattgtaccagctcgtatcccaggcttctcacgttagtaagttcgactccttccacgagaataccagaccaccaatgcccattctcgagcagaaactcgaacccggaactgagccccttgggtctccgggtacaagatcaaaggccctggtacctggagagtggggacgaggtggaagacacctcgaggggagaggcgagcccggagctgtgggacaaatgggtagtcccggacagcagggcgcttctacacagggattgtgggagtag

SEQ ID NO: 321800 - DNA, 3951 bp, Artificial Sequence
  derived and/or modified sequence
atgtctagtggtgatccagcccatcttggtctttgcctctggctatggctgggggctacactgggtcgggagcaggtgcaggcgagcggtctcctgcgcttagccgtcttacccgaggacaggctccagatgaaatggcgcgagtctgaaggaagcggactcggctatcttgtgcaggtcaagcctatggccggcgacagcgaacaagaagtgattctcacgacaaagacccctaaggcaacagttggaggcctcagtccatctaagggctacaccctgcagatttttgagctcaccgggtcgggacggtttcttttagcccggagagagttcgttattgaagatttgaagtccagttcacttgaccgcagttctcagagacccttgggaagtggtgcgcccgaaccgacacctagccataccggcagcccagaccctgagcaagccagcgaaccacaagtggcattcacaccatctcaggatccaagaacccctgccggccctcagtttcgttgcctgcctccagtcccagccgatatggtctttctggtggatggctcctggtccattgggcactctcacttccaacaggtgaaagattttctagcctcagtgattgcacctttcgaaatcggcccggacaaggtccaagtaggcttgactcagtactctggagatgcacaaactgagtgggacctcaactctctctccaccaaggagcaggtgctggccgctgtccgcaggcttagatacaagggaggcaacacttttacaggcttggccttgacacatgtgctgggacagaacttgcagcccgccgcgggattgcggcctgaagccgcgaaggttgtaattttagttacagatggaaaaagtcaggatgatgtacacacagcagcgcgggttctgaaggacctgggagtcaatgtgtttgctgttggcgtgaagaatgctgacgaagctgagctacggctgctcgcgtcacctccccgcgatattaccgtgcatagcgtcttagacttccttcagctcggagccctggccggtctcctgtccagactgatctgccagaggttgcagggtggctctcccagacagggaccagcagccgcccccgcactggacacacttcctgctcccacttccctggttctatctcaagtgacaagttccagcattaggctcagttggacacccgctccacgtcacccattgaagtacctgattgtgtggagggccagcagaggagggactccccgggaagtcgtggtggaaggcccagcggcatctactgagctccacaacctcgcttccagaactgagtatctggtgtcagtgttcccaatctacgaaggcggggtgggcgaaggacttcgcggactggtcacaaccgcccccctgcctccacctagagcccttacgcttgcggccgtgacaccacggactgttcacctcacttggcagcccagtgctggcgccactcactaccttgtgaggtgttcccctgcatccccgaaaggtgaggaagaagagagggaggtccaagtcgggcggcccgaggtgctgcttgatggtctcgagccaggcagagactacgaagtcagcgtacagagcctgaggggcccagaaggctcggaggcccgcggtataagggcacggacacccactctggcacctccccgccacttgggattctctgatgtcagtcacgacgccgcaagagtcttttgggaaggagcacccagaccagtcagattagttcgggtgacatatgtctcttctgagggcggccacagcgggcaaactgaagcccctggcaacgcaactagcgcaaccctcggcccgctttccagttctacaacttacaccgttagagtaacctgcttatacccaggaggaggatcgtcaacactcactggtcgggtcacgacgaaaaaagctccaagcccaagccagctgtcaatgacagagctccctggagatgccgtgcagctagcatgggtagccgccgccccctcaggtgttctcgtttaccagataacctggaccccgctaggagagggcaaggcgcatgaaatttctgtcccaggaaacctgggaactgctgttctacctggcctgggcaggcacaccgaatatgacgtcacgatcctcgcttattaccgcgacggggccagatccgaccctgtctccctccggtacacaccttctactgtgagtagatcaccaccttccaacttggccctcgccagtgagacaccagactctttgcaggtctcatggacccccccactgggaagggtactgcattattggttgacgtatgcaccggcctcagggttagggcccgagaaatccgtcagtgttcctggcgctcgcagccacgttaccctgcccgacctgcaagccgctacaaaataccgtgtcttggtctcagcgatctacgctgccggacggtccgaagccgtgtcggctacagggcaaactgcctgccccgcactcaggcccgacggttccctgcccggatttgaccttatggtggcttttagcctagtcgagaaggcctacgcatccatccgcggagtggcaatggaaccctccgcctttggaggcaccccaacatttacattgtttaaagacgctcaactcactaggagggtctcagacgtctatccagctcccctgccacctgagcatacgatagtgtttctggttcgcttgctcccagagactccgcgagaggccttcgccctgtggcagatgaccgccgaggatttccagccgttgctcggggtgctgctggacgcaggcaaaaagtcactgacatacttccaccgagatccccgggcggccctgcaagaagccaccttcgatccccaggaagtccgtaaaattttttttggctcgtttcataaggtgcatgtggcggtagggaggagtaaggtgagactttacgtggattgtcggaaggttgccgagcggcctctgggggagatgggctcacctccagccgccggattcgtcactctcggccggctggcaaaggccaggggaccgcgctcctcctctgcggcttttcagcttcaaatgctccagatcgtgtgttctgatacatgggctgacgaggatagatgttgtgagctccccgccagccgtgatggcgagacatgcccggctttcgtctcagcttgcagttgtagcagtgagacacctggccctcccggcccccagggtccacccggactccctggcaggaatggcacacctggagaacagggctttcccggacctagaggagagcctgggcctccgggccagatggggccagaaggacctggtggccagcaggggtcacccggcacacagggccgcgccgtccagggccctgtgggtccacccggcgtcaaaggtgagaagggcgatcatggcttaccaggactgcagggtcatccaggccatcagggaatcccaggacgcgtgggactccagggtcctaaggggatgcgggggctggaaggcactgcagggctgccaggacctccagggcccaggggattccaaggcatggccggagccaggggcacgtctggcgagcgtggcccccccgggacagtgggccccacaggactgcccggaccgaagggcgagcgtggggaaaaaggcgaacctcagagcctcgccacactgtatcagcttgtgtctcaagcgagtcacgttagtaagttcgactcctttcatgaaaacactagaccacctatgcctattctggagcagaagctcgaacctggtaccgaaccacttggatcgcccggcacaagaagcaaagctttggtccctggcgaatgggggcgaggcggtcgccatctggagggacggggagagccaggagccgttggccagatgggctccccgggacagcagggtgcctcaacccagggattgtgggaatag

SEQ ID NO: 321801 - DNA, 3951 bp, Artificial Sequence
  derived and/or modified sequence
atgtcctctggagaccccgcccatctcggtttatgtctatggttatggctcggcgctacactgggtcgcgagcaggtccaggccagcggtttgctgagattagccgtcctgcctgaggatagacttcagatgaaatggcgggagtcagaagggagtggcctgggatacctggtccaagttaaacctatggccggagattctgagcaagaagttatacttacaacgaagaccccaaaagctacagtgggtggcctctcaccaagtaagggatatactctgcagattttcgaactaaccggttccggccgttttctgttggctcgcagagaatttgtgatcgaggatcttaaatcctccagcctagaccgaagcagccaaaggccattaggatccggcgcacccgagcctactccaagtcatactggctccccagatcccgaacaggcctcagagccccaggttgctttcactccgtcacaggatccacgcactccagccggtccacaatttagatgcctgcccccagttcccgccgacatggtttttctggtcgacggctcttggtcaattggacacagccactttcagcaagtcaaagatttcctggcctctgtcattgcacccttcgaaatcggacccgacaaagtgcaggtcggcttgacccaatattcgggagatgctcaaaccgagtgggacctgaattcccttagcaccaaggagcaggttctagcagctgtgcgaagactccgatacaaaggcggcaatacgttcactgggctggctttgacccatgtactaggtcaaaatttacaacctgccgctggactccgccccgaagccgcaaaagtggtgattctggttaccgacggcaagtctcaggatgatgtacacactgcagctcgtgttctgaaagatctaggcgtaaacgttttcgccgtaggtgtgaaaaatgccgacgaggccgaactgcgccttcttgcttccccccccagagatataaccgtacactccgtgctcgacttcttacaattgggagcattggccgggctgctgtccagactgatctgtcaacgactgcagggaggatctccacgtcagggacctgctgccgctcccgccctggatacccttccagcgcctaccagcctcgttctgagccaggtgaccagctcctccattcgcctgtcctggactcccgctccaagacatccactgaagtacctgattgtctggcgagcttccagaggtggcacaccccgagaagtggtggtcgagggcccagccgctagtactgagctccataatctggcttctaggacagagtatctggtcagtgtgttccctatctacgaaggcggggtaggagagggcctccggggactggttaccactgcccccttgccgcccccccgagctctaacattggccgccgtcacacctcgcaccgtgcatctgacatggcagccatcagccggagctacacactacctggttaggtgttcccctgccagccctaaaggggaggaagaagaaagagaggtccaggtgggtcgcccagaagtactcttagacgggttggagcctggccgggactacgaggtgagtgtgcaaagcctgaggggccctgagggaagtgaagccagaggaattagggcaagaacaccgacattggcacccccccgtcatttgggattttccgacgtttctcacgacgccgcaagagtgttttgggagggcgcgccacgacctgtgaggctcgttcgagtgacatacgtaagctccgagggtggacattcaggtcaaacagaggcacccggaaatgcaaccagcgctacgttaggtcccctcagcagcagtaccacctataccgtcagagtaacctgtctgtatcccggcggcggaagctctaccctgaccggaagagtgacaacaaagaaggctcccagtccctctcaactgtccatgacagagctacccggcgatgcagtgcagctggcctgggtggcagcggctccttctggcgtgctagtctaccagatcacatggacccctcttggagaaggtaaagctcacgaaatttccgttcccggcaacctcggaaccgccgtactgcctggacttggaagacatacggaatatgacgtgacaatactggcctactaccgggacggcgcgaggagcgaccctgtgtctctgaggtatacaccatccactgtctcgcgttcacccccatccaatctggcactcgccagcgaaacacctgattccttgcaagttagctggacaccacccctggggagggtcctccattactggctgacgtatgcgcctgctagcggccttggcccagagaagtccgtctccgtcccaggggcgagatcccacgtgacactgcctgacctgcaggccgctaccaaatatagagttctggttagtgcaatctatgccgctgggagatccgaagcagtttcagctacaggccagaccgcttgtcccgcactgcggcctgatggtagcctgcccgggtttgaccttatggtggccttctcactggtggaaaaggcttatgctagcattagaggcgtggctatggaacctagcgctttcgggggtacccctacgtttaccttgttcaaagacgctcagctgactcggagggtgtctgacgtatatccagctcccttgccccctgaacatacaatcgtgtttctggtgaggctgcttccagaaactcccagagaagcctttgctttgtggcaaatgaccgctgaggatttccaaccgttgctgggcgtcctgctggatgcaggaaaaaaaagtctgacctattttcacagagatccaagagccgctctgcaggaggctacatttgacccacaggaagttaggaagattttttttggttcctttcataaagtccacgtggccgttggtaggagtaaagttaggttgtacgtcgactgccgcaaagtcgcagagcgtccactgggggagatgggcagcccgcccgcagccggatttgtgaccctgggccgtcttgccaaggccagaggtccccgtagctcatccgcggctttccagcttcagatgctccaaattgtgtgtagcgatacgtgggccgacgaagataggtgttgcgaattacccgcatcccgagacggtgaaacatgccccgctttcgtcagcgcctgcagctgtagctcagagactcctggcccacccggtccacagggaccacccggtctgcccggaaggaatgggacgcccggcgaacaagggtttccaggtcccagaggggagcctggtccccctggccagatgggccctgaagggccaggaggacagcaaggaagtcctggcacacaaggaagggcagtccagggcccggttggacccccaggagttaaaggagaaaagggtgaccacggcttacccgggctacaaggccaccccgggcatcaaggaataccagggagagtcggtctgcaaggtcccaaaggtatgagaggccttgaggggactgcaggcctgcccggcccaccaggaccacggggatttcagggaatggccggcgcacgtggtacatcaggggagagaggaccccccgggacagtgggtccgacaggactcccagggccaaaaggcgagaggggggaaaaaggtgagcctcaatcccttgccacactttatcaactcgtatcacaagcatcacacgtctctaaatttgatagtttccatgaaaacacccgcccacccatgccgattcttgaacaaaagttggaaccaggaaccgaacccttggggtctcccggaacacgcagcaaagccctcgtacctggcgaatgggggaggggcggcagacatctggaagggagaggagagcctggggcagtggggcagatggggagtcctggacagcagggagctagtacgcaaggcctttgggagtag

SEQ ID NO: 321802 - RNA, 3951 nt, Artificial Sequence
  derived and/or modified sequence
augucuaguggugauccagcccaucuuggucuuugccucuggcuauggcugggggcuacacugggucgggagcaggugcaggcgagcggucuccugcgcuuagccgucuuacccgaggacaggcuccagaugaaauggcgcgagucugaaggaagcggacucggcuaucuugugcaggucaagccuauggccggcgacagcgaacaagaagugauucucacgacaaagaccccuaaggcaacaguuggaggccucaguccaucuaagggcuacacccugcagauuuuugagcucaccgggucgggacgguuucuuuuagcccggagagaguucguuauugaagauuugaaguccaguucacuugaccgcaguucucagagacccuugggaaguggugcgcccgaaccgacaccuagccauaccggcagcccagacccugagcaagccagcgaaccacaaguggcauucacaccaucucaggauccaagaaccccugccggcccucaguuucguugccugccuccagucccagccgauauggucuuucugguggauggcuccugguccauugggcacucucacuuccaacaggugaaagauuuucuagccucagugauugcaccuuucgaaaucggcccggacaagguccaaguaggcuugacucaguacucuggagaugcacaaacugagugggaccucaacucucucuccaccaaggagcaggugcuggccgcuguccgcaggcuuagauacaagggaggcaacacuuuuacaggcuuggccuugacacaugugcugggacagaacuugcagcccgccgcgggauugcggccugaagccgcgaagguuguaauuuuaguuacagauggaaaaagucaggaugauguacacacagcagcgcggguucugaaggaccugggagucaauguguuugcuguuggcgugaagaaugcugacgaagcugagcuacggcugcucgcgucaccuccccgcgauauuaccgugcauagcgucuuagacuuccuucagcucggagcccuggccggucuccuguccagacugaucugccagagguugcaggguggcucucccagacagggaccagcagccgcccccgcacuggacacacuuccugcucccacuucccugguucuaucucaagugacaaguuccagcauuaggcucaguuggacacccgcuccacgucacccauugaaguaccugauuguguggagggccagcagaggagggacuccccgggaagucgugguggaaggcccagcggcaucuacugagcuccacaaccucgcuuccagaacugaguaucuggugucaguguucccaaucuacgaaggcggggugggcgaaggacuucgcggacuggucacaaccgccccccugccuccaccuagagcccuuacgcuugcggccgugacaccacggacuguucaccucacuuggcagcccagugcuggcgccacucacuaccuugugagguguuccccugcauccccgaaaggugaggaagaagagagggagguccaagucgggcggcccgaggugcugcuugauggucucgagccaggcagagacuacgaagucagcguacagagccugaggggcccagaaggcucggaggcccgcgguauaagggcacggacacccacucuggcaccuccccgccacuugggauucucugaugucagucacgacgccgcaagagucuuuugggaaggagcacccagaccagucagauuaguucgggugacauaugucucuucugagggcggccacagcgggcaaacugaagccccuggcaacgcaacuagcgcaacccucggcccgcuuuccaguucuacaacuuacaccguuagaguaaccugcuuauacccaggaggaggaucgucaacacucacuggucgggucacgacgaaaaaagcuccaagcccaagccagcugucaaugacagagcucccuggagaugccgugcagcuagcauggguagccgccgcccccucagguguucucguuuaccagauaaccuggaccccgcuaggagagggcaaggcgcaugaaauuucugucccaggaaaccugggaacugcuguucuaccuggccugggcaggcacaccgaauaugacgucacgauccucgcuuauuaccgcgacggggccagauccgacccugucucccuccgguacacaccuucuacugugaguagaucaccaccuuccaacuuggcccucgccagugagacaccagacucuuugcaggucucauggacccccccacugggaaggguacugcauuauugguugacguaugcaccggccucaggguuagggcccgagaaauccgucaguguuccuggcgcucgcagccacguuacccugcccgaccugcaagccgcuacaaaauaccgugucuuggucucagcgaucuacgcugccggacgguccgaagccgugucggcuacagggcaaacugccugccccgcacucaggcccgacgguucccugcccggauuugaccuuaugguggcuuuuagccuagucgagaaggccuacgcauccauccgcggaguggcaauggaacccuccgccuuuggaggcaccccaacauuuacauuguuuaaagacgcucaacucacuaggagggucucagacgucuauccagcuccccugccaccugagcauacgauaguguuucugguucgcuugcucccagagacuccgcgagaggccuucgcccuguggcagaugaccgccgaggauuuccagccguugcucggggugcugcuggacgcaggcaaaaagucacugacauacuuccaccgagauccccgggcggcccugcaagaagccaccuucgauccccaggaaguccguaaaauuuuuuuuggcucguuucauaaggugcauguggcgguagggaggaguaaggugagacuuuacguggauugucggaagguugccgagcggccucugggggagaugggcucaccuccagccgccggauucgucacucucggccggcuggcaaaggccaggggaccgcgcuccuccucugcggcuuuucagcuucaaaugcuccagaucguguguucugauacaugggcugacgaggauagauguugugagcuccccgccagccgugauggcgagacaugcccggcuuucgucucagcuugcaguuguagcagugagacaccuggcccucccggcccccaggguccacccggacucccuggcaggaauggcacaccuggagaacagggcuuucccggaccuagaggagagccugggccuccgggccagauggggccagaaggaccugguggccagcaggggucacccggcacacagggccgcgccguccagggcccuguggguccacccggcgucaaaggugagaagggcgaucauggcuuaccaggacugcagggucauccaggccaucagggaaucccaggacgcgugggacuccaggguccuaaggggaugcgggggcuggaaggcacugcagggcugccaggaccuccagggcccaggggauuccaaggcauggccggagccaggggcacgucuggcgagcguggcccccccgggacagugggccccacaggacugcccggaccgaagggcgagcguggggaaaaaggcgaaccucagagccucgccacacuguaucagcuugugucucaagcgagucacguuaguaaguucgacuccuuucaugaaaacacuagaccaccuaugccuauucuggagcagaagcucgaaccugguaccgaaccacuuggaucgcccggcacaagaagcaaagcuuuggucccuggcgaaugggggcgaggcggucgccaucuggagggacggggagagccaggagccguuggccagaugggcuccccgggacagcagggugccucaacccagggauugugggaauag

SEQ ID NO: 321803 - RNA, 3951 nt, Artificial Sequence
  derived and/or modified sequence
auguccucuggagaccccgcccaucucgguuuaugucuaugguuauggcucggcgcuacacugggucgcgagcagguccaggccagcgguuugcugagauuagccguccugccugaggauagacuucagaugaaauggcgggagucagaagggaguggccugggauaccugguccaaguuaaaccuauggccggagauucugagcaagaaguuauacuuacaacgaagaccccaaaagcuacaguggguggccucucaccaaguaagggauauacucugcagauuuucgaacuaaccgguuccggccguuuucuguuggcucgcagagaauuugugaucgaggaucuuaaauccuccagccuagaccgaagcagccaaaggccauuaggauccggcgcacccgagccuacuccaagucauacuggcuccccagaucccgaacaggccucagagccccagguugcuuucacuccgucacaggauccacgcacuccagccgguccacaauuuagaugccugcccccaguucccgccgacaugguuuuucuggucgacggcucuuggucaauuggacacagccacuuucagcaagucaaagauuuccuggccucugucauugcacccuucgaaaucggacccgacaaagugcaggucggcuugacccaauauucgggagaugcucaaaccgagugggaccugaauucccuuagcaccaaggagcagguucuagcagcugugcgaagacuccgauacaaaggcggcaauacguucacugggcuggcuuugacccauguacuaggucaaaauuuacaaccugccgcuggacuccgccccgaagccgcaaaaguggugauucugguuaccgacggcaagucucaggaugauguacacacugcagcucguguucugaaagaucuaggcguaaacguuuucgccguaggugugaaaaaugccgacgaggccgaacugcgccuucuugcuuccccccccagagauauaaccguacacuccgugcucgacuucuuacaauugggagcauuggccgggcugcuguccagacugaucugucaacgacugcagggaggaucuccacgucagggaccugcugccgcucccgcccuggauacccuuccagcgccuaccagccucguucugagccaggugaccagcuccuccauucgccuguccuggacucccgcuccaagacauccacugaaguaccugauugucuggcgagcuuccagagguggcacaccccgagaagugguggucgagggcccagccgcuaguacugagcuccauaaucuggcuucuaggacagaguaucuggucaguguguucccuaucuacgaaggcgggguaggagagggccuccggggacugguuaccacugcccccuugccgcccccccgagcucuaacauuggccgccgucacaccucgcaccgugcaucugacauggcagccaucagccggagcuacacacuaccugguuagguguuccccugccagcccuaaaggggaggaagaagaaagagagguccaggugggucgcccagaaguacucuuagacggguuggagccuggccgggacuacgaggugagugugcaaagccugaggggcccugagggaagugaagccagaggaauuagggcaagaacaccgacauuggcacccccccgucauuugggauuuuccgacguuucucacgacgccgcaagaguguuuugggagggcgcgccacgaccugugaggcucguucgagugacauacguaagcuccgaggguggacauucaggucaaacagaggcacccggaaaugcaaccagcgcuacguuagguccccucagcagcaguaccaccuauaccgucagaguaaccugucuguaucccggcggcggaagcucuacccugaccggaagagugacaacaaagaaggcucccagucccucucaacuguccaugacagagcuacccggcgaugcagugcagcuggccuggguggcagcggcuccuucuggcgugcuagucuaccagaucacauggaccccucuuggagaagguaaagcucacgaaauuuccguucccggcaaccucggaaccgccguacugccuggacuuggaagacauacggaauaugacgugacaauacuggccuacuaccgggacggcgcgaggagcgacccugugucucugagguauacaccauccacugucucgcguucacccccauccaaucuggcacucgccagcgaaacaccugauuccuugcaaguuagcuggacaccaccccuggggaggguccuccauuacuggcugacguaugcgccugcuagcggccuuggcccagagaaguccgucuccgucccaggggcgagaucccacgugacacugccugaccugcaggccgcuaccaaauauagaguucugguuagugcaaucuaugccgcugggagauccgaagcaguuucagcuacaggccagaccgcuugucccgcacugcggccugaugguagccugcccggguuugaccuuaugguggccuucucacugguggaaaaggcuuaugcuagcauuagaggcguggcuauggaaccuagcgcuuucggggguaccccuacguuuaccuuguucaaagacgcucagcugacucggagggugucugacguauauccagcucccuugcccccugaacauacaaucguguuucuggugaggcugcuuccagaaacucccagagaagccuuugcuuuguggcaaaugaccgcugaggauuuccaaccguugcugggcguccugcuggaugcaggaaaaaaaagucugaccuauuuucacagagauccaagagccgcucugcaggaggcuacauuugacccacaggaaguuaggaagauuuuuuuugguuccuuucauaaaguccacguggccguugguaggaguaaaguuagguuguacgucgacugccgcaaagucgcagagcguccacugggggagaugggcagcccgcccgcagccggauuugugacccugggccgucuugccaaggccagagguccccguagcucauccgcggcuuuccagcuucagaugcuccaaauuguguguagcgauacgugggccgacgaagauagguguugcgaauuacccgcaucccgagacggugaaacaugccccgcuuucgucagcgccugcagcuguagcucagagacuccuggcccacccgguccacagggaccacccggucugcccggaaggaaugggacgcccggcgaacaaggguuuccaggucccagaggggagccuggucccccuggccagaugggcccugaagggccaggaggacagcaaggaaguccuggcacacaaggaagggcaguccagggcccgguuggacccccaggaguuaaaggagaaaagggugaccacggcuuacccgggcuacaaggccaccccgggcaucaaggaauaccagggagagucggucugcaaggucccaaagguaugagaggccuugaggggacugcaggccugcccggcccaccaggaccacggggauuucagggaauggccggcgcacgugguacaucaggggagagaggaccccccgggacaguggguccgacaggacucccagggccaaaaggcgagaggggggaaaaaggugagccucaaucccuugccacacuuuaucaacucguaucacaagcaucacacgucucuaaauuugauaguuuccaugaaaacacccgcccacccaugccgauucuugaacaaaaguuggaaccaggaaccgaacccuuggggucucccggaacacgcagcaaagcccucguaccuggcgaaugggggaggggcggcagacaucuggaagggagaggagagccuggggcaguggggcagauggggaguccuggacagcagggagcuaguacgcaaggccuuugggaguag

SEQ ID NO: 321804 - protein, 1297 aa, Artificial Sequence
  derived and/or modified sequence
MSSGDPAHLGLCLWLWLGATLGREQVQASGLLRLAVLPEDRLQMKWRESEGSGLGYLVQVKPMAGDSEQEVILTTKTPKATVGGLSPSKGYTLQIFELTGSGRFLLARREFVIEDLKSSSLDRSSQRPLGSGAPEPTPSHTGSPDPEQASEPQVAFTPSQDPRTPGGSEWRETGPQFRCLPPVPADMVFLVDGSWSIGHSHFQQVKDFLASVIAPFEIGPDKVQVGLTQYSGDAQTEWDLNSLSTKEQVLAAVRRLRYKGGNTFTGLALTHVLGQNLQPAAGLRPEAAKVVILVTDGKSQDDVHTAARVLKDLGVNVFAVGVKNADEAELRLLASPPRDITVHSVLDFLQLGALAGLLSRLICQRLQGGSPRQGPAAAPALDTLPAPTSLVLSQVTSSSIRLSWTPAPRHPLKYLIVWRASRGGTPREVVVEGPAASTELHNLASRTEYLVSVFPIYEGGVGEGLRGLVTTAPLPPPRALTLAAVTPRTVHLTWQPSAGATHYLVRCSPASPKGEEEEREVQVGRPEVLLDGLEPGRDYEVSVQSLRGPEGSEARGIRARTPTLAPPRHLGFSDVSHDAARVFWEGAPRPVRLVRVTYVSSEGGHSGQTEAPGNATSATLGPLSSSTTYTVRVTCLYPGGGSSTLTGRVTTKKAPSPSQLSMTELPGDAVQLAWVAAAPSGVLVYQITWTPLGEGKAHEISVPGNLGTAVLPGLGRHTEYDVTILAYYRDGARSDPVSLRYTPSTVSRSPPSNLALASETPDSLQVSWTPPLGRVLHYWLTYAPASGLGPEKSVSVPGARSHVTLPDLQAATKYRVLVSAIYAAGRSEAVSATGQTACPALRPDGSLPGFDLMVAFSLVEKAYASIRGVAMEPSAFGGTPTFTLFKDAQLTRRVSDVYPAPLPPEHTIVFLVRLLPETPREAFALWQMTAEDFQPLLGVLLDAGKKSLTYFHRDPRAALQEATFDPQEVRKIFFGSFHKVHVAVGRSKVRLYVDCRKVAERPLGEMGSPPAAGFVTLGRLAKARGPRSSSAAFQLQMLQIVCSDTWADEDRCCELPASRDGETCPAFVSACSCSSETPGPPGPQGPPGLPGRNGTPGEQGFPGPRGPPGVKGEKGDHGLPGLQGHPGHQGIPGRVGLQGPKGMRGLEGTAGLPGPPGPRGFQGMAGARGTSGERGPPGTVGPTGLPGPKGERGEKGEPQSLATLYQLVSQACESAIQTHVSKFDSFHENTRPPMPILEQKLEPGTEPLGSPGTRSKALVPGEWGRGGRHLEGRGEPGAVGQMGSPGQQGASTQGLWE

SEQ ID NO: 321805 - DNA, 3894 bp, Artificial Sequence
  derived and/or modified sequence
atgagcagcggcgaccccgcccacctgggcctgtgcctgtggctgtggctgggcgccaccctgggcagagagcaggtgcaggccagcggcctgctgagactggccgtgctgcccgaggacagactgcagatgaagtggagagagagcgagggcagcggcctgggctacctggtgcaggtgaagcccatggccggcgacagcgagcaggaggtgatcctgaccaccaagacccccaaggccaccgtgggcggcctgagccccagcaagggctacaccctgcagatcttcgagctgaccggcagcggcagattcctgctggccagaagagagttcgtgatcgaggacctgaagagcagcagcctggacagaagcagccagagacccctgggcagcggcgcccccgagcccacccccagccacaccggcagccccgaccccgagcaggccagcgagccccaggtggccttcacccccagccaggaccccagaacccccggcggcagcgagtggagagagaccggcccccagttcagatgcctgccccccgtgcccgccgacatggtgttcctggtggacggcagctggagcatcggccacagccacttccagcaggtgaaggacttcctggccagcgtgatcgcccccttcgagatcggccccgacaaggtgcaggtgggcctgacccagtacagcggcgacgcccagaccgagtgggacctgaacagcctgagcaccaaggagcaggtgctggccgccgtgagaagactgagatacaagggcggcaacaccttcaccggcctggccctgacccacgtgctgggccagaacctgcagcccgccgccggcctgagacccgaggccgccaaggtggtgatcctggtgaccgacggcaagagccaggacgacgtgcacaccgccgccagagtgctgaaggacctgggcgtgaacgtgttcgccgtgggcgtgaagaacgccgacgaggccgagctgagactgctggccagcccccccagagacatcaccgtgcacagcgtgctggacttcctgcagctgggcgccctggccggcctgctgagcagactgatctgccagagactgcagggcggcagccccagacagggccccgccgccgcccccgccctggacaccctgcccgcccccaccagcctggtgctgagccaggtgaccagcagcagcatcagactgagctggacccccgcccccagacaccccctgaagtacctgatcgtgtggagagccagcagaggcggcacccccagagaggtggtggtggagggccccgccgccagcaccgagctgcacaacctggccagcagaaccgagtacctggtgagcgtgttccccatctacgagggcggcgtgggcgagggcctgagaggcctggtgaccaccgcccccctgcccccccccagagccctgaccctggccgccgtgacccccagaaccgtgcacctgacctggcagcccagcgccggcgccacccactacctggtgagatgcagccccgccagccccaagggcgaggaggaggagagagaggtgcaggtgggcagacccgaggtgctgctggacggcctggagcccggcagagactacgaggtgagcgtgcagagcctgagaggccccgagggcagcgaggccagaggcatcagagccagaacccccaccctggccccccccagacacctgggcttcagcgacgtgagccacgacgccgccagagtgttctgggagggcgcccccagacccgtgagactggtgagagtgacctacgtgagcagcgagggcggccacagcggccagaccgaggcccccggcaacgccaccagcgccaccctgggccccctgagcagcagcaccacctacaccgtgagagtgacctgcctgtaccccggcggcggcagcagcaccctgaccggcagagtgaccaccaagaaggcccccagccccagccagctgagcatgaccgagctgcccggcgacgccgtgcagctggcctgggtggccgccgcccccagcggcgtgctggtgtaccagatcacctggacccccctgggcgagggcaaggcccacgagatcagcgtgcccggcaacctgggcaccgccgtgctgcccggcctgggcagacacaccgagtacgacgtgaccatcctggcctactacagagacggcgccagaagcgaccccgtgagcctgagatacacccccagcaccgtgagcagaagcccccccagcaacctggccctggccagcgagacccccgacagcctgcaggtgagctggaccccccccctgggcagagtgctgcactactggctgacctacgcccccgccagcggcctgggccccgagaagagcgtgagcgtgcccggcgccagaagccacgtgaccctgcccgacctgcaggccgccaccaagtacagagtgctggtgagcgccatctacgccgccggcagaagcgaggccgtgagcgccaccggccagaccgcctgccccgccctgagacccgacggcagcctgcccggcttcgacctgatggtggccttcagcctggtggagaaggcctacgccagcatcagaggcgtggccatggagcccagcgccttcggcggcacccccaccttcaccctgttcaaggacgcccagctgaccagaagagtgagcgacgtgtaccccgcccccctgccccccgagcacaccatcgtgttcctggtgagactgctgcccgagacccccagagaggccttcgccctgtggcagatgaccgccgaggacttccagcccctgctgggcgtgctgctggacgccggcaagaagagcctgacctacttccacagagaccccagagccgccctgcaggaggccaccttcgacccccaggaggtgagaaagatcttcttcggcagcttccacaaggtgcacgtggccgtgggcagaagcaaggtgagactgtacgtggactgcagaaaggtggccgagagacccctgggcgagatgggcagcccccccgccgccggcttcgtgaccctgggcagactggccaaggccagaggccccagaagcagcagcgccgccttccagctgcagatgctgcagatcgtgtgcagcgacacctgggccgacgaggacagatgctgcgagctgcccgccagcagagacggcgagacctgccccgccttcgtgagcgcctgcagctgcagcagcgagacccccggcccccccggcccccagggcccccccggcctgcccggcagaaacggcacccccggcgagcagggcttccccggccccagaggcccccccggcgtgaagggcgagaagggcgaccacggcctgcccggcctgcagggccaccccggccaccagggcatccccggcagagtgggcctgcagggccccaagggcatgagaggcctggagggcaccgccggcctgcccggcccccccggccccagaggcttccagggcatggccggcgccagaggcaccagcggcgagagaggcccccccggcaccgtgggccccaccggcctgcccggccccaagggcgagagaggcgagaagggcgagccccagagcctggccaccctgtaccagctggtgagccaggcctgcgagagcgccatccagacccacgtgagcaagttcgacagcttccacgagaacaccagaccccccatgcccatcctggagcagaagctggagcccggcaccgagcccctgggcagccccggcaccagaagcaaggccctggtgcccggcgagtggggcagaggcggcagacacctggagggcagaggcgagcccggcgccgtgggccagatgggcagccccggccagcagggcgccagcacccagggcctgtgggagtag

SEQ ID NO: 321806 - DNA, 3894 bp, Artificial Sequence
  derived and/or modified sequence
atgtcgtcgggggatcccgcacacctagggctctgcctatggctgtggctgggggctacccttggacgcgaacaggtccaggcgtccggtttgttgcgcctcgcagtgctcccagaggaccgcttacaaatgaagtggcgagaatctgaggggtccggcctggggtacctggtccaggtcaaacccatggcaggggatagtgagcaggaagtgattctgacaaccaaaacccctaaagccacggtgggaggcctgtcacccagtaagggatacactctgcagatcttcgagctgaccgggagcggacggttcctcttagcacggagagagtttgtcattgaggatttaaagtcttcatctctggaccgcagctctcagcgccctcttgggtccggtgcccctgaacctaccccatcacataccggttccccagaccctgagcaggccagcgagccacaggtcgcatttacacctagtcaggacccacggacacctggcggatcagagtggcgtgaaaccggaccccagttccggtgcttgccgcctgtgcccgctgatatggtttttttggtggatggatcctggtctatcggacattcacactttcagcaggtgaaagatttcctagcctctgtcatcgccccttttgaaatcggccctgacaaggtgcaggtggggctgacgcagtatagcggggatgcgcagacagaatgggacctgaactccctcagcacaaaggaacaggttcttgcggctgtgaggcgactcagatacaaagggggcaacactttcactggcctggccctgacacacgtacttggccaaaatctccagccagccgcaggacttaggcctgaggcggccaaagtagtcatcctggtcacggatgggaaaagtcaagatgacgtgcacaccgccgcacgtgtccttaaagacctcggcgtgaatgtctttgccgtcggagtgaagaacgccgacgaggcagagctgcgcctgttggcatccccccccagggacattacagtccattccgttcttgattttttacagctcggcgcgctggccggccttctgtcccgcttgatttgccagcgcctacagggtgggtcaccaaggcagggaccagctgccgcccccgcattggacacattgccagcgcccacttccctggtgctcagccaggttacctcaagttccattagattgtcatggactcccgctccgcggcaccctctgaaatatcttatcgtttggcgcgcttcacgtggcgggacccccagggaggtcgtcgttgaaggcccggcagcatcaacggagctgcataacctggcttcacgaacggaatacttggtctctgtcttcccaatatatgaagggggggtgggagaagggctcagaggcctggtgaccaccgccccacttccgcccccacgtgctctgacactggctgccgtaacgccaaggaccgtgcacctgacatggcagccttctgcaggcgccacacactacctggttaggtgcagcccagcatcccctaaaggtgaggaagaggaacgagaagtccaagtaggtcgcccggaggtactcttggacggactggaaccagggcgggattacgaggtcagtgtgcaatcactacgggggcctgaggggagcgaagctaggggcatacgggctaggacccccactcttgctcccccgaggcacctgggcttttcagatgtgtctcacgacgccgcccgagtattctgggaaggagctccaaggcctgtccggttagtgagagtcacttatgtatcatccgaaggcgggcacagcgggcaaacagaggcgcccggcaatgccacgtccgccaccctaggtcccctgtcttccagtacaacatacactgtgagagttacatgtctttaccccggcgggggaagctcgaccctgacaggcagggtgacaaccaagaaggcaccatctccttcccaactaagcatgacagagttgccgggagatgccgtgcagctggcttgggtggccgctgctccaagtggggtcctcgtctatcagataacatggacacccctaggggaaggcaaagcccatgagattagtgttccaggaaatctggggacagcagtgctgcccggcctggggagacacacagagtacgacgtcacaatactggcttactatagagatggggcccgtagtgaccctgtgtctctgaggtacaccccttccacagtttcacgcagtccacctagtaacctagctttagcctctgagacccccgatagcctgcaagtaagctggaccccaccacttggacgtgtgctgcactactggctcacgtacgcccccgcttcgggactaggacctgaaaagagcgtgtccgtacccggtgctcgcagtcatgtcacattgccagatctgcaggcagccactaagtacagagttttggttagcgctatatacgcagcgggacgtagcgaggccgtctcggccactggtcaaacagcgtgtcccgcactgcgacccgacggctccctccccggcttcgacctcatggtggccttttctctggtagagaaagcgtacgccagtattcgcggcgtggcaatggaaccaagtgccttcggtggcacaccgaccttcacgctattcaaagacgcacagcttacccgtcgggtttctgacgtgtacccagctccactcccacccgagcacacaatcgtgttcctcgttcgcctgttgcccgagacaccaagggaagcctttgccctgtggcaaatgactgctgaggatttccagcctttactgggcgttctgcttgatgcgggcaaaaaaagcctcacttacttccaccgggaccctcgagcggcattacaggaagctacgtttgatccgcaggaggtgcggaagattttcttcgggagctttcacaaagtacacgtcgcagtcgggcgctccaaagttagactgtacgtagattgtcgcaaggtcgccgagcgcccattgggggaaatgggatccccacccgccgccgggttcgttaccctcggacgcttagccaaagctagggggccaaggtcttcttccgcggcatttcaactccaaatgttgcagattgtgtgctcagacacatgggctgacgaggaccggtgctgtgaactgcctgccagtcgggatggcgaaacttgtccagcctttgtttctgcttgcagctgtagttccgaaactccaggcccccctggtcctcaagggccccctgggctgcctggcaggaacggaacacccggcgagcaggggtttccagggccccgaggtccacccggggtgaagggagagaagggagaccacgggcttcccggtctgcagggccatcccggccatcaggggattccagggcgagttggactccagggccccaagggcatgaggggacttgagggaaccgcagggttgccgggtcccccgggaccccgggggttccaaggtatggcgggggccaggggaaccagcggtgaaagaggaccacccggcactgtggggccaaccggactgcccgggcccaaaggggaaaggggggaaaagggtgaaccccaatccctggcgaccctatatcaattagtttcccaggcttgcgagagcgccatccagacgcacgtgtccaagttcgacagcttccacgaaaatactaggcccccaatgcctatcttagaacaaaaactggaaccaggcaccgaacctctgggttcacccgggacacggtccaaagcacttgttcccggagagtggggcaggggagggcgccacttggaggggcgcggggagccaggggccgtcggacagatggggtctcccggacagcagggtgccagcacacaaggcctgtgggagtag

SEQ ID NO: 321807 - DNA, 3894 bp, Artificial Sequence
  derived and/or modified sequence
atgtcctctggggatcctgctcacctgggcctctgcctgtggctctggctgggtgcaactctgggcagagaacaggtccaggcaagcggactccttaggctggctgttctaccggaggataggttacagatgaaatggagagagtcagaggggtccgggctcggatacttggtgcaggtgaagccaatggctggcgactccgagcaagaggtgatcctaacaactaagacacctaaggccactgtcggtgggctgagcccgtcgaaaggttacactctgcagatttttgaactgacaggatctggtaggtttttgctggcacggcgggagtttgttatagaagacctcaaatctagttctttggatcgttcgtctcaaaggccccttggctctggtgcacccgagcctacgccctctcacaccggctcacccgaccccgagcaggcatccgaaccccaggttgcatttacgccatcgcaagacccccgcacaccaggtggaagcgaatggcgggagactggcccccagtttcgttgtcttccacctgtgccagccgatatggtctttttggtcgatgggagctggagtatcgggcactcccactttcagcaagtgaaagatttcttggcctccgtgatcgcgcccttcgaaatcggcccggacaaggtgcaggttgggctgacgcagtacagcggcgatgcacagacagaatgggatctgaactcattgagcaccaaggaacaggtcctggcggcagtccgccgcctgcgctataagggcggaaatactttcaccgggcttgccctaacccatgttctgggccagaatctgcagcccgctgcgggtttaaggcctgaagcagcaaaagtggtcattctggtgacagatggaaagtctcaagacgacgttcatactgcggcgagggtgctcaaggatctcggtgtgaacgtatttgccgtgggagtgaagaacgcagacgaagctgagcttagactcttggcatcgccccctagggatatcaccgtgcacagtgtgcttgatttcctccagctgggggcgctggcaggtttgctgtcccgcctcatatgccaaagactgcagggcggctcaccacgccaaggcccagctgccgcacccgcgctcgacactttgccggcacctaccagtctggtgctatcacaggtgacatcaagttccatcaggctgagttggacacctgcaccccgacatccgctcaagtatcttatcgtgtggcgcgccagccgcggagggactccaagggaagtggtcgttgagggacctgccgcctccacagaactgcacaacctcgcgagtagaactgagtatcttgtgagtgtctttcctatttatgagggcggcgtgggcgaagggcttcggggtcttgtgactacagctcccttgcctcctcccagggcactcaccctagcagccgtgacaccaagaaccgtccacttgacttggcagccaagcgccggagccacccattatcttgtgagatgttccccagcaagccctaagggagaggaagaagaacgggaggtgcaggtcggaaggcccgaagtgctactcgacggcctggagcccggtagggactatgaagtctccgtgcaaagtcttcggggtcctgagggctcagaagcaagggggatccgggcccggaccccaaccctggcgcccccccgacacctgggcttcagcgacgtgagtcacgacgccgcaagagtgttttgggaaggagccccacgccccgtgaggcttgtgcgagtgacatacgtcagttcagagggaggccatagcggccagactgaagcccccggtaatgccaccagcgctaccctgggccctctgagcagtagtaccacatatacagtgcgagtgacatgcctgtatcccggtggcgggtcttctaccctaaccggcagagtgacaactaaaaaagcgcccagtccctctcagctctcgatgactgagctccccggggacgccgtccaactggcctgggtcgccgccgctcccagtggcgtgcttgtgtaccaaatcacttggactcctctgggggagggaaaggcgcatgagatttctgtacccgggaacctgggcaccgctgttctgccaggactcggtaggcacacagaatacgacgtgacgatactcgcttactacagagatggggctagaagcgaccccgtttcgctacgatacaccccttctactgtgtctagaagtcccccatcgaatctggcacttgcaagcgaaaccccagatagcctgcaggtgtcttggacaccaccccttgggcgcgtcttgcactactggctgacctacgcacccgcttcgggattaggcccggaaaaaagtgtgtcggtgcctggagcccgcagccacgttacactgcctgacttacaggcagcaacaaaatatcgagtgctcgtctctgcgatctacgctgcaggcaggtctgaggctgtgagtgctacagggcaaactgcctgcccagccctgcggcccgatgggtccctccccggattcgacctcatggtggcattcagcctcgtcgagaaggcgtacgccagtatcaggggagtggctatggaaccttccgcctttggtggaactcccacctttacactgttcaaagacgctcagctaacacgccgggtgagcgacgtctatcccgccccactacctcccgagcacacaatcgtattcctggtgcgattgctcccagaaactccgagagaagcttttgctctctggcagatgaccgctgaagattttcagcctctgttgggtgtgctgcttgatgctggtaaaaaaagtttgacctacttccaccgggaccctcgggctgctttgcaggaggcaacctttgacccgcaggaagtgcgcaagatctttttcggctctttccataaagtacatgttgctgtggggcgatctaaggtccgcctctacgttgactgcaggaaagtagccgaaagaccccttggtgaaatgggttcccccccggccgcgggttttgtgactctggggcggctcgccaaggcccggggcccccgaagtagctcggcagccttccaattgcagatgctccagatagtgtgtagcgacacctgggcggatgaagaccgctgttgcgaattacctgctagtagggacggcgagacttgcccggctttcgtgagcgcctgctcatgttcctctgaaacccctggcccccccggcccccagggacctccgggcctgccaggcaggaacggaacccctggggagcagggctttcctggaccaaggggcccccccggcgtcaagggagaaaagggtgaccacggtcttcctgggctgcagggccacccaggccatcaaggaattcccggccgggttgggctgcaaggtccaaaggggatgcggggtttggaggggaccgccggacttcccggtcctcctggtcctcgcggttttcagggcatggccggagcccgaggtacctccggcgaaagaggtccccctggtacggtaggaccaacaggcctgcccgggccaaagggggagagaggcgagaaaggtgagcctcagagcctggcgaccctgtatcaactggtgtcacaggcctgcgaatcagcaatacagacccatgtgtccaagtttgactctttccacgagaacacgcggccccctatgcctatcctagagcagaagctcgagccgggcaccgagccattaggctccccaggtactcgctctaaggcactggtacccggtgaatggggacgcgggggacggcatcttgagggtcggggcgaacctggagcggtaggacagatgggatctcccgggcagcaaggtgcatctacgcagggcttatgggaatag

SEQ ID NO: 321808 - DNA, 3894 bp, Artificial Sequence
  derived and/or modified sequence
atgagcagcggggaccctgcccacctgggcctgtgcctgtggctgtggctgggcgccaccctgggccgggagcaggtgcaggccagcggcctgctgcggctggccgtgctgcctgaagatcggctgcagatgaagtggagggagagcgagggcagcggcctgggctacctggtgcaggtgaagcccatggccggggacagcgagcaggaggtgatcctgaccaccaagacccccaaggccaccgtgggcggcctgagccccagcaagggctacaccctgcagatctttgagctgactggaagtggccgcttcctgctggcccggcgggagtttgtgattgaggacctgaagagcagcagcctggacaggagcagccagaggcccctgggcagcggggcccctgagcccacccccagccacacaggcagcccagaccctgagcaggccagcgagccccaggtggccttcacccccagccaggaccccaggaccccaggcggcagcgagtggagggagaccggcccccagttccgctgcctgccccctgtgcctgctgacatggtgttcctggtggatggctcctggagcatcggccacagccacttccagcaggtgaaggacttcctggcctctgtgattgccccctttgagatcggccctgacaaggtgcaggtgggcctgacccagtacagcggagatgcccagacagagtgggacctgaacagcctgagcaccaaggagcaggtgctggccgctgtgcggcggctgcgctacaagggcggcaacaccttcaccggcctggccctgacccacgtgctgggccagaacctgcagcctgctgctggcctgcggcctgaggccgccaaggtggtgatcctggtgacagatggcaagagccaggatgatgtgcacacagctgcccgggtgctgaaggacctgggcgtgaatgtgtttgctgtgggcgtgaagaatgctgatgaggccgagctgcggctgctggccagccccccccgggacatcaccgtgcacagcgtgctggacttcctgcagctgggcgccctggccggcctgctgagccgcctcatctgccagaggctgcagggcggcagcccccggcagggccctgctgctgccccagccctggacaccctgcctgcccccaccagcctggtgctgagccaggtgaccagcagcagcatccggctgtcctggaccccagcccccaggcaccccctgaagtacctgattgtgtggagggccagcagaggaggcaccccccgggaggtggtggtggagggccctgctgccagcacagagctgcacaacctggccagcaggacagagtacctggtgtctgtgttccccatctatgaaggaggagtgggggagggcctgcggggcctggtgaccacagcccccctgcccccaccccgggccctgaccctggccgctgtgacccccaggacagtgcacctgacctggcagcccagcgctggggccacccactacctggtgcgctgcagccctgccagccccaagggggaggaggaggagcgggaggtgcaggtgggccggcctgaggtgctgctggatggcctggagcccggccgggactatgaggtgtctgtgcagagcctgcggggccctgagggcagcgaggcccggggcatccgggcccggacccccaccctggccccacccaggcacctgggcttcagtgatgtgtcccatgatgctgcccgggtcttctgggagggcgcccccaggcctgtgcggctggtgcgggtgacctacgtgtcctctgagggcggccacagcggccagacagaggcccctggaaatgccaccagcgccaccctgggccccctgagcagcagcaccacctacacagtgcgggtgacctgcctgtacccaggcggcggcagcagcaccctgaccggccgggtgaccaccaagaaggcccccagccccagccagctgtccatgacagagctgcctggagatgctgtgcagctggcctgggtggccgccgcccccagcggcgtgctggtgtaccagatcacctggacccccctgggggagggcaaggcccacgagatctctgtgcccggcaacctgggcacagctgtgctgcccggcctgggccgccacacagaatatgatgtgaccatcctggcctactacagagatggagcccggagtgaccctgtgtccctgcgctacacccccagcacagtgagccgcagcccccccagcaacctggccctggccagcgagaccccagacagcctgcaggtgtcctggaccccacccctgggccgggtgctgcactactggctgacctacgccccagccagcggcctgggccctgagaagtctgtgtctgtgcctggggcccggagccacgtgaccctgcctgacctgcaggccgccaccaagtacagagtgctggtgtctgccatctatgctgctggccgctctgaggccgtgtctgccaccggccagacagcctgcccagccctgcggccagatggcagcctgcccggctttgacctgatggtggccttcagcctggtggagaaggcctatgccagcatccggggcgtggccatggagcccagcgccttcggcggcacccccaccttcaccctcttcaaggatgcccagctgacccggcgggtgtctgatgtgtacccagcccccctgcccccagagcacaccatcgtgttcctggtgcggctgctgcctgagaccccccgggaggcctttgccctgtggcagatgacagctgaggacttccagcccctgctgggcgtgctgctggatgctgggaagaagagcctgacctacttccaccgggaccccagggctgccctgcaggaggccacctttgacccccaggaggtgaggaagatcttcttcggcagcttccacaaggtgcacgtggccgtgggccgcagcaaggtgcggctgtatgtggactgcaggaaggtggccgagcggcccctgggggagatgggcagccccccagctgctggctttgtgaccctgggccgcctggccaaggcccggggccccaggagcagcagcgctgccttccagctgcagatgctgcagatcgtgtgcagcgacacctgggcagatgaagatcgctgctgtgagctgcctgccagcagagatggagagacctgcccagcctttgtgtctgcctgcagctgcagcagcgagaccccaggccccccaggcccccagggccccccaggcctgcccggcagaaatggcaccccaggagagcagggcttccctggcccccggggccccccaggagtgaagggggagaagggggaccacggcctgcccggcctgcagggccaccctggccaccagggcatccctggccgggtgggcctgcagggccccaagggcatgaggggcctggagggcacagctggcctgcccggccccccaggcccccggggcttccagggcatggccggggcccggggcaccagcggggagcggggccccccaggcaccgtgggccccaccggcctgcccggccccaagggggagcggggggagaagggggagccccagagcctggccaccctgtaccagctggtgtcccaggcctgtgagagcgccatccagacccacgtgtccaagtttgacagcttccacgagaacacccggccccccatgcccatcctggagcagaagctggagcctggaacagagcccctgggcagccctggcaccaggagcaaggccctggtgcctggagagtggggccggggcggccgccacctggagggccgcggggagcccggggctgtgggccagatgggcagccctggccagcagggcgccagcacccagggcctgtgggagtag

SEQ ID NO: 321809 - DNA, 3894 bp, Artificial Sequence
  derived and/or modified sequence
atgagcagcggcgaccccgcccacctgggcctgtgcctgtggctgtggctgggggccactttaggacgcgaacaggtgcaggcaagcgggcttctgcgcctggccgttttaccggaagacaggttacagatgaaatggagagagtcagaaggtagtggattgggttatttagtccaggttaaacccatggcgggagattccgagcaggaggtgatcctaacaactaaaacaccaaaggcaacggtgggagggttaagtcccagcaaagggtatacacttcagatattcgagctgaccggcagtggcaggttcctgctggctcgacgagagttcgttatcgaggatttgaaaagcagcagcttggaccgatcttcccaacggcccttgggctctggcgcccccgaacccacaccatcccacacaggttcccccgatccggagcaggctagcgagccgcaagtggcttttactccaagtcaggacccccgcacaccgggtggaagtgagtggcgggaaaccggaccccaattcagatgcctgcctccagtgcccgcagacatggtatttctggtggatgggtcgtggagcattggccactctcattttcagcaggtgaaggattttttagctagcgtgattgcccctttcgaaatcgggcctgacaaggtccaggtggggctgacccagtactctggtgatgcacagacagagtgggatttaaactccttgtcgacaaaagagcaagtgctcgctgccgttagaagactgcgttacaagggcggcaacacattcacaggccttgctctgactcacgtcctaggacagaatctccaacccgcagccggtttaaggcccgaggccgctaaggttgtgatactggtgaccgacggcaaaagccaggatgatgtccataccgccgctagagtgcttaaagacctaggggtgaatgtgtttgccgtcggggtaaagaatgcagacgaagcagagctgagactcctcgcctctccacctcgagatattactgtacattctgtgctggattttctgcaactaggagccttggccggcctcctatccagactgatctgtcagcggctgcagggaggctcccccagacaagggcccgctgcagcccccgcattagacaccctgcccgctcctacatccctggtgttatcccaggtgacctcaagttctattcgcctgtcttggacccctgcccctcgccacccccttaagtatctgatcgtgtggagagcctcccggggaggtacccccagagaagtagtggttgaaggacccgcggcatcaaccgagctgcacaatctggcatccagaacagagtacttggtctccgtgtttcctatctacgagggaggcgtaggcgaaggcctacgcggcctcgtaacaacggccccactgcccccaccccgtgcactgacactggcagccgtcacacccaggacggtgcacctgacatggcagccctccgccggtgctacgcactacttggtgaggtgctcccctgcgtctccaaagggtgaggaggaggaacgcgaagttcaggtggggcgacctgaagtcctcttggatggcctcgagcctggtagggactacgaagtgagtgtgcagtctctccgggggcctgagggatctgaggcccggggaattagagccagaactcccactctggctccccctcgtcatctcgggttctccgatgtctctcacgatgcagctcgggttttttgggaaggcgcaccccgaccagtcagactcgtaagggttacgtatgtatcgagtgaagggggacactctggccagaccgaggcacctggcaatgcaacatccgccactctcgggccactgagttcctcgaccacctacaccgtgagggtaacctgcttatatcctggcggtggcagttccacgctcactgggcgtgtgaccaccaaaaaagcacccagtccatctcagttgtctatgaccgagctccccggcgacgcagtgcagttagcgtgggtggctgcagcaccctctggagtgctggtttaccagatcacatggactcccctaggcgagggaaaagcccacgaaataagcgtacccggcaacttaggaacagcagtgttgcctgggttgggaagacacaccgagtacgacgtgacaattctggcatactatagggatggcgcgcgcagcgatcccgtttccttgcgctatactccatccaccgtgtcacgatcgcccccaagtaacctggccctcgccagtgagacacccgatagtctgcaggtctcttggacccccccacttgggagagtcttacactactggctgacctatgctcccgcatccggtctcggcccagagaagtccgtatcggtgcccggcgccagatcccacgtgactctccctgatcttcaggcagccacaaaatacagggtattggtaagtgctatatacgctgccgggcggtctgaggcagtctccgccactggccagacggcttgtcccgcactgagaccagacgggtctctgcccggcttcgatctgatggtagcgttcagtctggtggagaaagcctatgcctctattcgaggggttgcgatggagccctctgcctttggcgggaccccaaccttcacactcttcaaggatgctcagctgacccgcagagtctcagacgtctatcccgctccgctgccccccgaacacaccattgtcttcctagtgaggttgctcccagagacccctcgggaggcatttgcgctgtggcaaatgacagctgaggatttccagccattattgggggtgctccttgacgccggcaagaagagtttgacctactttcacagagacccacgggctgcactgcaggaagcaaccttcgatccacaggaggttaggaagatctttttcgggagtttccacaaagttcatgtggccgtgggacgaagcaaggtgagactttatgtagattgcaggaaggtggctgaacgtcctctaggagaaatgggatcccctcctgctgcaggcttcgtgacgttgggtagattagccaaagctcgcggaccacggtctagctcagctgccttccagctgcagatgttacagatcgtatgttcagacacatgggctgacgaagatcgttgctgcgagctccccgctagcagggacggggagacatgtccagcgtttgtgagtgcttgcagctgtagcagcgaaacaccaggtcctccaggaccgcagggcccgcctggcctgccaggtagaaacgggacgcctggcgagcaggggtttcctggtccaagaggccctcccggtgtgaagggggaaaaaggagatcacgggctgcccggcctgcagggacacccaggccatcaaggaatacctggcagggttggcctgcagggaccaaagggcatgcggggcttagagggcacggctggcctgcccggccctccagggcccagggggttccagggtatggccggggcccgcggcacatctggggaacgagggcccccaggcactgtcgggcctactggcctgcccggaccaaagggagaacggggcgaaaagggggagcctcagtctctcgccactctgtaccagctggtgtcccaggcctgcgaatccgccattcagacccatgtgtccaagttcgactcttttcacgaaaacacccgcccccccatgcctattctggaacagaagttggagccagggaccgaaccattgggttcacccggtaccagatccaaggcactcgttccgggagagtggggccgcggcgggcgacacttggagggcaggggtgaacctggcgcagtgggccaaatgggcagccccggccagcagggggcctctactcaagggctttgggagtag

SEQ ID NO: 321810 - DNA, 3894 bp, Artificial Sequence
  derived and/or modified sequence
atgagcagcggcgaccccgcccacctgggcctgtgcctgtggctgtggttgggagccacattaggaagagagcaggtgcaggctagcggcctcctgcggctggccgtgctcccagaggatcgcctccagatgaagtggagggaatcggaaggatctggcctgggctacttggtgcaggtgaagcccatggccggtgactccgagcaggaagttatcctgacgacaaaaaccccgaaggcaaccgttgggggcctttcacctagcaagggatatacgctgcagatatttgaactcacagggtcaggacgcttccttctggcacgacgggagtttgtgatcgaggatctcaagtcaagttccctcgatcgttctagccaacggcccttaggctctggggcaccagaacctacccctagccataccggctccccagaccctgaacaagcctctgagccacaagttgcttttacccccagtcaggaccccagaactccaggcggtagcgaatggagagagactgggccccagtttcgttgcctgcctcccgtccctgccgacatggttttcttggtcgatggcagctggagcattggccacagtcacttccagcaggtcaaggacttcctggcatctgtgattgccccatttgaaataggccctgataaagtgcaggtcggtctgacccagtactcaggcgatgctcaaaccgagtgggacctcaacagcctgtccactaaggagcaggtccttgctgctgtccggagactccggtacaagggaggaaacactttcacaggcctggccctgactcatgtgctcgggcagaacctgcagcccgctgctggccttcgacctgaagctgctaaagttgtcatcctggtgaccgacggtaagagccaggacgacgtgcataccgccgccagggtcctgaaagacttgggcgtaaacgtatttgccgtgggtgtgaaaaacgctgacgaagccgaactgcgcctgcttgcttctcctccaagggacatcacggttcactcagtgctggacttcctgcaactgggagccctggctggactcctgagccgacttatttgtcagcgcctgcagggaggctccccacggcaggggccagctgccgccccagccttagacaccctgcccgccccaactagcttggtcctgtcacaagtgacctcttccagtatcagactgtcatggaccccagccccgagacaccctttaaagtatcttatcgtttggagagctagtcgtggaggcacgcctcgcgaggtggtggtggagggaccagctgcatccacagaactccataacctcgcaagccggacagagtatctggtgagtgtattccccatctacgagggtggagtgggcgaaggattaaggggccttgttacaacagcaccattacccccacctcgcgccctaacattggcggccgtcacacctcgaactgtgcacctcacatggcagcccagtgccggggcaactcactacctggttcgctgttcaccagcatcccccaagggggaagaggaagagcgagaagtgcaggtaggccgtcccgaggtattattggacgggcttgagccgggtcgcgattatgaagtcagtgtgcagtctctgcgcggtcccgaaggttctgaagcaaggggcatcagggcccgcacccctacattggctccacccaggcacctgggtttcagtgacgttagccacgacgccgcacgcgtgttttgggaaggcgcccctcgtcccgtccgactcgtgagggtgacttacgtgtcgagtgagggcggccatagcgggcaaacagaagcaccaggaaacgctacctcagcaacactggggccactgagtagtagtaccacatacacagtgagagtaacctgcttatatcctggaggcggcagcagtacccttaccggacgggtcaccacaaaaaaggcaccgtccccctctcaactctccatgacagagcttcctggggacgcagtgcagctcgcttgggttgccgctgccccctctggcgtgctcgtctatcagatcacttggacgccactaggggagggtaaggctcacgaaatctccgttcccggaaacctgggaaccgccgtgctgcctgggctaggcagacataccgaatacgacgttaccattttggcctattaccgcgacggagcccgctccgatcctgttagtttaagatatacgccctctaccgtgagtagatctcctcccagcaatctggcgctggcgtcagaaactcctgacagcctgcaggtatcatggactccacctctagggcgtgtgctacactactggcttacatatgcaccagcaagcggactggggcctgaaaaaagcgtgtccgtgccaggcgccagaagccacgtcactctgcccgacttgcaggcagctaccaaatatagggtcttagtttcagccatctacgcagcggggcgcagcgaggcagtgtcagctacggggcaaacagcctgcccagctctcaggcctgatgggtctctgcctggattcgatctgatggtggcgttctcactggtcgaaaaggcttatgcatcaattcgtggcgttgcaatggagccctctgccttcgggggtaccccaaccttcacactgtttaaagacgcccaactgacacggagagtctctgatgtgtacccggcccctttgcctcccgagcacaccattgtcttcctggtgagactgctgcctgaaacgcctcgtgaagcctttgccctttggcagatgaccgccgaagatttccaacctctcctgggggtcctactcgatgctgggaagaagtcgctgacttattttcacagagacccgcgggctgcactccaggaggccacattcgacccgcaggaggtgcgaaagatcttcttcggttctttccataaggtgcatgtggccgtggggcgcagtaaggtgcgcctgtatgtagattgccgcaaggtcgccgaacggcctctcggtgagatgggcagcccgccagctgctggattcgtaacactggggcggctcgccaaagcccggggtccgaggagttcatccgcagcatttcagctacagatgcttcaaattgtttgcagtgatacttgggctgacgaagataggtgttgcgagcttcccgccagtagagacggagagacctgtccagccttcgttagcgcgtgctcctgtagctcagagacccctggtcctccaggcccccagggaccccctgggctacctggacggaacggcacccccggggaacaaggattccctggacctagaggccccccaggggtaaagggagagaaaggagaccatggtctacccggtttacaagggcatcctgggcatcagggaattcctggacgcgtgggtcttcaggggccgaaaggaatgcggggtctcgagggtacagccggtcttccaggcccgcccggcccccgtggctttcagggcatggcgggggccagaggtaccagcggcgagcgcggccctccagggaccgtgggtcccacagggctgcccggacctaaaggcgagcggggggagaagggagaaccccagtctctagccacactgtaccaactggtaagtcaggcttgcgagagcgctattcagacccacgtgtcaaagttcgactcctttcacgaaaatacccggccccctatgcccatactggagcagaagcttgaacccggcacagaaccactgggatccccagggacgaggtcaaaggcactggtgccaggagaatggggccgtgggggacgccatctggaggggcggggagaaccaggcgctgttggccaaatggggagccctggccagcagggtgcgagtacccaaggcttgtgggagtag

SEQ ID NO: 321811 - DNA, 8097 bp, Artificial Sequence
  derived and/or modified sequence
gtcagggagaggacagacggggggacggctgaagggcatggcctcttccctgccacagcccgagcaccatgagctccggagaccctgcacacctcggcctctgcctctggctgtggctgggcgccaccctgggaagagagcaagttcaagcaagcggtctcctgaggctggctgtgctgcctgaggaccggctgcagatgaagtggagagagtcggaggggagcggcctcggctacctggtgcaggtgaagcccatggcaggggactcggaacaggaggtgatactgaccaccaagacccctaaggccacagtggggggcctgagcccctccaagggctacaccttgcagatcttcgagctcactggctctgggcgcttcctgctagctcggagggagtttgtgattgaggatctgaagagtagctccctggacaggagcagccagaggcccctcggctctggagccccggagcccaccccctcccacacggggagcccagaccctgagcaggcttctgagccccaagttgccttcacaccaagccaggatccgcgcactcctggtgggtcagagtggagagagaccggcccccagttccgctgcctgccccccgtgcctgctgacatggtcttcctggtggacgggtcctggagcattggccacagtcacttccagcaggtcaaggacttcctggccagtgtcatcgcaccctttgaaatcgggccggataaggtccaagtaggcctgactcagtacagcggggatgctcagactgagtgggacctgaactccctcagcaccaaggaacaggtgctggcagctgtgcgccgcctccgctacaagggggggaacacgttcacaggccttgccctgacccacgtgctggggcagaacctgcagccggcggctggcctccgtccagaggcagccaaggtggtgattctggtgacggacggcaagtcccaggacgatgtgcacactgctgcccgtgtcctcaaggacctgggcgtgaacgtcttcgctgtgggtgtgaagaacgccgatgaggctgagctgaggctcctggcgtccccgccgagggacatcaccgtccacagcgtgctggacttcctgcagctcggcgcgctggctggcctgctcagccgtctcatctgccagaggctccagggtgggagcccgcggcagggcccagcagcggctccagccctggacaccctccctgcccccaccagcctggtcctgagccaggtgacctcctccagcatccgcctgtcctggactccagccccccggcaccccctcaagtatctgatcgtttggcgagcctctagaggtggcacccccagggaggtggtggtggagggacccgccgcctccacggagctgcacaacctggcctcccgcacagagtacctggtctccgtgttccccatctatgagggcggggttggcgaaggcctgcggggcctggtgaccacagcacctctgcctccgccccgggcgctgaccctggccgcagtgacgcccagaaccgtccacctcacctggcagccctcggccggggccacccactacctggtgcgatgttctcctgcttcccccaagggtgaagaggaggagcgagaggtgcaggtcgggcggcccgaggtgctgctggatggcctggaacctggcagggactatgaggtctcggtgcagagcctgcgaggccctgagggcagcgaggcccggggcatccgtgccaggacccccaccctggcccccccgagacacctgggcttctcagacgtgagccacgacgcggcacgagtgttctgggagggtgccccgaggcctgtgcgcctggtcagggtcacctatgtgtccagcgagggtggacactcggggcagacagaggctcctgggaacgccacctcggccacgctggggcctctctcttcctccaccacctacactgtccgtgtcacctgcctctaccctgggggtggctcctctacgctgactggccgggtgaccaccaagaaagctcccagcccaagccagctgtccatgacggagctgccaggggatgcagtccagctggcgtgggtggccgcagccccgtctggcgtgcttgtctaccagatcacgtggacgcccctgggagaggggaaggctcacgagatctctgtcccagggaacctcggcacggccgtcctgcctggcctagggaggcacacagagtacgacgtcaccatcttggcctactacagggacggggcccgcagtgaccctgtgtccctccgctataccccctccacggtgagcaggagcccaccctccaacctggccctggcctcggagacccccgacagcctgcaggtcagctggacgcccccgcttggccgcgtgctccattactggctcacctacgcccccgcctctggcttgggacccgagaaatccgtctctgtgccaggagccaggagccacgtgacactgcccgacctgcaggcagccacgaagtacagggtcctggtctcagctatctatgcagcaggcaggagtgaggctgtgtctgccacgggccagacagcctgcccagccctccgccctgacggctccctcccagggtttgacctgatggtggccttcagcctggtggaaaaggcttatgcgtccatccggggcgtggccatggagccctctgccttcggtgggaccccgaccttcacgctcttcaaggacgcccagctgacaagacgggtcagtgacgtctacccagcccccctacctccagagcacaccatcgtcttccttgtgcgcctacttcccgagacaccccgtgaggccttcgcgctgtggcagatgacagccgaggacttccagcccctccttggggttctgctggatgccgggaagaagtccctgacctacttccaccgtgaccccagggctgccttgcaggaggccaccttcgacccgcaggaagtgaggaagattttcttcgggagcttccacaaggtgcacgtggctgtgggccgctccaaggtcaggctctatgtggactgccggaaggtggctgagcggccccttggggagatgggcagcccacccgctgcgggcttcgtcacgctggggaggctggccaaggccaggggcccccggagcagttcggccgcgtttcagctccagatgctgcagatcgtgtgcagtgacacctgggccgatgaggaccggtgctgtgagctccctgcctcgagggatggagagacctgccccgccttcgtgtctgcctgttcctgttcctcagagacccctgggcccccaggacctcaaggacccccaggcctccctgggaggaatggcaccccaggagagcagggcttcccagggcccaggggtccaccaggggtcaaaggagagaagggagaccatgggcttccaggcttgcagggccaccccggccaccagggcatccccgggagagttggcctccagggaccaaagggaatgagaggcctggagggaactgctggcctgcctggaccccctggccccagggggttccagggcatggcaggggccaggggcactagtggagagcgaggacctccagggaccgtggggcccacaggactgccagggcccaaaggggaacgaggagagaagggcgagccgcagtcccttgccaccctctaccagcttgtgagccaggcctgtgagtctgccattcagacacacgtgtcaaagttcgactccttccacgagaacaccaggccccccatgcccatcttggagcagaagctggagccgggcactgagcccctggggtcccctggcacccgcagcaaggccctggttcctggagaatgggggcgtggtggccgccaccttgagggcagaggggagcctggagctgttggtcagatgggcagccctgggcagcagggggctagcacccagggcctctgggagtgacaggacattttctgcactgccccgaggaacgctgagccttcctccctgggtttgtctggacaccgagagcgaccacatcctggagaagccaggagaaaagctcaggaagagcctgcaggtggaaggagagggaagcagcggcctcggccaaggcccaccccatactcttggctctgtagcatttccaagttcagataaacccctgagtgctcacccagccaagcgaggcgggagtcatttcctgggagagtgtcccccaccctggctctgtgcaccccaccttgaggccctgcagcttcagccgcagtggggaaggggaggggctgggctgatggcgaatcgggttcaggagggcagcagtgccctgtggccgtctcagtagctctaaaacaggctcaacaacatgccccgcccctttctctgggcctcatctaagcctggccagggccctgtgggcccgcctctctctgcgcctcacgcaggcaacagatggttccactgctggcccaccagtcacctgcacgatggctcctccctcagaacagcactcccaccccggccccagcaccttcacatctgggcacaggcaggtccctgcctgcctcatcgtcccctctgtccccagcccaagaaggagttcagatcctgtgtgtgaatggccacccctcacccacccagccctgtgctgagttccttgtgcagggacattgctttgagacttggcaccatcagcccctggtccttagggtctcagagcaaggtcatccctcagcaggcttctggcctgtgcgctcctcagcacctctgcccaggtctctcccaaccatcacagacgctgtgtgagcctggacttcctgccttatccccactgtggcccaaacagcatgggggcaagctcagaacacacacctgggcttctgggccttgtggcccgtgggggtgatgtgggaacttctacttcctttccaaacaaatattcagtaactagtccactgttaccacttaggcagctaagcaagaaaggtgccagaaatgaagagggaagccatatcattgaggagagaatgaaaagtattaaaaaggaacaaagagagacccttgatattgacagaaggaaaacccaccaagatcaccagtgcagcattgcgtgcaccaaagcataccccaaagaggtgagcgcaaaacagcttcagggcaaacacttcatctatgattcaactgttccaggaactgaccagacctggagaccaaatagagagtcataggcagggtcagcaggatgggagagagcgcctgcacccacaggagccacagccctgactgaggccaggaagcagccccaaatgccagctcccactgcagcatgagaacagaaacagaccactgaaaattcccaaagtctgtggacaaatcagacgtcgaagaagtcacgtggcatcgagacagattttgcactgagggacaaggagagcatgtggccaaagtaggtgcaggtaaagcagcatctggggcagagttatagccttcagtgcaggtatcagacacagttgttgagagcagcagcccaagccagcccctccgtcctgcagggaggacacctaggtcacttggcttctgttggggagctgagttgcttcagattgtgtgaccagcaaaacagcttggttgctctcacttggtttctccagggcggggaattacatgtccccagctgaactgagaaggctctttgagcagtggagtgagcaggctttgtcatgaggcaggagtggggctagaatcaagcccagagcccacagggcatccagagccttccaaaggagcccctctcctggggctctccaatttgatgaagggactgggcactgggtggctgagaccacattggcagccaggaggaggcagcctggccggggggaaccagggtggctctaatccccaccaccccctcagctgccctacccccgccacgctggtgtgacaccagtgatgctcagcctcaaaaggggagtccggctgtcttcgggaaactgactttatgctggaggccaattaaaatggcacagcaaaggcagcggccagctggtgcccaggcagcttagggactggtccctgaggccccacccgccccagcctgtgcagtggagctgagtacgaatcaaaggtgaggatggcaagggagctgagagcagcctccggatgcaccaaaccggcctggctcctgtttgcaggaaggcagcctccccgagacccagccgacctgcacgtctcccatcagccccgactccaccgcatccctctgggtccttttaggagcccccagggactgagccggggctcacgctcctggccagagcgctgggtttctggcaatgcctcccctcctgcctttacggccacagctctcccctccagaggcccctctgtagtgggcctcggtcccctctccacccccagaggcagcacagcttcagccctacgcagtgtgggggctccgggaggaaatgcagggaggtgcttggtcttggcccagagctcatggccttaggtgctgcccccagtcacccccgtgcccatgcagccggggatgttcagctcaggccagccaccgaggtggtgtgacgcaaggctgatctgacgctcagctcaggccgctggggtcatgggggttgtgggaaggtcatggaatcacggggctcacgctggggtcacagggtggtgtggctgtgtggactgtaaggggcgtgcagccatgcgtatctgacctgccctccctaggtctgcaggcagtgccgagtggctctgcctgaggccccaagagcgaccttggaagctccaggccttcacagcccctctgagagccacctgcaaggtggggagctgggaagaacggctcagtgatgagctcagagggaggggtgggcacagcgcccaggaaggcgggtgcgtgcaggcctgggaggaatgtgtagcaggaggcagggggtgctgtgcccgcaggaccagcaggtgaggcgtgtccacccacagaggatggctctggcccaggcagtgtcagaaatggaagctgaggaaacccaaccccagctgtagaggagcctgccccgatgccatctgcacctggggggcgacgtatggctgccagcctcttcatctaccaaggaccagggcagtggggacgggagagctgggacacgtggactcacaccagggcagatggtgggggaagccagtgtctgtagattcagtgcatttcttggggaagggcgtggaacatttggacttgagccccagcacagagacgatgtcataatacagccccccatcgtgatctgatggtaagtacagaactccttgcccagtggagaaacactctcctctcatgtgtggaatatccacacactaaccatgaactgggccataagaaaccttacattccaaaggatcctgctgttcagaactcactcactcactgatgaaactggaaaaacaaccaatgataacaagctaaagaatgcctctagaagctaaaagacacacccatgactccacagtaattcatgggttaaagagaaaaaaggaaacgtgaagatacttgtaaccaaataatgatggatgcagcgccacgtcagaatctctgtgctgcagctgcagtggtacctagagggcaatttatagctgtaaatacagtgctttgttttgttttcttgttttttgagacaaggtcttgctctgtcacccaggctggagtacagtggcatgatctcggctcaatgcaacctctgtgccaccctgggctcaagtggtcctcctgctccggtcttctgagtagcaggaaccacaggcgtgcgccaccacgcttggctaatgttttttgtatttttttaaatagagacagggtgttgccgtgttacccaggctggtcttgaacttctgagctcaaacgatccaccctccttggcctcccaaagtggtgggattacaggtgtgagtcacctcaccggcccttaaacacagtttttagggaagattccaactcaaacaattttaaatagtagaaaataaaccctgaagcagtgtgcattcattagtactgtgtttgcctgtatttaattaaaacctgattgccattggc

SEQ ID NO: 321812 - DNA, 4210 bp, Artificial Sequence
  derived and/or modified sequence
ataagctccagccttcctgtggccacagcaggaccagagtggaccagcacaccccaggagagaggactggggtcccaggagtaggaggagcccgagcaccatgagctccggagaccctgcacacctcggcctctgcctctggctgtggctgggcgccaccctgggaagagagcaagttcaagcaagcggtctcctgaggctggctgtgctgcctgaggaccggctgcagatgaagtggagagagtcggaggggagcggcctcggctacctggtgcaggtgaagcccatggcaggggactcggaacaggaggtgatactgaccaccaagacccctaaggccacagtggggggcctgagcccctccaagggctacaccttgcagatcttcgagctcactggctctgggcgcttcctgctagctcggagggagtttgtgattgaggatctgaagagtagctccctggacaggagcagccagaggcccctcggctctggagccccggagcccaccccctcccacacggggagcccagaccctgagcaggcttctgagccccaagttgccttcacaccaagccaggatccgcgcactcctggtgggtcagagtggagagagaccggcccccagttccgctgcctgccccccgtgcctgctgacatggtcttcctggtggacgggtcctggagcattggccacagtcacttccagcaggtcaaggacttcctggccagtgtcatcgcaccctttgaaatcgggccggataaggtccaagtaggcctgactcagtacagcggggatgctcagactgagtgggacctgaactccctcagcaccaaggaacaggtgctggcagctgtgcgccgcctccgctacaagggggggaacacgttcacaggccttgccctgacccacgtgctggggcagaacctgcagccggcggctggcctccgtccagaggcagccaaggtggtgattctggtgacggacggcaagtcccaggacgatgtgcacactgctgcccgtgtcctcaaggacctgggcgtgaacgtcttcgctgtgggtgtgaagaacgccgatgaggctgagctgaggctcctggcgtccccgccgagggacatcaccgtccacagcgtgctggacttcctgcagctcggcgcgctggctggcctgctcagccgtctcatctgccagaggctccagggtgggagcccgcggcagggcccagcagcggctccagccctggacaccctccctgcccccaccagcctggtcctgagccaggtgacctcctccagcatccgcctgtcctggactccagccccccggcaccccctcaagtatctgatcgtttggcgagcctctagaggtggcacccccagggaggtggtggtggagggacccgccgcctccacggagctgcacaacctggcctcccgcacagagtacctggtctccgtgttccccatctatgagggcggggttggcgaaggcctgcggggcctggtgaccacagcacctctgcctccgccccgggcgctgaccctggccgcagtgacgcccagaaccgtccacctcacctggcagccctcggccggggccacccactacctggtgcgatgttctcctgcttcccccaagggtgaagaggaggagcgagaggtgcaggtcgggcggcccgaggtgctgctggatggcctggaacctggcagggactatgaggtctcggtgcagagcctgcgaggccctgagggcagcgaggcccggggcatccgtgccaggacccccaccctggcccccccgagacacctgggcttctcagacgtgagccacgacgcggcacgagtgttctgggagggtgccccgaggcctgtgcgcctggtcagggtcacctatgtgtccagcgagggtggacactcggggcagacagaggctcctgggaacgccacctcggccacgctggggcctctctcttcctccaccacctacactgtccgtgtcacctgcctctaccctgggggtggctcctctacgctgactggccgggtgaccaccaagaaagctcccagcccaagccagctgtccatgacggagctgccaggggatgcagtccagctggcgtgggtggccgcagccccgtctggcgtgcttgtctaccagatcacgtggacgcccctgggagaggggaaggctcacgagatctctgtcccagggaacctcggcacggccgtcctgcctggcctagggaggcacacagagtacgacgtcaccatcttggcctactacagggacggggcccgcagtgaccctgtgtccctccgctataccccctccacggtgagcaggagcccaccctccaacctggccctggcctcggagacccccgacagcctgcaggtcagctggacgcccccgcttggccgcgtgctccattactggctcacctacgcccccgcctctggcttgggacccgagaaatccgtctctgtgccaggagccaggagccacgtgacactgcccgacctgcaggcagccacgaagtacagggtcctggtctcagctatctatgcagcaggcaggagtgaggctgtgtctgccacgggccagacagcctgcccagccctccgccctgacggctccctcccagggtttgacctgatggtggccttcagcctggtggaaaaggcttatgcgtccatccggggcgtggccatggagccctctgccttcggtgggaccccgaccttcacgctcttcaaggacgcccagctgacaagacgggtcagtgacgtctacccagcccccctacctccagagcacaccatcgtcttccttgtgcgcctacttcccgagacaccccgtgaggccttcgcgctgtggcagatgacagccgaggacttccagcccctccttggggttctgctggatgccgggaagaagtccctgacctacttccaccgtgaccccagggctgccttgcaggaggccaccttcgacccgcaggaagtgaggaagattttcttcgggagcttccacaaggtgcacgtggctgtgggccgctccaaggtcaggctctatgtggactgccggaaggtggctgagcggccccttggggagatgggcagcccacccgctgcgggcttcgtcacgctggggaggctggccaaggccaggggcccccggagcagttcggccgcgtttcagctccagatgctgcagatcgtgtgcagtgacacctgggccgatgaggaccggtgctgtgagctccctgcctcgagggatggagagacctgccccgccttcgtgtctgcctgttcctgttcctcagagacccctgggcccccaggacctcaaggacccccaggcctccctgggaggaatggcaccccaggagagcagggcttcccagggcccaggggtccaccaggggtcaaaggagagaagggagaccatgggcttccaggcttgcagggccaccccggccaccagggcatccccgggagagttggcctccagggaccaaagggaatgagaggcctggagggaactgctggcctgcctggaccccctggccccagggggttccagggcatggcaggggccaggggcactagtggagagcgaggacctccagggaccgtggggcccacaggactgccagggcccaaaggggaacgaggagagaagggcgagccgcagtcccttgccaccctctaccagcttgtgagccaggcctgtgagtctgccattcagacacacgtgtcaaagttcgactccttccacgagaacaccaggccccccatgcccatcttggagcagaagctggagccgggcactgagcccctggggtcccctggcacccgcagcaaggccctggttcctggagaatgggggcgtggtggccgccaccttgagggcagaggggagcctggagctgttggtcagatgggcagccctgggcagcagggggctagcacccagggcctctgggagtgacaggacattttctgcactgccccgaggaacgctgagccttcctccctgggtttgtctggacaccgagagcgaccacatcctggagaagccaggagaaaagctcaggaagagcctgcaggtggaaggagagggaagcagcggcctcggccaaggcccaccccatactcttggctctgtagcatttccaagttcagataaacccctgagtgctcaccc

SEQ ID NO: 321813 - DNA, 3894 bp, Artificial Sequence
  derived and/or modified sequence
atgtcctctggtgaccccgcacatctgggactgtgcctttggctgtggctcggagcaaccctcgggagggagcaggttcaggcctcagggctcctgaggctcgcggtattacctgaggatagactgcaaatgaagtggcgcgagtccgagggaagcggtctaggttacctcgtgcaggttaagcccatggcgggagactcagagcaggaagttatcctgaccaccaagactcccaaggccactgtggggggtctgtcgccgagcaagggctacactctgcagatttttgagctgactggctccggcaggtttctgctggcccgtcgtgaattcgtgattgaggaccttaaatcctcctccctggacagaagttctcagcgtccactgggaagcggcgctcccgagcccactccatcccacacaggctctcccgaccccgagcaggcgagcgagccacaggtcgcctttacaccatcacaagatccaaggactccagggggatctgaatggagggaaacaggcccacaatttcgctgtcttcctcctgtgcccgctgacatggtgttcttggttgacggttcttggtccatcggacactcccacttccaacaagtcaaggatttcctggcgagtgtaattgccccattcgaaattggccctgataaagtccaggtgggtttgactcagtacagcggcgacgctcagaccgaatgggatctgaattccctctccaccaaggagcaggtcctcgccgctgtcaggaggctgagatacaaagggggtaatactttcacaggactggctctgactcatgtcctcggacagaacttacagcctgccgcagggctgcgcccagaagccgctaaggtggtcattcttgtgacagacgggaagtctcaagacgatgtacataccgccgcaagggtcctgaaagatctcggagtgaatgtgttcgctgtgggagtgaaaaatgcggacgaggcagagcttagacttctggccagtcctcctagagatatcaccgttcattctgttctggattttcttcagctgggcgctttagcaggactgctttcaagactcatctgccagcgtttacagggtggcagccctagacaagggccagccgctgccccagcattagacacactgccagcacctaccagcctcgtgctctctcaagttacatcctcttcaatcagattgtcgtggacacccgctccgaggcaccccctaaaatacttgattgtgtggcgagcctcccgtggaggaacccccagagaggtggtggtcgaaggtcccgcagcttccactgaattacacaatctggccagtcgtaccgagtacttagtatctgtattccctatctacgaaggcggagttggtgagggcctcagagggctcgtgacaacagcgcctttgcccccaccacgcgcattgactctggccgctgtgacacctcgcactgtgcacctgacttggcagccctcggccggagccacacattatctggtccggtgctcccccgcttctcccaagggggaggaggaggagagagaagtgcaagttggcagaccagaagttctgctggatggcttggagcccggaagagattatgaggtgtcggtccagtctctgcgaggtcccgagggatccgaagctcggggtataagagcaagaacccctacactcgccccacccaggcaccttggcttctcagacgtcagtcatgatgcggctagggtcttctgggaaggagcaccaaggccagtgcgactcgttcgggtcacatacgtttcctcagaaggagggcatagtgggcagactgaagctccaggaaacgccacatccgcgaccctcggtccactctctagttcaaccacgtacacagtccgtgtcacgtgcctgtatccaggagggggatcttctacactgactggtcgcgtaacaacaaagaaggcacccagtcccagtcagctgagcatgacagagctccctggcgacgccgtacagctcgcctgggtcgccgcagcgccttctggtgtgttggtctaccagatcacatggaccccactgggggaggggaaagcacatgagatcagtgtgccgggtaacttgggcaccgccgtgttgcccggactcggccgtcataccgagtatgacgtaaccatactggcctactaccgagacggagcacggagcgatcccgtgagcctgcgatacacaccgtcaacagtgtccaggtctcccccaagcaacttggcccttgccagtgagacccccgattccttgcaggtgagttggacaccgccactaggacgggtcctccactattggttgacctatgcccctgcctctggactgggaccagagaaaagcgtctcagtacccggagctcgcagtcatgtgacactgcctgatttgcaggctgccaccaagtaccgcgtcctcgtgtccgccatctatgctgcagggcgatcagaggccgtatccgcaactggtcagaccgcctgccccgctctcagaccggacgggagtcttcccggattcgatctcatggttgccttcagcttggttgagaaagcctatgcctcgattagaggagtggctatggaacccagtgctttcggaggaacccctactttcaccttgttcaaggatgctcagcttacgcgaagagtttctgacgtgtacccagcgccattgcccccagaacataccatcgtctttctcgttagactgttgcccgagactccacgagaggccttcgcactgtggcaaatgaccgccgaggacttccagcctttgctgggcgtcctgctagatgccggtaaaaagagtctgacttatttccatcgagaccccagagcagccttgcaagaagcaactttcgacccacaggaggtgagaaaaatatttttcgggtctttccataaggtccacgtggctgttgggaggtccaaggttagactgtatgtggattgtagaaaagtagcggagagaccgctcggggaaatgggttctcccccagcagccggttttgtgacgctgggcaggctggctaaggcacggggacccaggtcaagtagcgccgcattccaactccagatgcttcaaatcgtctgcagcgacacatgggctgatgaagatcggtgttgtgagctgccagcaagccgagacggggaaacctgcccagccttcgtgagcgcatgcagctgttccagcgaaacacccggaccaccaggaccacaaggtccaccaggcctgccaggcagaaacgggacccctggcgagcaggggttcccaggaccaagggggcctcctggagtgaaaggcgagaaaggcgatcacgggctccctggcctgcaggggcaccccggacatcaggggatacctggtagggtggggttgcaaggccctaaagggatgcgagggctggagggaacagcaggactgccgggacctccaggaccgagggggttccagggaatggccggagcgaggggcacatctggagagaggggtccacctgggacggtcggaccaaccggcttacctgggccaaagggagaaaggggggaaaagggcgagccccaaagtctggccactttataccagttggtctcacaagcctgcgaatccgcaatccagacccatgtatctaagttcgactcctttcatgaaaacacacggccaccaatgccaatcctggaacagaaactggaacctggtacggagccattgggaagcccaggaacgcggtctaaggcactggtcccaggcgagtggggaaggggtggcaggcacctagagggcagaggcgagccaggcgctgtcggtcagatggggagcccaggacagcaaggcgcaagtacccagggcctttgggaatag

SEQ ID NO: 321814 - DNA, 3894 bp, Artificial Sequence
  derived and/or modified sequence
atgtccagtggtgatcctgctcacctgggattatgcttgtggctttggctaggcgcaactctcggaagagagcaggtgcaggcatctgggctccttcgtctggcagttctgccagaggacaggcttcagatgaagtggagggaatccgagggctcgggactgggttacctggttcaggtcaaacctatggcaggggatagcgaacaggaagtgattctaacaaccaagacacctaaagcaaccgtgggaggtctcagcccatctaaggggtacaccctgcaaatctttgagttaaccgggtccgggcgtttcctactggctcgacgcgaattcgtgattgaagatttgaagtcatcctccttggaccgctcaagtcaacggcctctcggatctggggcacctgagccaaccccgagccatacgggctcccctgatcctgaacaggccagtgagccccaggtggcttttaccccatcacaggatccacgcacccccggagggagtgagtggcgcgagaccgggccacagtttcgctgcctgccgcctgtgccagctgacatggtattcctggtggatgggtcatggagcattgggcattcacattttcagcaggttaaagattttctcgccagcgtgattgcaccttttgagattggcccagataaggttcaggttggactgactcaatatagcggcgacgcccaaactgaatgggacctgaacagcttgtccacaaaggaacaggttctcgctgcggtgagaaggctccgatataaaggaggaaacaccttcaccggactggccctaactcacgtgctgggccagaacctgcaaccagccgcaggcctccggcctgaagctgccaaggtggtgattttggttactgacggaaagagccaagatgatgtgcatactgcagctcgagtgctgaaagacttaggggtgaacgtgtttgcagttggcgttaagaatgccgacgaagccgaattacgactgctggcatccccccctcgggacattactgttcattccgtgctggatttcctccagctcggcgctctagcaggacttctctcaagattgatctgccagcgtttgcaagggggatctccccgacagggccctgccgctgcacccgcattggacaccttgcctgcacccactagcctcgttctgagccaggtgacatctagctctattaggctgtcatggacgcctgcccctcggcatccactgaaatacctcatcgtgtggagagcttcgcggggagggacgccaagggaagtggtagtggagggacctgccgctagcaccgagctgcacaacctcgctagtcgcacagaatatctggtgagcgtgttccctatctacgaaggaggagtgggggaaggcctacgtggcctagtcacgaccgcccctctgccacccccaagagccctgaccttggctgctgttacccccaggaccgtccacctgacatggcagccatctgcgggtgcaacccattacctggtgagatgctctcctgcatctcccaaaggggaagaagaggagagggaggtacaggtcgggagaccagaggtccttctcgacggattagagccaggtcgggattacgaggtctctgtgcagtctctcagaggtcctgagggatccgaggcgagaggaatccgagcacgaacccctacccttgctcctccaaggcacctggggtttagtgatgtctcccatgacgctgccagagtgttctgggagggtgctcctaggcccgtaaggctggtcagagtgacgtatgtatcctcagaaggcggacattcgggccagactgaggctccaggtaatgcaacatccgccactttgggccctctgtcatctagcaccacttacaccgtgcgagtgacatgcctctatcctggaggtggcagttctactctgactggaagggttactactaagaaggctccctccccatcccaactgagcatgacagagttaccaggtgacgcggttcagctggcctgggtcgctgcggctccctctggtgtgttggtatatcagattacatggacacctctcggcgagggcaaggctcacgagatctctgtcccagggaacctgggaaccgccgtgctgcctggactgggcagacatacagagtatgatgtcacaatcttagcttattatagggatggagcccgttcagatcctgtgtcactgcggtacactccgtcaactgtttcacgctcaccgcctagtaatctggctctggccagcgagacgcccgacagcctccaagtgagctggacacctccgttaggacgggtgttacactattggctgacctatgctccagccagtggactgggacccgagaagagtgtttcagtgcccggagcacgctcccacgtgacgctaccagatctgcaggctgccacaaaatatagagtattggtttcagccatatacgcagcaggccgatccgaggcagtgagtgccaccggtcagactgcttgtcctgccctccgaccagacggcagcctccccggttttgatctcatggtggcattcagtctggtagaaaaagcctatgcgtctatacggggagtggccatggaaccttctgcattcggcggtacccctacgttcactctgttcaaggatgcgcagctaacgcgcagggtcagcgacgtataccccgcacccctgccacctgagcacactatcgtgttcctcgtgaggctgctgcccgaaactcccagagaggcctttgccttgtggcagatgactgcagaggactttcagcctctgttaggtgttcttcttgatgctgggaaaaagagtttaacatactttcatcgggacccaagggctgctctccaggaggccaccttcgatccacaagaggtgcgcaagatcttcttcgggagttttcataaggtgcatgtggccgttggccgatcaaaggttcgcttatatgtggactgccggaaagttgctgaacgcccactcggagaaatgggatcccctccagcagccggattcgtgacactgggcagattagccaaagccaggggaccccgttcgagtagcgccgctttccagctccagatgctgcaaatcgtctgctctgatacatgggccgacgaagaccgctgctgtgaactccccgctagccgtgacggcgagacatgcccggcatttgtgtcagcttgttcttgtagctctgaaacaccagggccacctgggcctcaggggcctcccggactgcctggtcgcaatggcacacctggtgaacagggatttccaggcccacggggacctcccggagtcaagggcgaaaaaggagatcatggacttccaggtctgcagggccacccaggacaccagggaatcccagggcgtgtgggactgcagggcccaaagggtatgcgaggattggaggggaccgctgggttgcctggcccaccaggaccccgaggctttcagggcatggcgggtgcaagagggacctcaggagagagagggccacccggaacggtcggacccactgggctcccaggacctaagggcgaacggggagaaaagggagagccccagtctctggccactttgtaccaactggtgtctcaggcctgtgagagcgccattcagacgcatgtctcaaagtttgactccttccatgaaaacactcggccacctatgcctattcttgagcagaaactggaacccggaaccgaacccctggggtctccaggtactcgctccaaggccctcgtgcccggagaatggggacggggaggcagacatctggagggaagaggggaacctggagctgttggccaaatgggatcccctggacaacaaggtgctagtacacagggtctctgggagtag

SEQ ID NO: 321815 - DNA, 3894 bp, Artificial Sequence
  derived and/or modified sequence
atgtcgagcggggatccagcccacctgggcttgtgtctttggttgtggctcggagccacattggggcgggagcaagtgcaggcatccgggctgttgcggctggcggtgttacctgaggatagactgcaaatgaagtggcgcgaatcagagggaagtggacttggctatctagtgcaggtgaaacctatggccggcgatagcgagcaggaggttatccttaccacaaagacccccaaagctacagtgggcgggctgtctcccagtaaaggttatacgctacagatctttgagcttacaggctccggtaggttcctgcttgcacggcgcgaattcgtgattgaggacctgaaatcttcatccctggatcggtcaagtcagcgacctcttgggagtggggcacccgagcccacaccaagtcatactggcagccccgacccagagcaagcatccgaaccccaggtggcctttactccatcacaagaccccagaacccccggtgggtcagagtggcgcgagaccggaccacaatttcgctgccttcctcccgtgcccgcagacatggtgtttctcgtcgacggtagctggtcaatcggccatagccacttccagcaagtaaaggacttcctcgcgtcagtgattgcgcccttcgagattggcccggataaggtccaggtgggcctcacacaatacagcggggatgcacagactgaatgggatctgaatagcttatctacgaaagagcaggtcctcgctgcagtgcgcagactgcggtataaaggaggcaatacctttaccggattggcattaacccacgttcttggacaaaacttacagcccgctgccggactcaggccagaagccgcgaaagttgttatcctcgtaactgatggcaagagtcaggacgatgtccacactgccgccagggtgttgaaagatttgggcgttaatgtttttgcagtgggtgttaaaaacgctgacgaggctgaactgcggctgttagcttcgccgccccgggatatcacagttcactccgtgctggatttcctacagctgggggccctcgcaggcctgctgagccgcctgatctgccagcggctccagggtggaagcccacgtcagggcccggcagcagctcccgctctggataccttaccagcccctaccagccttgttctgtcgcaggtaacctcttcttcgatccggttgagctggacccccgccccaagacatccccttaagtatcttatcgtctggcgggcctccaggggtggaaccccaagagaggtcgttgtcgaaggtcccgcagcatccacagaactgcataaccttgcttccaggacagaatacctggtaagtgtgtttcccatctatgaaggcggagtgggggagggtctccgaggtttggtaaccacggccccgctccctcctccacgagcattgaccctcgccgccgtaacaccaaggaccgtacatttgacatggcagccttccgctggggctactcactatctcgtgcgatgtagcccggcaagtcccaaaggagaagaggaggagagggaggtgcaggttggtcgaccagaggtgctcctggatggacttgaaccgggccgcgattacgaggtgtcggtccagtctctaaggggaccggagggcagcgaggcgcggggcattcgagcccggaccccaacactcgctccgccacgccacctcgggttttctgatgttagccatgacgctgcgcgtgttttctgggaaggcgccccacgtcccgtgcgactagtcagagtgacctacgtgtcatccgagggaggacacagcggacagaccgaagctccaggaaacgccactagcgccacgttgggcccgctatcttccagtacgacttacacagttagggtgacatgtctttatccaggaggcggcagctcgactctgacaggaagagtcaccacaaagaaagccccttcccccagccaactgtctatgactgagctgcctggagacgcagtccagctcgcttgggtcgcagctgcaccctctggcgtattggtatatcagatcacttggacccctcttggagagggtaaggctcatgagatcagcgtccccggcaacctcggcacagcagtgctgccagggctgggcagacatacagaatatgacgtgacaatcctagcatactacagggacggggcccgaagcgatcctgtaagtctcagatatacccccagcactgtgtccaggagtccaccctctaaccttgctctggcatcagaaacgcctgactcactccaggtttcttggaccccacccctgggacgagttctccactactggctgacgtacgctcccgcatcagggttagggcccgagaagtctgtgtcagtcccgggagccaggtcccacgttacactacctgacctccaggctgcgaccaagtatcgcgtcctggtgtcggcaatttatgccgccggccgcagcgaggccgttagcgccacaggccagactgcctgtcctgccttaaggccagacgggtctttgcccggctttgatcttatggtggcattttccctggtggagaaagcatacgctagtattcgcggggttgctatggagccctctgccttcggtggaacacccacttttaccctgtttaaagatgcacaactgactcggcgcgtctctgatgtctacccggctcccttgcccccagagcatacaattgtgttcctggttaggctgctgcctgagacaccacgtgaagcatttgccctgtggcaaatgaccgccgaagacttccagccattactgggcgttctgctcgatgcaggcaaaaaaagcctcacctacttccatcgggacccgagggcagccctgcaagaggccacatttgacccacaggaggttagaaaaatcttcttcgggagcttccacaaggtgcatgtggctgtcggtagaagcaaggttcggctgtatgttgactgccggaaggtggccgaaagaccattgggcgaaatgggcagtccccccgccgcgggattcgtgaccctgggaagactcgccaaggctcgaggccctcgaagctcgagcgcagctttccagcttcagatgttacagatcgtatgcagtgacacatgggccgacgaggatagatgttgcgagctgcccgcatctagagatggggagacatgtcccgcattcgtgagcgcttgctcgtgtagttcagagacaccaggtccacccggccctcagggacctcctggcttgcctggacgtaacgggactcctggcgaacaagggttcccaggcccccgaggaccgcccggagttaaaggagaaaaaggggaccacggtctcccagggctccaggggcatcccgggcatcaaggtatccctggtcgggttgggcttcagggccctaagggaatgagaggcctggaagggaccgcaggcctgccgggaccgcccggtccgcggggttttcagggtatggccggagctcgcggcacatcgggagagcgcggtccacctggtactgttggacccacggggctgccagggcccaaaggagagcggggggagaagggagaacctcagtcactcgcaactttgtaccagctcgttagccaggcttgcgagtcggcgattcaaacgcacgtgtcaaaattcgatagcttccacgagaacacgaggccaccgatgccaatactcgaacagaagttggaaccaggcaccgaaccactaggatcaccaggaacacgcagcaaagcactcgtgcctggtgaatgggggcgcgggggtcgccatctggagggccggggagaaccaggggccgttgggcagatgggcagcccaggccagcagggtgcctctacacaaggattgtgggagtag

SEQ ID NO: 321816 - DNA, 3894 bp, Artificial Sequence
  derived and/or modified sequence
atgtcttctggcgacccagctcatcttggcctgtgcttatggctgtggctcggagccaccttggggcgcgagcaagttcaagcctccggccttttacgcttggccgtcctccccgaagacagactgcagatgaagtggcgcgaatccgaagggagtggcttgggctacctggtgcaagtgaaacctatggccggcgatagcgagcaggaagtaattctgactactaagacaccgaaagcaacagttggtggactctctcctagtaaaggatatactcttcagatatttgagttgaccggatcaggaaggtttttgctcgctagaagagagtttgtgatcgaggaccttaaatcttccagtttggataggagcagccagcgtcctctgggcagtggtgctcccgagccaacaccctcacatacaggctctcccgaccctgaacaggcctccgaaccgcaggttgccttcactccatcccaggacccacggaccccaggcggcagcgagtggcgggagacaggcccacagttcaggtgtttacccccagtgcctgccgatatggtcttcctggtggatggctcatggtcaattggtcattcccatttccaacaggtaaaggacttcctggccagcgtcatagcaccgtttgagattggacccgacaaagtccaggtcggactcacccagtattcaggcgatgcacagaccgaatgggacttaaattcactgagcactaaagaacaggtcctcgcagcagtgaggaggcttcgctataagggtggcaatactttcacagggctcgccttaactcatgtgctcggacagaacctgcagcctgccgctgggctgaggccggaagctgccaaagttgtgatactcgtcacagacgggaagtctcaagacgatgtgcacactgcagccagagtactgaaagatctcggagtgaatgtcttcgctgtcggcgtcaaaaacgctgacgaggcggaactgaggttgttagccagtccacctagagacatcaccgtgcactctgtacttgattttcttcagcttggcgctcttgccggcctgttgagccgtctaatttgccagcggttacaggggggatcccctcgacagggacccgctgctgcaccggccttagatacccttcccgccccgacgagtttggtcctctcacaagttacgtcaagctctatacgcctaagttggactcctgctcctcgacaccctcttaagtacctcattgtgtggcgtgcctctcgcggtgggacacccagggaagtcgttgtggagggacctgcagcatcgactgagctgcacaatctggccagcagaactgaatatttggtttccgtgttcccaatctacgagggcggcgttggagagggcttgagaggacttgtcactaccgcccccctgccccccccccgcgcccttactctggctgctgtgactccaaggactgtgcacttaacgtggcagccctctgcaggtgccacacactatctcgttcgttgctcaccggccagcccgaagggtgaggaggaggagagggaagtccaggtggggcgaccggaggtgttgctcgatggcctcgagccagggagagactatgaggtgtcagtacaatccttgagaggacccgaaggctccgaagcccgcgggattagggcacgcactccgacacttgccccacccagacatctaggcttctcagatgtgagtcacgacgccgcacgcgtgttttgggaaggtgctcctagacctgtgcggctggtaagggtcacatatgtctcttctgaaggcggacatagcgggcaaaccgaggcacccggcaatgctaccagcgccacactgggccctttgagctcctccacaacatatactgtacgcgttacatgtctctatcccgggggaggtagttccacgctgacggggcgcgtcactactaaaaaggctccttccccctctcagctctcaatgacagagctaccaggggatgccgtccaattggcttgggtcgccgcagccccctctggtgtgcttgtctaccagattacatggacaccactgggagaggggaaagctcacgagatcagcgtgccagggaatttgggaacggccgttctacctgggctggggcgccacaccgaatatgatgtaacaatcttggcctactatcgggacggagctcgttcagatcctgtaagtttacgctacacaccctccaccgttagccggagtccaccgagcaatttggcactggcatcagagaccccagattccctgcaggtcagttggactccccctctcggccgcgtgctccactactggttgacttacgctcctgcctcagggctgggacccgaaaaaagcgtctcagtgccaggagcacgatctcacgtgactttaccggacctccaagccgctacgaaatatcgcgtcctcgtgtctgctatctatgctgccggaaggtccgaggccgtgtccgccaccggccagaccgcctgccctgctttgcgccccgacgggagcctgcctgggtttgacctgatggtcgctttctccctggtggagaaggcgtacgcttcgatcagaggagttgcaatggagccgtccgcatttggtggcacaccgactttcaccctttttaaggacgcccagctcactaggcgggtctctgacgtctacccagctccactgcctccggagcataccattgttttcctggtccggcttctacccgagacccctcgcgaagctttcgccctgtggcagatgaccgctgaggactttcaaccactgttgggagtgcttctcgatgcaggaaagaagagcctgacatatttccatagagacccacgggctgctctgcaggaagccacctttgaccctcaggaagtccgtaaaatatttttcggttctttccataaggtgcacgttgccgtgggccggagcaaggtccgcctatacgtggactgtagaaaagtggcagagagaccgcttggagagatgggcagtccgcctgccgctggctttgttacacttggacgcttagcaaaggctcggggcccccgttcaagttcagccgcgttccagttacagatgctccaaattgtgtgcagtgatacctgggctgatgaagatcggtgctgcgagctccccgcgtctcgggatggcgaaacctgtcctgcctttgttagcgcttgtagttgcagtagcgagacgcccggaccccccgggccgcagggtcctccaggcctgcccggaaggaacggcacgccaggagagcagggttttcccggacctcgcggccctcccggagtcaaaggcgaaaaaggagaccacggactccccgggctgcagggccaccctggccaccagggaattcctggcagagttggcttgcagggaccaaaaggcatgaggggtttggaggggaccgccggcttgcccggacctccgggtccacgcggatttcaaggtatggctggagctcgcggaaccagcggcgagcggggaccgcctggcacagtgggccctacaggtttacccggtcccaagggggagcgaggcgaaaagggcgaacctcagtcactggcgacactttaccaattagtctctcaggcgtgcgaaagcgcgatccaaacccatgtgtctaaattcgatagttttcacgagaatactaggccaccaatgccaattcttgagcagaaactggagccagggactgagccgctcggcagccctggcaccaggagcaaagcactcgtgccgggagaatggggacgcggcggccgccacctcgagggtagaggggaaccaggtgccgtcggccaaatggggtcgccaggtcagcagggcgccagtactcaaggcttgtgggagtag

SEQ ID NO: 321817 - DNA, 3894 bp, Artificial Sequence
  derived and/or modified sequence
atgtcctccggcgaccccgcgcacctgggtctctgcctgtggctttggctgggcgccactcttggcagggaacaggtccaagcatccggcctgctccgactggctgtcctgcccgaagatcgcttacagatgaagtggagagaatcagagggatccggactggggtacctggtacaagtgaaacccatggccggagatagtgagcaagaggtgatcctgacaaccaaaactcctaaagccacagtcggcggtttaagtccatcaaaaggttatactctacaaatctttgaactgaccggctcgggcaggtttttgctggctagacgggagttcgtgatcgaggaccttaagagctcaagcctggatagaagttcacagaggcccctcggctctggcgctcctgagcctacaccatcgcacacaggttcccctgatccggaacaagctagcgaaccacaggttgcctttacaccctcgcaagacccacgcacccctggtggctccgaatggcgagagaccggcccccagttcaggtgcctccctcctgttcctgcggacatggtgttcctggtcgacggttcttggtctattggtcattctcacttccaacaagtcaaggactttttggcgtctgttatagcgccttttgaaattggaccagataaggtacaggttggccttactcaatattccggtgacgctcagaccgaatgggaccttaatagcctatcaaccaaagaacaggttttggctgctgtcaggcgacttcgctataagggcggaaataccttcactggcctcgccctcacgcatgtgctcggccaaaatctgcaacctgcagcaggactcagaccagaggctgccaaggtggtaatactggtgactgacggaaagagccaggatgatgttcatactgctgccagagttctgaaagatctcggagtcaacgtgtttgctgtcggcgtgaagaacgcagacgaagctgaactgcgactccttgccagccctccccgtgatatcaccgtccattccgtcctcgattttctccagctgggcgcccttgcaggattgttgtcacgattgatttgccagagactgcagggaggaagccccaggcaaggaccagccgccgctcccgctttggatacactgcccgcacctaccagcctggtgctaagccaggtgactagctcctcgattcgcttgtcatggacgcctgcaccccgccatcctttgaaatacctgatcgtctggagagctagcaggggaggcacccctagagaagttgtcgtggagggtccagctgcatctaccgagctgcacaatctagcctcaagaactgaatacctcgtgtccgtgttccctatttacgaaggcggcgtgggagaaggactgcgcggcctggtgacaaccgcaccattacccccaccccgtgctttgacactcgcggctgtgacgcctcgtaccgtgcaccttacttggcaacctagcgctggcgccacacattacctcgtgcgatgttctcctgcatcacccaaaggggaggaggaagaacgggaggtgcaggttggccggcccgaagtgttactggacggacttgaacccggccgcgactacgaagtaagcgtacagtcactgaggggacccgagggtagtgaggcgcgggggattagggcaaggacacctacacttgcgccccctaggcatctgggcttttccgacgttagtcacgatgcagccagagtgttctgggagggtgcccctaggcccgtcagactagtcagagttacttatgtctcctccgagggaggacacagcggacagaccgaagctccaggaaacgccactagcgccacgttgggcccgctatcttccagtacgacttacacagttagggtgacatgtctttatccaggaggcggcagctcgactctgacaggaagagtcaccacaaagaaagccccttcccccagccaactgtctatgactgagctgcctggagacgcagtccagctcgcttgggtcgcagctgcaccctctggcgtattggtatatcagatcacttggacccctcttggagagggtaaggctcatgagatctccgtccccggtaatctagggactgcagtgttaccgggtctgggacgacataccgagtacgatgtaactatcttggcatactaccgggatggagcccgatctgacccagtttccctcaggtatacaccctcaactgtctctcgcagccccccttccaacctggccctagcctccgaaacccctgactctctgcaggtgtcgtggacacctcctctcgggcgagtcttgcactactggttaacatacgcacccgccagcggtctgggaccagaaaaatctgtcagcgtcccgggtgccaggtcccacgtgaccctgcccgacctgcaagctgctactaaataccgcgtgttggtgtctgcgatttacgccgcgggacgcagcgaggctgtgagtgctaccggccagacagcatgccctgctttaagacctgatggcagcctgcctggatttgacttaatggtcgcattctccctagtcgaaaaagcctatgccagtattcggggtgtggccatggaacccagcgcatttggtgggaccccgacatttactctgtttaaagatgctcaattgacacggcgtgtctccgacgtgtatcccgccccccttcccccagaacatacaatcgtctttcttgtccgcctcttgcccgagacacctagagaagcctttgcactttggcaaatgaccgcagaagattttcagcctctgttgggggtcctccttgatgccggcaaaaagtccctcacgtattttcacagagatcctcgagccgcgctccaggaagcaacatttgatccgcaagaggtgagaaagatattttttgggtctttccacaaggtgcacgttgccgttggacgctcaaaggtgcggctatatgtggattgccgaaaagtcgccgagaggccactgggggagatgggtagtccccccgccgccgggttcgtgactctaggtcgcctggctaaagcaagaggaccaagaagttcaagcgccgccttccaactgcagatgctacagattgtgtgcagcgacacctgggctgacgaggaccgttgttgtgaactccccgcttcccgggatggagagacctgcccggcgtttgtgtcagcatgttcatgctcatctgagactccaggaccccctggcccacagggtccaccaggcctgccaggaagaaatggcactccaggagaacaaggattccctggaccccgcggccccccgggcgtgaaaggcgagaagggtgatcacgggctgcccggtctccagggccatcccggccaccagggaatcccaggaagggtgggactgcaaggacctaagggcatgaggggactggaagggactgcgggcttgccagggccgccagggccaagaggatttcaaggaatggcaggagcaagaggaacttctggcgagcgagggcctcccggaactgtagggcctacgggattgccgggccctaaaggagagcgaggcgagaaaggagaaccacagagcttggcgactttataccagctcgtatctcaggcgtgcgaatcagccattcagactcatgtcagtaagttcgattcctttcatgaaaacacgaggccaccaatgccaattttggaacagaagcttgagcccgggaccgagcctcttgggagccccggcacacggtcaaaggctctggtccctggggaatggggacggggcgggaggcacttggaggggcgaggagaaccaggtgcagtcggtcagatgggctcacccggacaacaaggagcatctacgcaaggcttatgggagtag

SEQ ID NO: 321818 - DNA, 3894 bp, Artificial Sequence
  derived and/or modified sequence
atgtcttctggcgacccagctcatcttggcctgtgcttatggctgtggctcggagccaccttggggcgcgagcaagttcaagcctccggccttttacgcttggccgtcctccccgaagacagactgcagatgaagtggcgcgaatccgaagggagtggcttgggctacctggtgcaagtgaaacctatggccggcgatagcgagcaggaagtaattctgactactaagacaccgaaagcaacagttggtggactctctcctagtaaaggatatactcttcagatatttgagttgaccggatccgggcgattcctactagcacgtcgagagtttgttatcgaagacctcaaatcgtcctccttagacagatccagccaacggcccctcggatccggagcacctgaaccaacgccaagtcacaccggctcgcctgaccccgagcaagcatccgagcctcaagttgccttcactccaagccaggacccccggacaccaggcggctccgagtggcgagagactggccctcagttcagatgtctcccccccgtccccgcagacatggttttccttgtggacggctcatggagtattggacattcccactttcagcaggtgaaggattttctggcctcagttatagcaccattcgagataggtccggataaagtccaggtcgggcttacacagtactcgggtgatgcacagacagagtgggacttgaacagtttgagtacgaaggaacaagtgctggctgcggtgaggcgactgagatacaagggcgggaatacattcacgggactggctctgacacacgtgttaggacaaaatttgcagccagcagccggcctgaggcctgaggctgccaaagtagtcatattagtgacagacggaaagtcgcaggacgacgtgcacaccgccgccagagttctaaaggacctcggggtcaacgtctttgccgttggagtgaagaacgcagacgaagctgagctaagactcctggcctctcctcctcgcgacataaccgttcacagtgtgttggactttcttcagttaggagccctcgcaggcttgttaagccgcttgatttgtcagcgtcttcagggcggatctccacgacagggacctgctgccgccccagcccttgataccttaccggccccaacatccctggtcctgtcccaggtgaccagctcttctatcaggctgtcgtggaccccagcgccccgccacccactgaaatatctgatagtgtggcgggcttcgagaggcggaacccctagggaagttgtggtggaaggacctgcagctagtacagaactgcataacctagctagtagaaccgagtacctggtatctgtatttcctatttacgagggaggagttggcgagggtctcagggggctcgtcacaactgcacctttgcctcccccaagagccctgacactcgcggctgtcactccccgcaccgtgcatctgacgtggcaaccatctgcaggcgccacccattaccttgtgagatgtagcccagcatccccaaagggcgaggaagaggagagagaagtgcaagtgggaagacccgaagttctgctggacggactggagcctggtcgggactatgaagtgagcgtacaatctttacgtggcccagaaggtagtgaggcccgtgggattcgagcccgcacaccaactctcgccccaccacgacacctgggcttctctgacgtctctcacgacgccgcgcgcgtgttctgggaaggtgcccctcggcccgtcaggctcgtccgcgttacctacgtttcgtctgaagggggccatagcgggcaaacagaagcgcctggtaacgcaacatctgcaacactgggccccctgtcatcttccactacctacaccgtacgtgtgacatgtctctatccgggaggtggctcaagtacccttacaggccgtgtaacaacaaaaaaggcaccatcccctagtcagctgagtatgaccgaactgccaggagacgcagtgcaactggcttgggttgcagccgctccttctggtgtcttggtttaccaaattacgtggactcctttaggcgagggcaaggcacacgaaatcagcgtgccaggcaaccttggcactgccgtgctgcccggactgggccgacatacagagtacgacgttacaattctagcatattacagagatggagccagaagcgaccccgtttccctcagatatacaccctcaaccgtgagtcgcagcccaccttcgaatctcgcattagcctctgaaacgcccgacagtttgcaggtctcctggaccccacccctggggcgagtattgcattattggcttacgtatgccccagccagtggcctgggccccgagaaatcagtctccgtgccaggggctcgttcacatgttaccctgccagacctgcaggcagcgaccaagtaccgtgttctggtgagcgcgatttatgcagcaggaaggagcgaagcggtcagtgcaacaggacagactgcatgccctgcgttacgtccagatggaagcctcccggggttcgaccttatggtcgctttcagcctggtagaaaaagcctacgcaagcattaggggcgttgccatggagccaagcgcatttggagggacgccaacctttaccctatttaaggatgcccagttgaccagaagagtgtccgacgtttaccccgccccgcttccgcctgaacatactatcgtgttcctggtaaggctccttcccgaaaccccccgagaggccttcgccctctggcagatgaccgcagaagatttccaacctttacttggggttttacttgatgccggcaagaaatctttaacttacttccacagagacccacgcgccgccctgcaggaagccaccttcgatcctcaggaagtgaggaaaattttcttcggctcattccacaaagttcatgtcgcagttggacgcagtaaagtccgcctctacgtcgactgccgcaaggtcgccgagcgccctctcggcgagatgggatctcctccagccgccggctttgtgacactgggtagacttgcaaaagccagaggcccccggagctcaagcgcagcctttcagctccaaatgctccaaattgtgtgtagcgatacttgggctgatgaagaccgatgctgtgaacttcccgcgagtcgagacggagaaacctgtccggcctttgtgagcgcatgctcctgctcatccgagacacccggcccacccggaccacagggcccccctggattgcctggcaggaacgggacccctggtgaacagggattccccggaccacggggtccaccaggagtaaagggggaaaagggcgatcatggactgccaggactacaaggccatccaggacatcaaggcataccaggcagagtcggcttacagggacctaagggcatgagagggctcgaagggacggcaggcctacccggccctccgggaccccgcgggtttcaaggtatggccggggcacgcggaacaagcggcgaacgtggcccacccggaacagtgggccctactggcctcccaggccctaagggcgagcgcggcgagaaaggcgaaccgcagagcttggctacactctatcagttggtatctcaggcctgcgagagcgcaatccaaacacatgtttcaaaatttgatagctttcacgaaaatacccgaccacccatgccaatcctggaacaaaaacttgagcccggcaccgagcccctaggaagccccgggacacgatccaaggctttagtgccaggagaatgggggagggggggtagacacctcgaagggaggggcgagcccggcgcagtggggcaaatgggttcacctgggcagcaaggagccagtacacagggattgtgggagtag

SEQ ID NO: 321819 - RNA, 3894 nt, Artificial Sequence
  derived and/or modified sequence
augucgagcggggauccagcccaccugggcuugugucuuugguuguggcucggagccacauuggggcgggagcaagugcaggcauccgggcuguugcggcuggcgguguuaccugaggauagacugcaaaugaaguggcgcgaaucagagggaaguggacuuggcuaucuagugcaggugaaaccuauggccggcgauagcgagcaggagguuauccuuaccacaaagacccccaaagcuacagugggcgggcugucucccaguaaagguuauacgcuacagaucuuugagcuuacaggcuccgguagguuccugcuugcacggcgcgaauucgugauugaggaccugaaaucuucaucccuggaucggucaagucagcgaccucuugggaguggggcacccgagcccacaccaagucauacuggcagccccgacccagagcaagcauccgaaccccagguggccuuuacuccaucacaagaccccagaacccccggugggucagaguggcgcgagaccggaccacaauuucgcugccuuccucccgugcccgcagacaugguguuucucgucgacgguagcuggucaaucggccauagccacuuccagcaaguaaaggacuuccucgcgucagugauugcgcccuucgagauuggcccggauaagguccaggugggccucacacaauacagcggggaugcacagacugaaugggaucugaauagcuuaucuacgaaagagcagguccucgcugcagugcgcagacugcgguauaaaggaggcaauaccuuuaccggauuggcauuaacccacguucuuggacaaaacuuacagcccgcugccggacucaggccagaagccgcgaaaguuguuauccucguaacugauggcaagagucaggacgauguccacacugccgccaggguguugaaagauuugggcguuaauguuuuugcaguggguguuaaaaacgcugacgaggcugaacugcggcuguuagcuucgccgccccgggauaucacaguucacuccgugcuggauuuccuacagcugggggcccucgcaggccugcugagccgccugaucugccagcggcuccaggguggaagcccacgucagggcccggcagcagcucccgcucuggauaccuuaccagccccuaccagccuuguucugucgcagguaaccucuucuucgauccgguugagcuggacccccgccccaagacauccccuuaaguaucuuaucgucuggcgggccuccagggguggaaccccaagagaggucguugucgaaggucccgcagcauccacagaacugcauaaccuugcuuccaggacagaauaccugguaaguguguuucccaucuaugaaggcggagugggggagggucuccgagguuugguaaccacggccccgcucccuccuccacgagcauugacccucgccgccguaacaccaaggaccguacauuugacauggcagccuuccgcuggggcuacucacuaucucgugcgauguagcccggcaagucccaaaggagaagaggaggagagggaggugcagguuggucgaccagaggugcuccuggauggacuugaaccgggccgcgauuacgaggugucgguccagucucuaaggggaccggagggcagcgaggcgcggggcauucgagcccggaccccaacacucgcuccgccacgccaccucggguuuucugauguuagccaugacgcugcgcguguuuucugggaaggcgccccacgucccgugcgacuagucagagugaccuacgugucauccgagggaggacacagcggacagaccgaagcuccaggaaacgccacuagcgccacguugggcccgcuaucuuccaguacgacuuacacaguuagggugacaugucuuuauccaggaggcggcagcucgacucugacaggaagagucaccacaaagaaagccccuucccccagccaacugucuaugacugagcugccuggagacgcaguccagcucgcuugggucgcagcugcacccucuggcguauugguauaucagaucacuuggaccccucuuggagaggguaaggcucaugagaucagcguccccggcaaccucggcacagcagugcugccagggcugggcagacauacagaauaugacgugacaauccuagcauacuacagggacggggcccgaagcgauccuguaagucucagauauacccccagcacuguguccaggaguccacccucuaaccuugcucuggcaucagaaacgccugacucacuccagguuucuuggaccccaccccugggacgaguucuccacuacuggcugacguacgcucccgcaucaggguuagggcccgagaagucugugucagucccgggagccaggucccacguuacacuaccugaccuccaggcugcgaccaaguaucgcguccuggugucggcaauuuaugccgccggccgcagcgaggccguuagcgccacaggccagacugccuguccugccuuaaggccagacgggucuuugcccggcuuugaucuuaugguggcauuuucccugguggagaaagcauacgcuaguauucgcgggguugcuauggagcccucugccuucgguggaacacccacuuuuacccuguuuaaagaugcacaacugacucggcgcgucucugaugucuacccggcucccuugcccccagagcauacaauuguguuccugguuaggcugcugccugagacaccacgugaagcauuugcccuguggcaaaugaccgccgaagacuuccagccauuacugggcguucugcucgaugcaggcaaaaaaagccucaccuacuuccaucgggacccgagggcagcccugcaagaggccacauuugacccacaggagguuagaaaaaucuucuucgggagcuuccacaaggugcauguggcugucgguagaagcaagguucggcuguauguugacugccggaagguggccgaaagaccauugggcgaaaugggcaguccccccgccgcgggauucgugacccugggaagacucgccaaggcucgaggcccucgaagcucgagcgcagcuuuccagcuucagauguuacagaucguaugcagugacacaugggccgacgaggauagauguugcgagcugcccgcaucuagagauggggagacaugucccgcauucgugagcgcuugcucguguaguucagagacaccagguccacccggcccucagggaccuccuggcuugccuggacguaacgggacuccuggcgaacaaggguucccaggcccccgaggaccgcccggaguuaaaggagaaaaaggggaccacggucucccagggcuccaggggcaucccgggcaucaagguaucccuggucggguugggcuucagggcccuaagggaaugagaggccuggaagggaccgcaggccugccgggaccgcccgguccgcgggguuuucaggguauggccggagcucgcggcacaucgggagagcgcgguccaccugguacuguuggacccacggggcugccagggcccaaaggagagcggggggagaagggagaaccucagucacucgcaacuuuguaccagcucguuagccaggcuugcgagucggcgauucaaacgcacgugucaaaauucgauagcuuccacgagaacacgaggccaccgaugccaauacucgaacagaaguuggaaccaggcaccgaaccacuaggaucaccaggaacacgcagcaaagcacucgugccuggugaaugggggcgcgggggucgccaucuggagggccggggagaaccaggggccguugggcagaugggcagcccaggccagcagggugccucuacacaaggauugugggaguag

SEQ ID NO: 321820 - RNA, 3894 nt, Artificial Sequence
  derived and/or modified sequence
augucuucuggcgacccagcucaucuuggccugugcuuauggcuguggcucggagccaccuuggggcgcgagcaaguucaagccuccggccuuuuacgcuuggccguccuccccgaagacagacugcagaugaaguggcgcgaauccgaagggaguggcuugggcuaccuggugcaagugaaaccuauggccggcgauagcgagcaggaaguaauucugacuacuaagacaccgaaagcaacaguugguggacucucuccuaguaaaggauauacucuucagauauuugaguugaccggaucaggaagguuuuugcucgcuagaagagaguuugugaucgaggaccuuaaaucuuccaguuuggauaggagcagccagcguccucugggcaguggugcucccgagccaacacccucacauacaggcucucccgacccugaacaggccuccgaaccgcagguugccuucacuccaucccaggacccacggaccccaggcggcagcgaguggcgggagacaggcccacaguucagguguuuacccccagugccugccgauauggucuuccugguggauggcucauggucaauuggucauucccauuuccaacagguaaaggacuuccuggccagcgucauagcaccguuugagauuggacccgacaaaguccaggucggacucacccaguauucaggcgaugcacagaccgaaugggacuuaaauucacugagcacuaaagaacagguccucgcagcagugaggaggcuucgcuauaaggguggcaauacuuucacagggcucgccuuaacucaugugcucggacagaaccugcagccugccgcugggcugaggccggaagcugccaaaguugugauacucgucacagacgggaagucucaagacgaugugcacacugcagccagaguacugaaagaucucggagugaaugucuucgcugucggcgucaaaaacgcugacgaggcggaacugagguuguuagccaguccaccuagagacaucaccgugcacucuguacuugauuuucuucagcuuggcgcucuugccggccuguugagccgucuaauuugccagcgguuacaggggggauccccucgacagggacccgcugcugcaccggccuuagauacccuucccgccccgacgaguuugguccucucacaaguuacgucaagcucuauacgccuaaguuggacuccugcuccucgacacccucuuaaguaccucauuguguggcgugccucucgcggugggacacccagggaagucguuguggagggaccugcagcaucgacugagcugcacaaucuggccagcagaacugaauauuugguuuccguguucccaaucuacgagggcggcguuggagagggcuugagaggacuugucacuaccgccccccugccccccccccgcgcccuuacucuggcugcugugacuccaaggacugugcacuuaacguggcagcccucugcaggugccacacacuaucucguucguugcucaccggccagcccgaagggugaggaggaggagagggaaguccagguggggcgaccggagguguugcucgauggccucgagccagggagagacuaugaggugucaguacaauccuugagaggacccgaaggcuccgaagcccgcgggauuagggcacgcacuccgacacuugccccacccagacaucuaggcuucucagaugugagucacgacgccgcacgcguguuuugggaaggugcuccuagaccugugcggcugguaagggucacauaugucucuucugaaggcggacauagcgggcaaaccgaggcacccggcaaugcuaccagcgccacacugggcccuuugagcuccuccacaacauauacuguacgcguuacaugucucuaucccgggggagguaguuccacgcugacggggcgcgucacuacuaaaaaggcuccuucccccucucagcucucaaugacagagcuaccaggggaugccguccaauuggcuugggucgccgcagcccccucuggugugcuugucuaccagauuacauggacaccacugggagaggggaaagcucacgagaucagcgugccagggaauuugggaacggccguucuaccugggcuggggcgccacaccgaauaugauguaacaaucuuggccuacuaucgggacggagcucguucagauccuguaaguuuacgcuacacacccuccaccguuagccggaguccaccgagcaauuuggcacuggcaucagagaccccagauucccugcaggucaguuggacucccccucucggccgcgugcuccacuacugguugacuuacgcuccugccucagggcugggacccgaaaaaagcgucucagugccaggagcacgaucucacgugacuuuaccggaccuccaagccgcuacgaaauaucgcguccucgugucugcuaucuaugcugccggaagguccgaggccguguccgccaccggccagaccgccugcccugcuuugcgccccgacgggagccugccuggguuugaccugauggucgcuuucucccugguggagaaggcguacgcuucgaucagaggaguugcaauggagccguccgcauuugguggcacaccgacuuucacccuuuuuaaggacgcccagcucacuaggcgggucucugacgucuacccagcuccacugccuccggagcauaccauuguuuuccugguccggcuucuacccgagaccccucgcgaagcuuucgcccuguggcagaugaccgcugaggacuuucaaccacuguugggagugcuucucgaugcaggaaagaagagccugacauauuuccauagagacccacgggcugcucugcaggaagccaccuuugacccucaggaaguccguaaaauauuuuucgguucuuuccauaaggugcacguugccgugggccggagcaagguccgccuauacguggacuguagaaaaguggcagagagaccgcuuggagagaugggcaguccgccugccgcuggcuuuguuacacuuggacgcuuagcaaaggcucggggcccccguucaaguucagccgcguuccaguuacagaugcuccaaauugugugcagugauaccugggcugaugaagaucggugcugcgagcuccccgcgucucgggauggcgaaaccuguccugccuuuguuagcgcuuguaguugcaguagcgagacgcccggaccccccgggccgcaggguccuccaggccugcccggaaggaacggcacgccaggagagcaggguuuucccggaccucgcggcccucccggagucaaaggcgaaaaaggagaccacggacuccccgggcugcagggccacccuggccaccagggaauuccuggcagaguuggcuugcagggaccaaaaggcaugagggguuuggaggggaccgccggcuugcccggaccuccggguccacgcggauuucaagguauggcuggagcucgcggaaccagcggcgagcggggaccgccuggcacagugggcccuacagguuuacccggucccaagggggagcgaggcgaaaagggcgaaccucagucacuggcgacacuuuaccaauuagucucucaggcgugcgaaagcgcgauccaaacccaugugucuaaauucgauaguuuucacgagaauacuaggccaccaaugccaauucuugagcagaaacuggagccagggacugagccgcucggcagcccuggcaccaggagcaaagcacucgugccgggagaauggggacgcggcggccgccaccucgaggguagaggggaaccaggugccgucggccaaauggggucgccaggucagcagggcgccaguacucaaggcuugugggaguag

SEQ ID NO: 321821 - RNA, 3894 nt, Artificial Sequence
  derived and/or modified sequence
auguccuccggcgaccccgcgcaccugggucucugccuguggcuuuggcugggcgccacucuuggcagggaacagguccaagcauccggccugcuccgacuggcuguccugcccgaagaucgcuuacagaugaaguggagagaaucagagggauccggacugggguaccugguacaagugaaacccauggccggagauagugagcaagaggugauccugacaaccaaaacuccuaaagccacagucggcgguuuaaguccaucaaaagguuauacucuacaaaucuuugaacugaccggcucgggcagguuuuugcuggcuagacgggaguucgugaucgaggaccuuaagagcucaagccuggauagaaguucacagaggccccucggcucuggcgcuccugagccuacaccaucgcacacagguuccccugauccggaacaagcuagcgaaccacagguugccuuuacacccucgcaagacccacgcaccccugguggcuccgaauggcgagagaccggcccccaguucaggugccucccuccuguuccugcggacaugguguuccuggucgacgguucuuggucuauuggucauucucacuuccaacaagucaaggacuuuuuggcgucuguuauagcgccuuuugaaauuggaccagauaagguacagguuggccuuacucaauauuccggugacgcucagaccgaaugggaccuuaauagccuaucaaccaaagaacagguuuuggcugcugucaggcgacuucgcuauaagggcggaaauaccuucacuggccucgcccucacgcaugugcucggccaaaaucugcaaccugcagcaggacucagaccagaggcugccaaggugguaauacuggugacugacggaaagagccaggaugauguucauacugcugccagaguucugaaagaucucggagucaacguguuugcugucggcgugaagaacgcagacgaagcugaacugcgacuccuugccagcccuccccgugauaucaccguccauuccguccucgauuuucuccagcugggcgcccuugcaggauuguugucacgauugauuugccagagacugcagggaggaagccccaggcaaggaccagccgccgcucccgcuuuggauacacugcccgcaccuaccagccuggugcuaagccaggugacuagcuccucgauucgcuugucauggacgccugcaccccgccauccuuugaaauaccugaucgucuggagagcuagcaggggaggcaccccuagagaaguugucguggaggguccagcugcaucuaccgagcugcacaaucuagccucaagaacugaauaccucguguccguguucccuauuuacgaaggcggcgugggagaaggacugcgcggccuggugacaaccgcaccauuacccccaccccgugcuuugacacucgcggcugugacgccucguaccgugcaccuuacuuggcaaccuagcgcuggcgccacacauuaccucgugcgauguucuccugcaucacccaaaggggaggaggaagaacgggaggugcagguuggccggcccgaaguguuacuggacggacuugaacccggccgcgacuacgaaguaagcguacagucacugaggggacccgaggguagugaggcgcgggggauuagggcaaggacaccuacacuugcgcccccuaggcaucugggcuuuuccgacguuagucacgaugcagccagaguguucugggagggugccccuaggcccgucagacuagucagaguuacuuaugucuccuccgagggaggacacagcggacagaccgaagcuccaggaaacgccacuagcgccacguugggcccgcuaucuuccaguacgacuuacacaguuagggugacaugucuuuauccaggaggcggcagcucgacucugacaggaagagucaccacaaagaaagccccuucccccagccaacugucuaugacugagcugccuggagacgcaguccagcucgcuugggucgcagcugcacccucuggcguauugguauaucagaucacuuggaccccucuuggagaggguaaggcucaugagaucuccguccccgguaaucuagggacugcaguguuaccgggucugggacgacauaccgaguacgauguaacuaucuuggcauacuaccgggauggagcccgaucugacccaguuucccucagguauacacccucaacugucucucgcagccccccuuccaaccuggcccuagccuccgaaaccccugacucucugcaggugucguggacaccuccucucgggcgagucuugcacuacugguuaacauacgcacccgccagcggucugggaccagaaaaaucugucagcgucccgggugccaggucccacgugacccugcccgaccugcaagcugcuacuaaauaccgcguguuggugucugcgauuuacgccgcgggacgcagcgaggcugugagugcuaccggccagacagcaugcccugcuuuaagaccugauggcagccugccuggauuugacuuaauggucgcauucucccuagucgaaaaagccuaugccaguauucgggguguggccauggaacccagcgcauuuggugggaccccgacauuuacucuguuuaaagaugcucaauugacacggcgugucuccgacguguaucccgccccccuucccccagaacauacaaucgucuuucuuguccgccucuugcccgagacaccuagagaagccuuugcacuuuggcaaaugaccgcagaagauuuucagccucuguuggggguccuccuugaugccggcaaaaagucccucacguauuuucacagagauccucgagccgcgcuccaggaagcaacauuugauccgcaagaggugagaaagauauuuuuugggucuuuccacaaggugcacguugccguuggacgcucaaaggugcggcuauauguggauugccgaaaagucgccgagaggccacugggggagauggguaguccccccgccgccggguucgugacucuaggucgccuggcuaaagcaagaggaccaagaaguucaagcgccgccuuccaacugcagaugcuacagauugugugcagcgacaccugggcugacgaggaccguuguugugaacuccccgcuucccgggauggagagaccugcccggcguuugugucagcauguucaugcucaucugagacuccaggacccccuggcccacaggguccaccaggccugccaggaagaaauggcacuccaggagaacaaggauucccuggaccccgcggccccccgggcgugaaaggcgagaagggugaucacgggcugcccggucuccagggccaucccggccaccagggaaucccaggaagggugggacugcaaggaccuaagggcaugaggggacuggaagggacugcgggcuugccagggccgccagggccaagaggauuucaaggaauggcaggagcaagaggaacuucuggcgagcgagggccucccggaacuguagggccuacgggauugccgggcccuaaaggagagcgaggcgagaaaggagaaccacagagcuuggcgacuuuauaccagcucguaucucaggcgugcgaaucagccauucagacucaugucaguaaguucgauuccuuucaugaaaacacgaggccaccaaugccaauuuuggaacagaagcuugagcccgggaccgagccucuugggagccccggcacacggucaaaggcucuggucccuggggaauggggacggggcgggaggcacuuggaggggcgaggagaaccaggugcagucggucagaugggcucacccggacaacaaggagcaucuacgcaaggcuuaugggaguag

SEQ ID NO: 321822 - RNA, 3894 nt, Artificial Sequence
  derived and/or modified sequence
augucuucuggcgacccagcucaucuuggccugugcuuauggcuguggcucggagccaccuuggggcgcgagcaaguucaagccuccggccuuuuacgcuuggccguccuccccgaagacagacugcagaugaaguggcgcgaauccgaagggaguggcuugggcuaccuggugcaagugaaaccuauggccggcgauagcgagcaggaaguaauucugacuacuaagacaccgaaagcaacaguugguggacucucuccuaguaaaggauauacucuucagauauuugaguugaccggauccgggcgauuccuacuagcacgucgagaguuuguuaucgaagaccucaaaucguccuccuuagacagauccagccaacggccccucggauccggagcaccugaaccaacgccaagucacaccggcucgccugaccccgagcaagcauccgagccucaaguugccuucacuccaagccaggacccccggacaccaggcggcuccgaguggcgagagacuggcccucaguucagaugucucccccccguccccgcagacaugguuuuccuuguggacggcucauggaguauuggacauucccacuuucagcaggugaaggauuuucuggccucaguuauagcaccauucgagauagguccggauaaaguccaggucgggcuuacacaguacucgggugaugcacagacagagugggacuugaacaguuugaguacgaaggaacaagugcuggcugcggugaggcgacugagauacaagggcgggaauacauucacgggacuggcucugacacacguguuaggacaaaauuugcagccagcagccggccugaggccugaggcugccaaaguagucauauuagugacagacggaaagucgcaggacgacgugcacaccgccgccagaguucuaaaggaccucggggucaacgucuuugccguuggagugaagaacgcagacgaagcugagcuaagacuccuggccucuccuccucgcgacauaaccguucacaguguguuggacuuucuucaguuaggagcccucgcaggcuuguuaagccgcuugauuugucagcgucuucagggcggaucuccacgacagggaccugcugccgccccagcccuugauaccuuaccggccccaacaucccugguccugucccaggugaccagcucuucuaucaggcugucguggaccccagcgccccgccacccacugaaauaucugauaguguggcgggcuucgagaggcggaaccccuagggaaguugugguggaaggaccugcagcuaguacagaacugcauaaccuagcuaguagaaccgaguaccugguaucuguauuuccuauuuacgagggaggaguuggcgagggucucagggggcucgucacaacugcaccuuugccucccccaagagcccugacacucgcggcugucacuccccgcaccgugcaucugacguggcaaccaucugcaggcgccacccauuaccuugugagauguagcccagcauccccaaagggcgaggaagaggagagagaagugcaagugggaagacccgaaguucugcuggacggacuggagccuggucgggacuaugaagugagcguacaaucuuuacguggcccagaagguagugaggcccgugggauucgagcccgcacaccaacucucgccccaccacgacaccugggcuucucugacgucucucacgacgccgcgcgcguguucugggaaggugccccucggcccgucaggcucguccgcguuaccuacguuucgucugaagggggccauagcgggcaaacagaagcgccugguaacgcaacaucugcaacacugggcccccugucaucuuccacuaccuacaccguacgugugacaugucucuauccgggagguggcucaaguacccuuacaggccguguaacaacaaaaaaggcaccauccccuagucagcugaguaugaccgaacugccaggagacgcagugcaacuggcuuggguugcagccgcuccuucuggugucuugguuuaccaaauuacguggacuccuuuaggcgagggcaaggcacacgaaaucagcgugccaggcaaccuuggcacugccgugcugcccggacugggccgacauacagaguacgacguuacaauucuagcauauuacagagauggagccagaagcgaccccguuucccucagauauacacccucaaccgugagucgcagcccaccuucgaaucucgcauuagccucugaaacgcccgacaguuugcaggucuccuggaccccaccccuggggcgaguauugcauuauuggcuuacguaugccccagccaguggccugggccccgagaaaucagucuccgugccaggggcucguucacauguuacccugccagaccugcaggcagcgaccaaguaccguguucuggugagcgcgauuuaugcagcaggaaggagcgaagcggucagugcaacaggacagacugcaugcccugcguuacguccagauggaagccucccgggguucgaccuuauggucgcuuucagccugguagaaaaagccuacgcaagcauuaggggcguugccauggagccaagcgcauuuggagggacgccaaccuuuacccuauuuaaggaugcccaguugaccagaagaguguccgacguuuaccccgccccgcuuccgccugaacauacuaucguguuccugguaaggcuccuucccgaaaccccccgagaggccuucgcccucuggcagaugaccgcagaagauuuccaaccuuuacuugggguuuuacuugaugccggcaagaaaucuuuaacuuacuuccacagagacccacgcgccgcccugcaggaagccaccuucgauccucaggaagugaggaaaauuuucuucggcucauuccacaaaguucaugucgcaguuggacgcaguaaaguccgccucuacgucgacugccgcaaggucgccgagcgcccucucggcgagaugggaucuccuccagccgccggcuuugugacacuggguagacuugcaaaagccagaggcccccggagcucaagcgcagccuuucagcuccaaaugcuccaaauuguguguagcgauacuugggcugaugaagaccgaugcugugaacuucccgcgagucgagacggagaaaccuguccggccuuugugagcgcaugcuccugcucauccgagacacccggcccacccggaccacagggccccccuggauugccuggcaggaacgggaccccuggugaacagggauuccccggaccacgggguccaccaggaguaaagggggaaaagggcgaucauggacugccaggacuacaaggccauccaggacaucaaggcauaccaggcagagucggcuuacagggaccuaagggcaugagagggcucgaagggacggcaggccuacccggcccuccgggaccccgcggguuucaagguauggccggggcacgcggaacaagcggcgaacguggcccacccggaacagugggcccuacuggccucccaggcccuaagggcgagcgcggcgagaaaggcgaaccgcagagcuuggcuacacucuaucaguugguaucucaggccugcgagagcgcaauccaaacacauguuucaaaauuugauagcuuucacgaaaauacccgaccacccaugccaauccuggaacaaaaacuugagcccggcaccgagccccuaggaagccccgggacacgauccaaggcuuuagugccaggagaaugggggaggggggguagacaccucgaagggaggggcgagcccggcgcaguggggcaaauggguucaccugggcagcaaggagccaguacacagggauugugggaguag

SEQ ID NO: 321823 - DNA, 432 bp, Artificial Sequence
  derived and/or modified sequence
gtgagagagctggaggccgagctggacgccgagcagaagaagcacgccgaggccctgaagggcgtgagaaagcacgagagaagagtgaaggagctggcctaccaggtgggcgacagagtgagcctgggcagcggccccggcgccggccccgcccaggccagccccgagagccccctgcccgcccaggccgaggaggacagaaagaacctggccagaatgcaggacctggtggacaagctgcagagcaaggtgaagagctacaagagacagttcgaggaggccgagcagcaggccaacaccaacctggccaagtacagaaaggcccagcacgagctggacgacgccgaggagagagccgacatggccgagacccaggccaacaagctgagagccagaaccagagacgccctgggccccaagcacaaggagtag

SEQ ID NO: 321824 - DNA, 432 bp, Artificial Sequence
  derived and/or modified sequence
gtgagagagttagaggccgagctcgatgcagagcagaagaagcatgctgaggccttgaaaggggtgcggaagcacgaaaggcgtgtgaaggagctcgcttatcaggtgggagaccgcgtatccttaggctctgggcccggagccgggccagcccaggcttctcctgaatcccccttgcctgcacaggctgaagaagatcgcaagaacctggccaggatgcaggatctagtggataaactgcaatctaaagtcaaaagctacaagagacagttcgaagaggcagaacaacaggccaataccaaccttgctaaataccgaaaggcccagcatgagctggacgatgcagaggaaagagccgatatggctgagacccaggcaaacaagttgagggcacggacgcgggatgctctgggtccaaagcataaagaatag

SEQ ID NO: 321825 - DNA, 432 bp, Artificial Sequence
  derived and/or modified sequence
gtgcgggagctggaggccgagctggatgctgagcagaagaagcacgccgaggccctgaagggcgtgaggaagcatgaaagaagagtgaaggagctggcctaccaggtgggggacagagtgtccctgggcagcggccctggggccggccctgcccaggccagccctgagagccccctgcctgcccaggccgaggaggacaggaagaacctggccaggatgcaggacctggtggacaagctgcagagcaaggtgaagagctacaagaggcagtttgaggaggccgagcagcaggccaacaccaacctggccaagtacaggaaggcccagcacgagctggatgatgctgaggagagagctgacatggccgagacccaggccaacaagctgcgggcccggaccagagatgccctgggccccaagcacaaggagtag

SEQ ID NO: 321826 - DNA, 432 bp, Artificial Sequence
  derived and/or modified sequence
gtgcgggagctggaggccgagctggacgccgagcagaagaagcacgccgaggccctcaagggagttcgcaagcacgagagacgagtgaaggaattagcataccaggtgggtgatagagtgagcctcggaagcggtcccggcgccggccccgctcaagcgtcaccggaaagcccacttcccgcccaggccgaagaggacagaaagaatctcgctagaatgcaggacttagtggataaattgcagtcaaaagtaaaaagctataagaggcagttcgaggaagccgagcagcaggcaaacacaaatcttgcgaagtataggaaagcccaacatgagctggatgacgcagaagaacgggcagatatggccgagactcaggcgaataaactccgggctaggaccagggacgccctgggccctaagcataaagagtag

SEQ ID NO: 321827 - DNA, 432 bp, Artificial Sequence
  derived and/or modified sequence
gtgagggagctggaggcagagttagacgctgaacaaaagaagcacgctgaggctttaaaaggggtgcgcaagcacgaacgccgagtgaaagaactggcgtaccaggttggcgatagagtctctctggggagcggtcccggtgcgggacccgctcaggcgtcacccgaaagccccctgccggctcaggcggaggaggaccgcaagaaccttgctagaatgcaggacctggttgataagcttcagagcaaggtcaagtcatataaaagacagtttgaggaggccgagcagcaggccaataccaatttagcaaaataccggaaagcccaacacgagcttgacgatgcagaagagcgcgcagacatggctgagacccaagccaacaaattgcgggctcgcacacgggatgcactcggaccaaagcataaggagtag

SEQ ID NO: 321828 - protein, 149 aa, Artificial Sequence
  derived and/or modified sequence
VRELEAELDAEQKKHAEALKGVRKHERRVKELAYQVGDRVSLGSGPGAGPAQASPESPLPAQAEEDRKNLARMQDLVDKLQSKVKSYKRQFEEAEQQANTNLAKYRKAQHELDDAEERADMAETQANKLRARTRDALGPKLSLSPQHKE

SEQ ID NO: 321829 - protein, 144 aa, Artificial Sequence
  derived and/or modified sequence
VRELEAELDAEQKKHAEALKGVRKHERRVKELAYQAEEDRKNLARMQDLVDKLQSKVKSYKRQFEEAVSALGPGHLDRAPQLCPRVCGQEQQANTNLAKYRKAQHELDDAEERADMAETQANKLRARTRDALGPKLSLSPQHKE

SEQ ID NO: 321830 - protein, 122 aa, Artificial Sequence
  derived and/or modified sequence
VRELEAELDAEQKKHAEALKGVRKHERRVKELAYQAEEDRKNLARMQDLVDKLQSKVKSYKRQFEEAEQQANTNLAKYRKAQHELDDAEERADMAETQANKLRARTRDALGPKLSLSPQHKE

SEQ ID NO: 321831 - protein, 149 aa, Artificial Sequence
  derived and/or modified sequence
VRELEAELDAEQKKHAEALKGVRKHERRVKELAYQAEEDRKNLARMQDLVDKLQSKVKSYKRQFEEAEQQANTNLAKYRKAQHELDDAEERADMAETQANKLRARTRDALGPKVRSGRGIALCAGGLWGLTGSTAHSAIPFSSAQGVTA

SEQ ID NO: 321832 - DNA, 450 bp, Artificial Sequence
  derived and/or modified sequence
gtgagagagctggaggccgagctggacgccgagcagaagaagcacgccgaggccctgaagggcgtgagaaagcacgagagaagagtgaaggagctggcctaccaggtgggcgacagagtgagcctgggcagcggccccggcgccggccccgcccaggccagccccgagagccccctgcccgcccaggccgaggaggacagaaagaacctggccagaatgcaggacctggtggacaagctgcagagcaaggtgaagagctacaagagacagttcgaggaggccgagcagcaggccaacaccaacctggccaagtacagaaaggcccagcacgagctggacgacgccgaggagagagccgacatggccgagacccaggccaacaagctgagagccagaaccagagacgccctgggccccaagctgagcctgagcccccagcacaaggagtag

SEQ ID NO: 321833 - DNA, 435 bp, Artificial Sequence
  derived and/or modified sequence
gtgagagagctggaggccgagctggacgccgagcagaagaagcacgccgaggccctgaagggcgtgagaaagcacgagagaagagtgaaggagctggcctaccaggccgaggaggacagaaagaacctggccagaatgcaggacctggtggacaagctgcagagcaaggtgaagagctacaagagacagttcgaggaggccgtgagcgccctgggccccggccacctggacagagccccccagctgtgccccagagtgtgcggccaggagcagcaggccaacaccaacctggccaagtacagaaaggcccagcacgagctggacgacgccgaggagagagccgacatggccgagacccaggccaacaagctgagagccagaaccagagacgccctgggccccaagctgagcctgagcccccagcacaaggagtag

SEQ ID NO: 321834 - DNA, 369 bp, Artificial Sequence
  derived and/or modified sequence
gtgagagagctggaggccgagctggacgccgagcagaagaagcacgccgaggccctgaagggcgtgagaaagcacgagagaagagtgaaggagctggcctaccaggccgaggaggacagaaagaacctggccagaatgcaggacctggtggacaagctgcagagcaaggtgaagagctacaagagacagttcgaggaggccgagcagcaggccaacaccaacctggccaagtacagaaaggcccagcacgagctggacgacgccgaggagagagccgacatggccgagacccaggccaacaagctgagagccagaaccagagacgccctgggccccaagctgagcctgagcccccagcacaaggagtag

SEQ ID NO: 321835 - DNA, 450 bp, Artificial Sequence
  derived and/or modified sequence
gtgagagagctggaggccgagctggacgccgagcagaagaagcacgccgaggccctgaagggcgtgagaaagcacgagagaagagtgaaggagctggcctaccaggccgaggaggacagaaagaacctggccagaatgcaggacctggtggacaagctgcagagcaaggtgaagagctacaagagacagttcgaggaggccgagcagcaggccaacaccaacctggccaagtacagaaaggcccagcacgagctggacgacgccgaggagagagccgacatggccgagacccaggccaacaagctgagagccagaaccagagacgccctgggccccaaggtgagaagcggcagaggcatcgccctgtgcgccggcggcctgtggggcctgaccggcagcaccgcccacagcgccatccccttcagcagcgcccagggcgtgaccgcctag

SEQ ID NO: 321836 - DNA, 450 bp, Artificial Sequence
  derived and/or modified sequence
gtacgagagttggaggctgagctcgatgccgagcaaaaaaaacatgccgaggccttaaaaggagtcagaaagcacgaaagaagagtgaaggaattggcctatcaggttggtgatagggttagccttggctctggaccaggggcaggaccggcccaggcatccccagagagccctctccctgcgcaggccgaggaggatcggaaaaacttagcccgaatgcaggatctggtggataaacttcaatccaaggtaaaaagttataaacggcaattcgaagaggctgaacagcaggcgaacacaaatctcgccaaatacaggaaggcccagcatgaactggatgatgccgaggaacgggcggatatggcggagactcaggcaaataaactgagggcgcgcacaagagacgcgctcggcccaaagttgtcattatcaccacagcataaagagtag

SEQ ID NO: 321837 - DNA, 435 bp, Artificial Sequence
  derived and/or modified sequence
gttagagaacttgaagccgagttagacgctgagcagaagaagcacgcggaggccctgaaaggcgtcagaaaacatgagcggagggtcaaggaattagcctaccaggccgaagaggatagaaagaatctggcccggatgcaggaccttgttgataaactccaaagcaaggtcaaaagctacaagcgtcagttcgaagaggcagtttccgcattgggccctgggcacctggaccgggctccccagctgtgccccagagtgtgcggtcaggaacagcaagccaatactaacctggccaaatacaggaaggctcagcatgagctggatgacgctgaagaacgcgcagatatggctgaaacccaggcgaataaacttagagcgcgtacaagggatgccttgggaccaaagctttcactgtccccacagcataaggagtag

SEQ ID NO: 321838 - DNA, 369 bp, Artificial Sequence
  derived and/or modified sequence
gtgagggagttggaagcagaactggatgccgaacagaaaaaacatgcagaggccctaaagggcgtacggaagcacgaacgtcgtgtgaaagagttggcatatcaggcagaggaggatcgcaagaatctggcacggatgcaggacctggtggataaactgcagtccaaagtgaaatcatacaagagacaatttgaggaggcggagcagcaggccaatacaaaccttgcaaaatataggaaagcccagcatgaactggatgacgccgaggaaagggctgatatggcggagacccaagccaacaagctcagggctcgaactcgggacgcactgggccctaagctgagcctgtcaccacagcataaagagtag

SEQ ID NO: 321839 - DNA, 450 bp, Artificial Sequence
  derived and/or modified sequence
gtcagggaactggaagcggaactggacgccgaacagaagaagcacgccgaagctctgaagggcgtcaggaagcacgaacgccgcgtgaaggaactggcatatcaagccgaagaggataggaagaacctggctagaatgcaggacttggtcgacaaattgcaatctaaggtgaaaagttataaaaggcagtttgaggaagctgaacaacaagctaatactaatctagctaaatatcggaaggcccagcacgagctggatgatgccgaggaacgggcagatatggctgaaactcaagcgaataaactgcgcgcccggaccagggacgctctcgggcccaaggtgcgaagtggccggggtatcgctctatgtgcgggggggctgtggggactcacaggatctaccgctcactcagccattcccttctccagcgcgcaaggtgtgactgcatag

SEQ ID NO: 321840 - DNA, 450 bp, Artificial Sequence
  derived and/or modified sequence
gtgcgggagctggaggccgagctggatgctgagcagaagaagcacgccgaggccctgaagggcgtgaggaagcatgaaagaagagtgaaggagctggcctaccaggtgggggacagagtgtccctgggcagcggccctggggccggccctgcccaggccagccctgagagccccctgcctgcccaggccgaggaggacaggaagaacctggccaggatgcaggacctggtggacaagctgcagagcaaggtgaagagctacaagaggcagtttgaggaggccgagcagcaggccaacaccaacctggccaagtacaggaaggcccagcacgagctggatgatgctgaggagagagctgacatggccgagacccaggccaacaagctgcgggcccggaccagagatgccctgggccccaagctgagcctgagcccccagcacaaggagtag

SEQ ID NO: 321841 - DNA, 435 bp, Artificial Sequence
  derived and/or modified sequence
gtgcgggagctggaggccgagctggatgctgagcagaagaagcacgccgaggccctgaagggcgtgaggaagcatgaaagaagagtgaaggagctggcctaccaggccgaggaggacaggaagaacctggccaggatgcaggacctggtggacaagctgcagagcaaggtgaagagctacaagaggcagtttgaggaggccgtgtctgccctgggccctggccacctggaccgggccccccagctgtgcccccgggtgtgtggccaggagcagcaggccaacaccaacctggccaagtacaggaaggcccagcacgagctggatgatgctgaggagagagctgacatggccgagacccaggccaacaagctgcgggcccggaccagagatgccctgggccccaagctgagcctgagcccccagcacaaggagtag

SEQ ID NO: 321842 - DNA, 369 bp, Artificial Sequence
  derived and/or modified sequence
gtgcgggagctggaggccgagctggatgctgagcagaagaagcacgccgaggccctgaagggcgtgaggaagcatgaaagaagagtgaaggagctggcctaccaggccgaggaggacaggaagaacctggccaggatgcaggacctggtggacaagctgcagagcaaggtgaagagctacaagaggcagtttgaggaggccgagcagcaggccaacaccaacctggccaagtacaggaaggcccagcacgagctggatgatgctgaggagagagctgacatggccgagacccaggccaacaagctgcgggcccggaccagagatgccctgggccccaagctgagcctgagcccccagcacaaggagtag

SEQ ID NO: 321843 - DNA, 450 bp, Artificial Sequence
  derived and/or modified sequence
gtgcgggagctggaggccgagctggatgctgagcagaagaagcacgccgaggccctgaagggcgtgaggaagcatgaaagaagagtgaaggagctggcctaccaggccgaggaggacaggaagaacctggccaggatgcaggacctggtggacaagctgcagagcaaggtgaagagctacaagaggcagtttgaggaggccgagcagcaggccaacaccaacctggccaagtacaggaaggcccagcacgagctggatgatgctgaggagagagctgacatggccgagacccaggccaacaagctgcgggcccggaccagagatgccctgggccccaaggtgcgcagcggccggggcatcgccctgtgtgccggcggcctgtggggcctgaccggcagcacagcccacagcgccatccccttcagcagcgcccagggcgtgacagcctag

SEQ ID NO: 321844 - DNA, 450 bp, Artificial Sequence
  derived and/or modified sequence
gtgcgggagctggaggccgagctggacgccgagcagaagaagcacgcggaagcgctgaagggggtgcgcaaacatgaaaggagggtgaaggagctggcctatcaggtgggcgatagggtgtccttaggctccggccccggagctggccctgcccaagcatctcctgagtcaccactgccggcacaggccgaagaggatcggaagaatctagcacgcatgcaggatcttgtcgataaactgcagagcaaggttaaaagctacaagagacagttcgaggaggcagagcaacaggctaataccaatctggctaagtaccgtaaagcccagcacgagctagacgacgccgaggagagagccgacatggcagagacacaggcaaataagctgcgggcccggacaagagacgcactgggaccaaaactgagtctatccccgcagcacaaagaatag

SEQ ID NO: 321845 - DNA, 435 bp, Artificial Sequence
  derived and/or modified sequence
gtgcgggagctggaggccgagctggacgccgagcagaagaagcacgctgaagccctgaaaggagtacgcaaacacgaaagaagagtgaaggagctcgcttaccaggccgaggaagataggaagaatctggccaggatgcaggacctggtagataaactccagtccaaagttaaatcctataagcgccagttcgaggaagcagtatcggcgctcggaccaggacaccttgacagagcaccccaactgtgtcccagagtctgcggccaggaacaacaggcaaatacaaatctggcaaagtaccggaaggcacagcatgagctcgatgacgcggaggagcgcgccgacatggccgagacccaggccaataagctccgcgcacggacccgggacgctctgggacccaagctgtcgttaagcccccagcacaaggaatag

SEQ ID NO: 321846 - DNA, 369 bp, Artificial Sequence
  derived and/or modified sequence
gtgcgggagctggaggccgagctggacgccgagcagaagaagcacgctgaggctctcaagggggtgcgtaagcatgagcgaagggtgaaagaacttgcctaccaggccgaggaggatagaaaaaatctagcgaggatgcaggacctggtcgacaaactgcagagtaaagtgaagagctacaaacggcagttcgaagaagccgaacagcaagcaaacactaatttggccaagtaccgcaaggcccagcacgaacttgacgacgccgaggaaagagctgacatggccgaaacgcaggctaacaagctccgggctaggactagggacgccttgggccccaagttaagcctgtcaccacagcataaggagtag

SEQ ID NO: 321847 - DNA, 450 bp, Artificial Sequence
  derived and/or modified sequence
gtgcgggagctggaggccgagctggacgccgagcagaagaagcacgccgaggctctgaaaggcgtaagaaagcacgagcgcagagtgaaggagttggcttaccaggctgaggaggatagaaaaaacctcgcgcgaatgcaggacctcgtggacaaacttcagagcaaagtgaagagctacaagcggcagttcgaggaagccgaacagcaggccaataccaacctggctaagtatagaaaggcccagcacgagcttgacgacgcagaggaacgcgcggatatggcagagacccaggccaacaaactcagggcccgcacgcgcgatgcgctgggacccaaggtcagatccggaagagggattgcgttgtgtgccggaggcctctggggcctcactgggagcacagcccacagcgcaatcccattctcctcggcccaaggcgtgaccgcttag

SEQ ID NO: 321848 - DNA, 450 bp, Artificial Sequence
  derived and/or modified sequence
gtccgggaactggaggctgagcttgatgccgagcaaaaaaaacacgcggaagctctgaagggggtgaggaagcacgaaaggcgggttaaagagcttgcctaccaggtcggagatcgcgtctccctcgggtcagggccaggagcaggccctgcccaggcaagtcccgaaagccctctacccgcacaggctgaagaggatagaaagaacctggcacgaatgcaagacctcgtggataaactacagtccaaagtgaaaagctacaaacggcagtttgaggaggcagagcagcaggccaatactaacctcgccaagtacagaaaagcccaacatgaattggatgacgctgaggaacgagctgatatggccgagactcaggccaataaactgcgcgctcgaacacgcgatgctctcggccctaaactatctctttctccccagcacaaggagtag

SEQ ID NO: 321849 - DNA, 435 bp, Artificial Sequence
  derived and/or modified sequence
gtcagggagctggaggccgagcttgacgcggaacaaaagaaacatgccgaagccctgaaaggcgtgaggaagcacgagaggagggtaaaggagttagcatatcaagcagaggaggatagaaagaatctcgccaggatgcaagatcttgtcgacaaactccaatcaaaggtcaagtcatacaaacgacagtttgaagaggctgtgtcagctctcgggccaggacacctggatcgcgcaccccagttgtgtcctagagtatgcgggcaggagcagcaagcgaataccaacttggcgaagtatcggaaagcccagcacgaactggacgacgccgaagagagagccgatatggcagagacacaggccaataaactgagggctagaacccgggatgcgctgggaccaaaattgtcactgtctcctcagcataaggagtag

SEQ ID NO: 321850 - DNA, 369 bp, Artificial Sequence
  derived and/or modified sequence
gttcgggagcttgaggccgagttggacgctgaacagaagaaacacgcggaagcactaaagggggttcggaaacacgagcgcagggtgaaagagctcgcctatcaggccgaggaggatagaaaaaatttagccaggatgcaggacctggttgacaagctgcaatctaaggtgaagtcgtacaagaggcagttcgaggaggctgagcaacaggccaacacaaacctggcaaagtacaggaaagcccagcacgaactggacgacgcagaagaaagggcagacatggccgagacccaggccaataagctgcgagcacgaacaagggatgccctagggccaaagctgtccctttcaccacagcataaagaatag

SEQ ID NO: 321851 - DNA, 450 bp, Artificial Sequence
  derived and/or modified sequence
gtgagagagttggaggccgaactggatgcggaacagaagaagcacgcagaggccttaaagggagtgagaaagcacgagaggagagttaaggagctcgcctaccaagcagaagaagatcgaaagaatctggccaggatgcaggacctggtcgacaagttacagagcaaagtgaagtcatataaacggcagttcgaagaggccgaacagcaggcgaacacaaacctcgcaaaatacagaaaagcacagcacgagctggatgatgccgaagagagagccgacatggctgagacacaggccaataagctcagagcacgaaccagagatgccctgggtcctaaggtgcggtccggcaggggtatagccctttgcgccggagggctgtggggtctcacgggttcaaccgctcatagcgcgataccattttcatcagcccaaggcgtgacggcttag

SEQ ID NO: 321852 - DNA, 699 bp, Artificial Sequence
  derived and/or modified sequence
gtacgggagctggaggctgagcttgatgcagagcagaagaagcacgccgaggcccttaagggcgtgcgcaagcatgagcgccgtgtcaaggagctcgcataccaggtgggcgacagggtctccctggggagtggccctggagctggcccagcccaagcaagccctgagtcccccttgcccgcccaggccgaggaggacaggaagaacctggctcgcatgcaggacctggtggacaagctgcagagcaaggtcaagagctacaagcgccagtttgaggaggcggagcagcaggccaacaccaacctggccaagtatcgcaaggcccagcacgagctggatgatgcggaggagcgggcagacatggcggaaacccaggccaacaagctgcgggcacggacccgggacgccctgggccccaagctatccctttctcctcagcacaaggagtgacggcctgaccccctgggctctaaagaggaatgtctgctgttgcacatctggctgaggccacctgccccgatcctgccatctctgcatcgccccctgctgccttcagccttccctgggccctgaataaacaccacagccagtttccttctcattcttttctttggggttcaggaggaaaaacacagtcctagggacaaaagccaggtccacagcagtcatttttaaaataaagttatttaatagtctcca

SEQ ID NO: 321853 - DNA, 684 bp, Artificial Sequence
  derived and/or modified sequence
gtacgggagctggaggctgagcttgatgcagagcagaagaagcacgccgaggcccttaagggcgtgcgcaagcatgagcgccgtgtcaaggagctcgcataccaggccgaggaggacaggaagaacctggctcgcatgcaggacctggtggacaagctgcagagcaaggtcaagagctacaagcgccagtttgaggaggcggtgagtgcgctggggcctggacacctggaccgggcaccccagctctgccccagggtctgtggccaggagcagcaggccaacaccaacctggccaagtatcgcaaggcccagcacgagctggatgatgcggaggagcgggcagacatggcggaaacccaggccaacaagctgcgggcacggacccgggacgccctgggccccaagctatccctttctcctcagcacaaggagtgacggcctgaccccctgggctctaaagaggaatgtctgctgttgcacatctggctgaggccacctgccccgatcctgccatctctgcatcgccccctgctgccttcagccttccctgggccctgaataaacaccacagccagtttccttctcattcttttctttggggttcaggaggaaaaacacagtcctagggacaaaagccaggtccacagcagtcatttttaaaataaagttatttaatagtctcca

SEQ ID NO: 321854 - DNA, 618 bp, Artificial Sequence
  derived and/or modified sequence
gtacgggagctggaggctgagcttgatgcagagcagaagaagcacgccgaggcccttaagggcgtgcgcaagcatgagcgccgtgtcaaggagctcgcataccaggccgaggaggacaggaagaacctggctcgcatgcaggacctggtggacaagctgcagagcaaggtcaagagctacaagcgccagtttgaggaggcggagcagcaggccaacaccaacctggccaagtatcgcaaggcccagcacgagctggatgatgcggaggagcgggcagacatggcggaaacccaggccaacaagctgcgggcacggacccgggacgccctgggccccaagctatccctttctcctcagcacaaggagtgacggcctgaccccctgggctctaaagaggaatgtctgctgttgcacatctggctgaggccacctgccccgatcctgccatctctgcatcgccccctgctgccttcagccttccctgggccctgaataaacaccacagccagtttccttctcattcttttctttggggttcaggaggaaaaacacagtcctagggacaaaagccaggtccacagcagtcatttttaaaataaagttatttaatagtctcca

SEQ ID NO: 321855 - DNA, 691 bp, Artificial Sequence
  derived and/or modified sequence
gtacgggagctggaggctgagcttgatgcagagcagaagaagcacgccgaggcccttaagggcgtgcgcaagcatgagcgccgtgtcaaggagctcgcataccaggccgaggaggacaggaagaacctggctcgcatgcaggacctggtggacaagctgcagagcaaggtcaagagctacaagcgccagtttgaggaggcggagcagcaggccaacaccaacctggccaagtatcgcaaggcccagcacgagctggatgatgcggaggagcgggcagacatggcggaaacccaggccaacaagctgcgggcacggacccgggacgccctgggccccaaggtgaggagtggcaggggcattgctctctgtgcagggggactgtgggggctgacaggtagtactgctcactcagctatccctttctcctcagcacaaggagtgacggcctgaccccctgggctctaaagaggaatgtctgctgttgcacatctggctgaggccacctgccccgatcctgccatctctgcatcgccccctgctgccttcagccttccctgggccctgaataaacaccacagccagtttccttctcattcttttctttggggttcaggaggaaaaacacagtcctagggacaaaagccaggtccacagcagtcatttttaaaataaagttatttaatagtctcca

SEQ ID NO: 321856 - DNA, 207 bp, Artificial Sequence
  derived and/or modified sequence
atgaagctgaatgaaaaattttccgagggttggcggaaacccaatgcctcctggaagtcaagttgcagcaagaacagctcggatcgcgataaactctctcttccacataagaagctggagaggggctcgtggagggtgtggcagcctcggagcaccctgtgtcgtaccctggacaagactgaggaagagcgagcaaaaagagaatag

SEQ ID NO: 321857 - DNA, 315 bp, Artificial Sequence
  derived and/or modified sequence
atgtacgataggtacagggacatgcgtgacagccgggacccaatgtatcggagggagggatcatacgatcggtacctgcggatggacgattactgtaggcgtaaggatgactcttatttcgatagataccgggattcttttgacggcagggggccaccaggacctgagtctcaatcccgggctaaggagcgtctgaaacgcgaagagcggcgccgtgaagaactttaccgacaatacttcgaagagattcagaggcggttcgacgccgagagacctgtcgattgttctgttatcgtcgtgaacaagcaaacttag

SEQ ID NO: 321858 - DNA, 727 bp, Artificial Sequence
  derived and/or modified sequence
cggccgccattgcctcgtgcccgcgccggtcggttggtggcgcctttgtcctacggcgggcaggtgggccgacgcggaggcggcagcggcgggcctgaggcgaaggagcggccgggagcccgccgcgctggtagcgggatccatatggctttggagacagtcgagattcaaggcgtgatcgatccccaattcgaggaagtccaaggagagagcccagggatggcagaaatggccgggatgcccgggacagcagagacattcgagacccccgagacttgcgggaccacagacatagtagagatttgcgggatcacagagacagcaggagtgtgcgcgacgttcgggacgtgagggatcttagagactttcgtgatctaagagactctagggattttcgagatcagcgagaccccatgtacgacagatacagagacatgagagactcccgagatcctatgtacaggagagaaggctcttatgaccgatacctacgaatggatgactattgcaggagaaaggatgactcttattttgaccgttacagagatagctttgatggacggggccctccaggcccagaaagtcagtctcgtgcaaaagagcgtttgaaacgtgaggaacggcgtagagaagagctttatcgtcaatattttgaggaaatccagagacgctttgatgccgaaaggcccgttgattgttctgtgattgtggtcaacaaacagacaaa

SEQ ID NO: 321859 - DNA, 315 bp, Artificial Sequence
  derived and/or modified sequence
atgtatgaccgctacagagacatgagggacagccgggaccccatgtacagaagagagggcagctatgaccgctacctgaggatggatgactactgcaggaggaaggatgacagctactttgaccgctacagagacagctttgatggccggggccccccaggccctgagagccagagccgggccaaggagcggctgaagcgggaggagaggagaagagaggagctgtaccggcagtactttgaggagatccagaggagatttgatgctgagaggcctgtggactgcagcgtcatcgtggtgaacaagcagacctag

SEQ ID NO: 321860 - DNA, 315 bp, Artificial Sequence
  derived and/or modified sequence
atgtacgaccggtaccgggacatgcgggacagccgggaccccatgtatcgcagggagggatcatatgacagatatcttcggatggatgactactgtcgccgaaaagatgatagctattttgatcggtatagagacagtttcgacgggcgcggcccccctgggccagaatcacaatcacgggctaaggaaagactgaagagagaggaaaggaggagagaagaactctatcgccagtacttcgaagaaatccagaggagattcgatgctgagcggccagtagactgcagtgttatagttgtcaacaagcagacctag

SEQ ID NO: 321861 - DNA, 315 bp, Artificial Sequence
  derived and/or modified sequence
atgtacgacagatatagagacatgcgcgattctcgagaccccatgtacaggcgggaaggttcctatgacaggtacctccgcatggatgactactgtcggcgtaaagacgacagctactttgacagatatagggactcctttgacggccgtgggccacctggacccgagagccagtctcgagcgaaagaacgcctgaaacgggaagagagacgccgtgaagagttgtaccggcagtatttcgaggagattcagcggaggtttgatgctgagcggcctgtggattgcagtgtgattgtggtcaacaaacaaacttag

SEQ ID NO: 321862 - DNA, 315 bp, Artificial Sequence
  derived and/or modified sequence
atgtacgacagatacagagacatgagagacagcagagaccccatgtacagaagagagggcagctacgacagatacctgagaatggacgactactgcagaagaaaggacgacagctacttcgacagatacagagacagcttcgacggcagaggcccccccggccccgagagccagagcagagccaaggagagactgaagagagaggagagaagaagagaggagctgtacagacagtacttcgaggagatccagagaagattcgacgccgagagacccgtggactgcagcgtgatcgtggtgaacaagcagacctag

SEQ ID NO: 321863 - DNA, 567 bp, Artificial Sequence
  derived and/or modified sequence
atgtctcagagcaatcgcgaactggttgtcgatttcttgagctacaagttatcccagaagggatactcctggtctcaattttccgatgttgaggaaaacaggacagaggcgcctgaaggcacagaaagtgaaatggagacaccctctgccatcaacggaaaccccagctggcacctggcggactctccagctgtgaatggcgccactggacatagctcctcactggatgctcgcgaggtaatacctatggcagctgtcaagcaagccctgcgcgaggccggcgacgaatttgagctgcgctatcgacgcgcattctcagacctgacctcacagcttcacataacacccggcaccgcctatcagagctttgagcaggtcgtgaacgagctttttagagacggggtcaactggggtagaatcgtagcatttttttccttcgggggagcactctgtgtcgagagtgtagataaagagatgcaggtgctggtttccagaatagcagcctggatggctacctacttaaacgatcacctggaaccttggattcaggagaatggtggatggtag

SEQ ID NO: 321864 - DNA, 567 bp, Artificial Sequence
  derived and/or modified sequence
atgtcacaaagcaaccgcgagctggtggtagactttctaagctacaagctgagccagaaaggttactcttggagtcagttttcagacgttgaggagaatcggacagaggctccggagggtacagaatccgaaatggaaaccccttctgcaattaacggcaacccttcctggcatctagccgactcccctgcagtcaatggagctacgggacacagcagtagcctcgacgcccgcgaggtgatccctatggccgctgtgaagcaagcgctgcgcgaggccggtgatgagtttgaactgaggtaccggcgcgcattcagcgacctaaccagccagctacacataacgccaggaaccgcttaccagtcatttgagcaggtagttaacgagctgttccgagacggcgtcaattggggcagaatcgtggctttctttagcttcggaggggcactttgcgttgagagtgtcgataaggaaatgcaggtgctggtgtccaggatcgctgcctggatggccacctacctgaatgatcacctagaaccgtggatacaggaaaatggcggttggtag

SEQ ID NO: 321865 - DNA, 546 bp, Artificial Sequence
  derived and/or modified sequence
atgagccagtcaaaccgggaactggtcgtcgatttcctgagttacaagctctctcagaagggctactcgtggagccagttcagcgacgtggaggaaaaccgcacagaagctcccgaaggcacagagagcgagatggagacaccttccgccattaacgggaacccaagctggcatttagccgactcaccagccgtaaacggcgccacagggcacagttcctctctggatgccagagaggtcatcccaatggctgcagttaagcaggccttacgcgaggcaggagatgagttcgagctgcgatatagacgagccttttccgacctaaccagccagctgcatatcacccctgggaccgcctatcagtcctttgagcaggttgttaatgagctgttccgagacggggtgaattggggccgcatcgttgcattttttagcttcggtggggctctgtgtgtggaatctgtagacaaggagatgcaggttttagtctcacgaattgcagcgtggatggccacttatcttaatgatcatctggaaccctggtag

SEQ ID NO: 321866 - DNA, 567 bp, Artificial Sequence
  derived and/or modified sequence
atgtctcagtcaaaccgagagctggttgtagacttcctttcctacaaactgagccagaagggatacagctggtcacaatttagcgatgttgaggagaatagaaccgaggcacctgaggggacggagagcgaaatggagactccttccgccatcaatggcaatccttcatggcacctggcggatagcccagccgttaatggagcaacggggcattcatcgtctctggatgcacgagaggtgatcccaatggctgctgtcaaacaagctctacgcgaggcgggcgacgagttcgagctccgctacaggagggcattcagtgacttaactagccagctgcatatcaccccaggcactgcttaccagagttttgaacaagtggtcaatgagctttttagagatggggtgaattggggaagaattgttgccttcttctcgtttgggggtgcactttgcgtggaatccgtggataaggaaatgcaagtactggtgtcccgcattgcggcgtggatggccacctatttgaacgaccatctggagccatggatccaagaaaacggagggtggtag

SEQ ID NO: 321867 - DNA, 567 bp, Artificial Sequence
  derived and/or modified sequence
atgagccagagcaaccgggagctggtggtggacttcctgagctacaagctgagccagaagggctacagctggagccagttcagtgatgtggaggagaacagaacagaggcccctgagggcacagaaagtgagatggagaccccatctgccatcaatggaaaccccagctggcacctggccgacagccctgctgtgaatggagccaccggccacagcagcagcctggatgcccgggaggtgatccccatggctgctgtgaagcaggccctgcgggaggccggagatgaatttgagctgcgctaccgccgggccttcagtgacctgaccagccagctgcacatcaccccaggcacagcctaccagagctttgagcaggtggtgaatgagctgttcagagatggagtgaactggggccgcatcgtggccttcttctcctttggaggagccctgtgtgtggagagcgtggacaaggagatgcaggtgctggtgtccagaattgctgcctggatggccacctacctgaatgaccacctggagccctggatccaggagaatggaggctggtag

SEQ ID NO: 321868 - DNA, 546 bp, Artificial Sequence
  derived and/or modified sequence
atgagccagagcaaccgggagctggtggtggacttcctgagctacaagctgagccagaagggctacagctggagccagttcagtgatgtggaggagaacagaacagaggcccctgagggcacagaaagtgagatggagaccccatctgccatcaatggaaaccccagctggcacctggccgacagccctgctgtgaatggagccaccggccacagcagcagcctggatgcccgggaggtgatccccatggctgctgtgaagcaggccctgcgggaggccggagatgaatttgagctgcgctaccgccgggccttcagtgacctgaccagccagctgcacatcaccccaggcacagcctaccagagctttgagcaggtggtgaatgagctgttcagagatggagtgaactggggccgcatcgtggccttcttctcctttggaggagccctgtgtgtggagagcgtggacaaggagatgcaggtgctggtgtccagaattgctgcctggatggccacctacctgaatgaccacctggagccctggtag

SEQ ID NO: 321869 - DNA, 567 bp, Artificial Sequence
  derived and/or modified sequence
atgagccagagcaaccgggagctggtggtggacttcctgagctacaaattaagccagaagggctacagctggtcacagtttagtgacgtcgaggaaaacaggactgaggcgccagaaggcacagaatctgaaatggagaccccgagcgccataaacggcaacccttcctggcacctcgccgactcccccgccgtgaacggcgcaacggggcattcctctagcttagatgcgcgagaagtaattccaatggcagccgtcaagcaagcactgagagaggcaggtgatgagttcgaactgaggtacaggcgtgcattttccgaccttacatcacaactgcatatcacccctggtaccgcttatcaaagctttgagcaggttgtgaatgagctttttcgtgacggtgtgaactggggaagaatagtggctttcttctcattcgggggagcgctgtgtgtagaaagcgtggacaaggaaatgcaggtcctggtgtctcgcatagccgcttggatggcgacatatttgaatgaccacctcgaaccttggattcaagaaaacggaggctggtag

SEQ ID NO: 321870 - DNA, 567 bp, Artificial Sequence
  derived and/or modified sequence
atgagccagagcaaccgggagctggtggtggacttcctgagctacaagctaagtcagaaagggtacagctggtcccagttttccgatgtcgaggagaatagaactgaggcaccagagggtacagaatccgaaatggaaactcctagcgcgattaacggaaaccctagttggcacttggccgactcaccggctgtgaacggagcgactggccattcttcgagcttggatgccagagaggtaatcccaatggccgccgtgaagcaggcactgagagaggcaggtgatgagttcgagctaagataccgtagagccttttcagaccttacctcgcagctgcacatcacacctggtaccgcctaccaaagtttcgaacaggtggttaatgaactctttcgagatggagtcaattggggcagaatcgtggccttctttagcttcggaggtgccttgtgtgttgagtcggttgataaggagatgcaagttctcgtgagtagaatcgcagcctggatggcaacatatctgaatgaccacctggagccttggattcaagaaaacgggggctggtag

SEQ ID NO: 321871 - DNA, 546 bp, Artificial Sequence
  derived and/or modified sequence
atgagccagagcaaccgggagctggtggtggacttcctgagctacaagctttcccaaaagggctatagctggagtcagttcagcgacgtcgaggagaatagaacggaggcccccgaggggaccgagtcggagatggagaccccatctgccattaatggcaacccttcttggcacttggccgactcgcccgcagtgaatggcgccactgggcactcaagctcgctggatgccagagaagtgattccgatggccgcagtcaaacaagcgctgcgcgaagccggtgacgagtttgagctaaggtataggagggcctttagtgatcttacaagtcagcttcatattactccaggcacagcatatcagtcttttgagcaggtggtgaatgagttgtttagggacggcgtcaactgggggcgaatcgttgcgttctttagcttcggcggtgctctctgcgttgagtctgtcgacaaggagatgcaggtgcttgtgtctcggattgccgcttggatggccacatatctaaatgatcatctggaaccctggtag

SEQ ID NO: 321872 - DNA, 567 bp, Artificial Sequence
  derived and/or modified sequence
atgagccagagcaaccgggagctggtggtggacttcctgagctacaagctcagccagaaaggatattcttggtctcaattttccgatgttgaggaaaatcggaccgaagccccagagggaacagaaagtgaaatggagactccttcagccattaatggaaatccaagttggcacttagcggatagcccagccgtcaatggggcgaccggccactcctccagtttagacgctcgggaagtcattcccatggccgcggtgaaacaggccttgagagaggctggggacgagttcgaactgagataccggagggccttttccgacctgacgagtcagctgcatatcacacccgggacagcctatcagagtttcgaacaggtggtcaacgagcttttccgggatggtgtcaactggggaagaatagtggccttttttagctttgggggtgctttgtgtgtcgagtccgtagataaagagatgcaagtgctggtgtcccgaatcgcggcatggatggccacctaccttaatgaccacctcgaaccatggatccaggagaatggagggtggtag

SEQ ID NO: 321873 - DNA, 567 bp, Artificial Sequence
  derived and/or modified sequence
atgagccagagcaaccgggagctcgtggtagactttctctcttacaagctgagccaaaagggctactcctggtcacagttttctgacgttgaggaaaatcgtaccgaggccccagagggtaccgagagcgagatggagaccccgtcagcgataaatggaaatccctcctggcatctggctgactctcccgcagtcaacggcgctaccggccactcgtcctccctagatgccagagaggtaatcccaatggcagctgtgaagcaggcgctgcgtgaggccggagatgaatttgagctgcggtacaggcgcgcattctccgatctcacctctcaactacatatcactcctggaacggcgtatcagtctttcgagcaggttgtgaatgaactcttcagagacggtgttaattgggggcgaattgtggcattcttttcatttgggggtgcactgtgcgtggaaagcgtggacaaggaaatgcaagtcttggttagcaggattgcagcatggatggccacatatttgaacgaccatctggaaccttggattcaggaaaacgggggatggtag

SEQ ID NO: 321874 - DNA, 567 bp, Artificial Sequence
  derived and/or modified sequence
atgagtcagtccaaccgcgaactcgttgtggactttctgtcttacaagctgagtcagaagggatattcatggtctcagtttagtgatgtggaagagaacagaacagaggcccctgagggcacggagagtgaaatggagacccccagcgcaatcaatgggaaccccagctggcacctggctgactctccggcagtgaatggagccacaggtcattcttcaagcttggacgctagagaggtgatccctatggccgcagtaaagcaggcactgcgggaagccggtgacgaatttgaactccgctaccgtagagccttttcagaccttacgtcacagcttcatataactcctggaaccgcataccaatccttcgaacaggtggtgaatgaactcttccgcgacggcgtaaactggggcagaatagtggcttttttttcctttggcggagccctgtgcgtggaatccgtagacaaggagatgcaagttctggtcagtaggattgctgcctggatggctacctatctcaacgatcatcttgagccgtggatccaggagaatggaggctggtag

SEQ ID NO: 321875 - DNA, 546 bp, Artificial Sequence
  derived and/or modified sequence
atgtcacaaagtaaccgggagctagtagtcgattttctgagctacaaactgtcacaaaagggttatagctggtcccagttcagcgacgtggaggagaatagaacagaggcacctgagggcacagagtccgaaatggagacaccatccgctatcaacgggaacccatcgtggcaccttgccgatagccctgcagtgaatggggctacaggccacagtagcagtctggacgcccgtgaagttatacccatggcggctgtgaagcaggccctcagggaagctggggatgagttcgagctgcggtatagaagagcctttagcgatctcactagccagctccacatcaccccaggcactgcttaccaatcatttgagcaggttgtgaacgaattgttccgggatggtgtgaattgggggcgaattgtggccttctttagttttggtggcgcactgtgtgtagaatcagtggataaggagatgcaagtcctggtctcgcgaatagcagcctggatggcaacatatttgaatgaccatctggaaccctggtag

SEQ ID NO: 321876 - DNA, 567 bp, Artificial Sequence
  derived and/or modified sequence
atgtcccagtctaatcgtgagctggtggtggattttctttcctacaagttgagccaaaagggctattcctggtctcagttttctgacgtcgaggagaatcgcaccgaggccccagagggaaccgagagtgaaatggagactccatctgccatcaacgggaaccctagctggcatcttgccgacagccctgccgtaaacggagccacagggcactcctcctctctggatgctcgagaagtaatcccgatggccgctgtcaagcaggccctgcgagaggccggagacgaatttgagttgcgttatcgacgcgcattttcggatctgacctcacaattacatatcacccctggtactgcttaccagtctttcgagcaggtcgtgaacgagctgttcagagacggtgtgaactggggcagaatcgtggccttctttagcttcggcggtgcactgtgtgtcgaaagtgtggacaaggagatgcaagtcctggtcagtagaatcgccgcttggatggcaacttacctcaacgaccacttggagccatggattcaggaaaatggtggatggtag

SEQ ID NO: 321877 - DNA, 567 bp, Artificial Sequence
  derived and/or modified sequence
atgtcacaatcaaatcgcgaactggtcgtggattttctgagctataaattaagtcagaagggctacagctggtcacaattcagcgacgtagaggaaaataggactgaagcgcccgagggaacggaatcagagatggagactccctccgctattaatgggaacccatcctggcatctggcagacagccccgctgttaacggagcgaccggacatagctctagtttggacgctagagaagtaattcctatggccgcagtcaagcaggccttaagagaagccggagatgagtttgaactgagatatcggcgtgcttttagcgacctgactagccaactgcatatcacacccggcacagcataccaaagctttgaacaggttgtgaatgaactcttcagagatggcgtgaattgggggagaattgtcgccttttttagttttggcggcgccctttgcgtggaatccgtggacaaggaaatgcaggtgctggtgagtagaatcgccgcttggatggccacctacctaaacgaccacctcgagccctggattcaggagaacggcggatggtag

SEQ ID NO: 321878 - DNA, 567 bp, Artificial Sequence
  derived and/or modified sequence
atgtctcagagtaaccgagagcttgttgtggattttttgagctacaaacttagccagaaagggtattcatggtcccagttttcggacgttgaggaaaacaggaccgaagcaccagaagggacggagtcggagatggaaacccccagcgccatcaacggaaatccctcttggcacctggccgacagccccgcggtgaacggcgcaaccggtcatagctcttcccttgatgcccgcgaagtgatcccgatggctgctgtgaaacaggctctgcgggaggccggagatgaattcgaactacgttacaggagggctttctcagatctcacatctcagttgcatatcacacccgggaccgcataccaaagctttgaacaagtagtcaatgagctcttccgcgacggagttaactggggccgcattgtggcctttttttcattcgggggtgcgctgtgcgtggaatcagtggataaggagatgcaggtactcgtttccagaatcgccgcttggatggctacatatctaaatgatcacctagaaccttggatccaggaaaacgggggttggtag

SEQ ID NO: 321879 - DNA, 546 bp, Artificial Sequence
  derived and/or modified sequence
atgagtcagtctaacagagagctcgttgtggatttccttagctacaaactatcccagaaaggctattcttggagccaattcagtgacgtcgaagaaaatcgcactgaggcacccgaaggtactgagtctgagatggagactccttccgccatcaatggtaacccatcttggcacctcgcagacagtcctgcagtcaatggcgccacaggacactcctcttctttagacgctagggaggtcatccccatggcagcagtgaagcaagcactcagggaagcaggtgacgaattcgaacttaggtatcggagggcattcagtgatctgacctcacagctgcatataactcctggcactgcataccagagcttcgagcaggtcgtcaatgaattatttagagacggggttaactggggacggatcgtggctttcttttccttcggaggtgctctctgtgttgaatctgtagacaaggaaatgcaggtccttgtgtctcgcattgctgcctggatggcaacttacctgaacgatcacctggagccatggtag

SEQ ID NO: 321880 - DNA, 567 bp, Artificial Sequence
  derived and/or modified sequence
atgagccagagtaacagagaactggtggtggactttctctcctataagctctcacagaagggctattcctggagtcaatttagcgatgtagaggagaaccgaacagaggcccccgaaggcacagagtccgagatggagaccccttcggcaattaacggtaatccatcttggcatttggctgatagtcctgcagttaatggggcaaccggacacagttcctccttggatgcacgggaggttatacccatggccgccgtaaagcaagccctccgagaggccggcgatgaattcgagctgaggtatagacgagcattcagcgatcttacctcccaactgcacattactccagggactgcatatcagtcatttgaacaggtggttaacgagctattccgcgatggcgtgaactgggggagaattgtcgcttttttttcatttggcggtgctctgtgtgtggaatcagttgacaaagaaatgcaagttctggttagccggatcgccgcgtggatggctacctacttaaacgatcacctcgaaccctggatacaagagaacggaggctggtag

SEQ ID NO: 321881 - DNA, 567 bp, Artificial Sequence
  derived and/or modified sequence
atgagccagagtaatcgggagctggtagttgactttctgtcctacaaactgagtcagaaagggtattcctggtcacaattttctgacgtggaggagaatagaactgaagccccagaaggtaccgagtctgagatggagacaccgagcgctatcaacggcaaccctagctggcacctggcagattcacccgccgtcaacggagctaccggtcatagctctagtttggatgcacgagaggttattcccatggctgccgtgaaacaggccttacgcgaagcaggcgatgagtttgaactgcgctataggagggccttctcggacctgacaagtcaacttcacattactccgggcaccgcttaccagagtttcgaacaggttgttaatgaactattcagagatggagtaaattggggaagaatcgtcgctttcttctcattcgggggggcattgtgtgtggaaagcgtcgacaaagagatgcaggtgctagtctcgagaatcgctgcgtggatggcgacttacctgaatgaccacctggaaccttggatacaagagaacggcggctggtag

SEQ ID NO: 321882 - DNA, 567 bp, Artificial Sequence
  derived and/or modified sequence
atgtcccagtccaatagggagctcgtcgtcgacttcctctcttacaaactgtcccagaaaggatactcctggtctcagttcagcgatgtagaggaaaatagaaccgaggccccagaaggtactgagagtgaaatggagacccccagtgcaattaatggaaatccttcatggcacctggcagattcaccagctgtgaacggagcgacggggcacagttcttctttagacgctcgagaagttattccaatggcagcagttaaacaagcgcttagggaggcaggggacgagttcgagctcaggtacaggagggctttctcagatctcacatctcagttgcatatcacacccgggaccgcataccaaagctttgaacaagtagtcaatgagctcttccgcgacggagttaactggggccgcattgtggcctttttttcattcgggggtgcgctgtgcgtggaatcagtggataaggagatgcaggtactcgtttccagaatcgccgcttggatggctacatatctaaatgatcacctagaaccttggatccaggaaaacgggggttggtag

SEQ ID NO: 321883 - DNA, 546 bp, Artificial Sequence
  derived and/or modified sequence
atgagtcaaagcaatagagaactggtcgtggatttcctgagttataagttatcgcaaaaaggctatagttggtcacaattttcagacgttgaagaaaataggactgaggcccccgagggaacagaaagcgaaatggagactccatccgcaatcaatggaaacccgtcgtggcaccttgccgattcgcctgccgtgaatggggccaccgggcattcatctagcctggacgctagagaagtcatcccaatggctgccgtaaagcaagcattgagggaggccggcgacgaattcgagctaaggtatagaagagcctttagtgaccttacatcacagctgcatatcaccccaggtactgcctaccaatctttcgagcaggtggttaacgaactttttagagacggtgtgaattggggtcggatagtggccttcttttcgtttggaggcgcactctgcgttgagtcagtcgacaaggagatgcaagtcctagtgtctagaattgccgcatggatggctacatacctgaatgatcacctcgaaccatggtag

SEQ ID NO: 321884 - DNA, 567 bp, Artificial Sequence
  derived and/or modified sequence
atgagccagtccaatcgcgaactcgtagtcgatttcctgtcctataagctctcacagaaaggctatagctggagccaattttcggatgtagaagagaatcgaaccgaagcacctgagggcacagagagtgaaatggagactccctcagctatcaatggcaacccttcctggcatttagcagatagccctgccgtgaacggggctaccggccattcaagctcactagatgcaagagaggtgattccaatggccgcggttaaacaggcgctgcgcgaagctggtgacgaatttgagttacgttatagacgagcattcagcgatcttacctcccaactgcacattactccagggactgcatatcagtcatttgaacaggtggttaacgagctattccgcgatggcgtgaactgggggagaattgtcgcttttttttcatttggcggtgctctgtgtgtggaatcagttgacaaagaaatgcaagttctggttagccggatcgccgcgtggatggctacctacttaaacgatcacctcgaaccctggatacaagagaacggaggctggtag

SEQ ID NO: 321885 - DNA, 820 bp, Artificial Sequence
  derived and/or modified sequence
ctttgcgtctcgggctcgcgcgcgttgccgcggcaccggaagtgactgagcttgcaagttcccctgtctcttcaggggaaactgaggccggcttgttcgggagagacggcgcgagcagtcagccagctctttctctcccttcagaatcttatcttggctttggatcttagaagagaatcactaaccagagacgagactcagtgagtgagcaggtgttttggacaatggactggttgagcccatccctattataaaaatgtctcagagcaaccgggagctggtggttgactttctctcctacaagctttcccagaaaggatacagctggagtcagtttagtgatgtggaagagaacaggactgaggccccagaagggactgaatcggagatggagacccccagtgccatcaatggcaacccatcctggcacctggcagacagccccgcggtgaatggagccactggccacagcagcagtttggatgcccgggaggtgatccccatggcagcagtaaagcaagcgctgagggaggcaggcgacgagtttgaactgcggtaccggcgggcattcagtgacctgacatcccagctccacatcaccccagggacagcatatcagagctttgaacaggtagtgaatgaactcttccgggatggggtaaactggggtcgcattgtggcctttttctccttcggcggggcactgtgcgtggaaagcgtagacaaggagatgcaggtattggtgagtcggatcgcagcttggatggccacttacctgaatgaccacctagagccttggatccaggagaacggcggctgg

SEQ ID NO: 321886 - DNA, 1157 bp, Artificial Sequence
  derived and/or modified sequence
gaaaccttgaaccccattgagaagtccctttagggtttcggacgcctccacctcaccctgggctggtgcttaaatagaaaaaagaaaaacaaaaaccaactaaatccataccagccacctccgggagagtactcctggctcccagtaggaggcggagagccaaggggcgtgcaagagagagggggctgggctcccgggtggcaggaggccgcggctgcggagcggccgccctcgatccgggcgatggaggaggaagcaagcgagggggctggttcctgagcttcgcaattcctgtgtcgccttctgggctcccagcctgccgggtcgcatgatccctccggccggagctggtttttttgccagccaccgcgaggccggctgagttaccggcatccccgcagccacctcctctcccgacctgtgatacaaaagatcttccgggggctgcacctgcctgcctttgcctaaggcggatttgaataatcttatcttggctttggatcttagaagagaatcactaaccagagacgagactcagtgagtgagcaggtgttttggacaatggactggttgagcccatccctattataaaaatgtctcagagcaaccgggagctggtggttgactttctctcctacaagctttcccagaaaggatacagctggagtcagtttagtgatgtggaagagaacaggactgaggccccagaagggactgaatcggagatggagacccccagtgccatcaatggcaacccatcctggcacctggcagacagccccgcggtgaatggagccactggccacagcagcagtttggatgcccgggaggtgatccccatggcagcagtaaagcaagcgctgagggaggcaggcgacgagtttgaactgcggtaccggcgggcattcagtgacctgacatcccagctccacatcaccccagggacagcatatcagagctttgaacaggtagtgaatgaactcttccgggatggggtaaactggggtcgcattgtggcctttttctccttcggcggggcactgtgcgtggaaagcgtagacaaggagatgcaggtattggtgagtcggatcgcagcttggatggccacttacctgaatgaccacctagagccttggatccaggagaacggcggctgg

SEQ ID NO: 321887 - DNA, 781 bp, Artificial Sequence
  derived and/or modified sequence
ctttgcgtctcgggctcgcgcgcgttgccgcggcaccggaagtgactgagcttgcaagttcccctgtctcttcaggggaaactgaggccggcttgttcgggagagacggcgcgagcagtcagccagaatcttatcttggctttggatcttagaagagaatcactaaccagagacgagactcagtgagtgagcaggtgttttggacaatggactggttgagcccatccctattataaaaatgtctcagagcaaccgggagctggtggttgactttctctcctacaagctttcccagaaaggatacagctggagtcagtttagtgatgtggaagagaacaggactgaggccccagaagggactgaatcggagatggagacccccagtgccatcaatggcaacccatcctggcacctggcagacagccccgcggtgaatggagccactggccacagcagcagtttggatgcccgggaggtgatccccatggcagcagtaaagcaagcgctgagggaggcaggcgacgagtttgaactgcggtaccggcgggcattcagtgacctgacatcccagctccacatcaccccagggacagcatatcagagctttgaacaggtagtgaatgaactcttccgggatggggtaaactggggtcgcattgtggcctttttctccttcggcggggcactgtgcgtggaaagcgtagacaaggagatgcaggtattggtgagtcggatcgcagcttggatggccacttacctgaatgaccacctagagccttgg

SEQ ID NO: 321888 - DNA, 914 bp, Artificial Sequence
  derived and/or modified sequence
ccggaagtgactgagcttgcaagttcccctgtctcttcaggggaaactgaggccggcttgttcgggagagacggcgcgagcagtcagccaggtaggccggcagccaggtaggccggcccgggtccgcggcgcggaactcggccgcgaagagctcttgcgtctggaagctaccgggccgatgaagggggatgtggccccccacggctcgcggggctcgcagctctttctctcccttcagaatcttatcttggctttggatcttagaagagaatcactaaccagagacgagactcagtgagtgagcaggtgttttggacaatggactggttgagcccatccctattataaaaatgtctcagagcaaccgggagctggtggttgactttctctcctacaagctttcccagaaaggatacagctggagtcagtttagtgatgtggaagagaacaggactgaggccccagaagggactgaatcggagatggagacccccagtgccatcaatggcaacccatcctggcacctggcagacagccccgcggtgaatggagccactggccacagcagcagtttggatgcccgggaggtgatccccatggcagcagtaaagcaagcgctgagggaggcaggcgacgagtttgaactgcggtaccggcgggcattcagtgacctgacatcccagctccacatcaccccagggacagcatatcagagctttgaacaggtagtgaatgaactcttccgggatggggtaaactggggtcgcattgtggcctttttctccttcggcggggcactgtgcgtggaaagcgtagacaaggagatgcaggtattggtgagtcggatcgcagcttggatggccacttacctgaatgaccacctagagccttggatccaggagaacggcggctgg

SEQ ID NO: 321889 - DNA, 567 bp, Artificial Sequence
  derived and/or modified sequence
atgagccagagcaacagagagctggtggtggacttcctgagctacaagctgagccagaagggctacagctggagccagttcagcgacgtggaggagaacagaaccgaggcccccgagggcaccgagagcgagatggagacccccagcgccatcaacggcaaccccagctggcacctggccgacagccccgccgtgaacggcgccaccggccacagcagcagcctggacgccagagaggtgatccccatggccgccgtgaagcaggccctgagagaggccggcgacgagttcgagctgagatacagaagagccttcagcgacctgaccagccagctgcacatcacccccggcaccgcctaccagagcttcgagcaggtggtgaacgagctgttcagagacggcgtgaactggggcagaatcgtggccttcttcagcttcggcggcgccctgtgcgtggagagcgtggacaaggagatgcaggtgctggtgagcagaatcgccgcctggatggccacctacctgaacgaccacctggagccctggatccaggagaacggcggctggtag

SEQ ID NO: 321890 - DNA, 546 bp, Artificial Sequence
  derived and/or modified sequence
atgagccagagcaacagagagctggtggtggacttcctgagctacaagctgagccagaagggctacagctggagccagttcagcgacgtggaggagaacagaaccgaggcccccgagggcaccgagagcgagatggagacccccagcgccatcaacggcaaccccagctggcacctggccgacagccccgccgtgaacggcgccaccggccacagcagcagcctggacgccagagaggtgatccccatggccgccgtgaagcaggccctgagagaggccggcgacgagttcgagctgagatacagaagagccttcagcgacctgaccagccagctgcacatcacccccggcaccgcctaccagagcttcgagcaggtggtgaacgagctgttcagagacggcgtgaactggggcagaatcgtggccttcttcagcttcggcggcgccctgtgcgtggagagcgtggacaaggagatgcaggtgctggtgagcagaatcgccgcctggatggccacctacctgaacgaccacctggagccctggtag

SEQ ID NO: 321891 - RNA, 567 nt, Artificial Sequence
  derived and/or modified sequence
augucacaaucaaaucgcgaacuggucguggauuuucugagcuauaaauuaagucagaagggcuacagcuggucacaauucagcgacguagaggaaaauaggacugaagcgcccgagggaacggaaucagagauggagacucccuccgcuauuaaugggaacccauccuggcaucuggcagacagccccgcuguuaacggagcgaccggacauagcucuaguuuggacgcuagagaaguaauuccuauggccgcagucaagcaggccuuaagagaagccggagaugaguuugaacugagauaucggcgugcuuuuagcgaccugacuagccaacugcauaucacacccggcacagcauaccaaagcuuugaacagguugugaaugaacucuucagagauggcgugaauugggggagaauugucgccuuuuuuaguuuuggcggcgcccuuugcguggaauccguggacaaggaaaugcaggugcuggugaguagaaucgccgcuuggauggccaccuaccuaaacgaccaccucgagcccuggauucaggagaacggcggaugguag

SEQ ID NO: 321892 - RNA, 567 nt, Artificial Sequence
  derived and/or modified sequence
augucucagaguaaccgagagcuuguuguggauuuuuugagcuacaaacuuagccagaaaggguauucauggucccaguuuucggacguugaggaaaacaggaccgaagcaccagaagggacggagucggagauggaaacccccagcgccaucaacggaaaucccucuuggcaccuggccgacagccccgcggugaacggcgcaaccggucauagcucuucccuugaugcccgcgaagugaucccgauggcugcugugaaacaggcucugcgggaggccggagaugaauucgaacuacguuacaggagggcuuucucagaucucacaucucaguugcauaucacacccgggaccgcauaccaaagcuuugaacaaguagucaaugagcucuuccgcgacggaguuaacuggggccgcauuguggccuuuuuuucauucgggggugcgcugugcguggaaucaguggauaaggagaugcagguacucguuuccagaaucgccgcuuggauggcuacauaucuaaaugaucaccuagaaccuuggauccaggaaaacggggguugguag

SEQ ID NO: 321893 - RNA, 546 nt, Artificial Sequence
  derived and/or modified sequence
augagucagucuaacagagagcucguuguggauuuccuuagcuacaaacuaucccagaaaggcuauucuuggagccaauucagugacgucgaagaaaaucgcacugaggcacccgaagguacugagucugagauggagacuccuuccgccaucaaugguaacccaucuuggcaccucgcagacaguccugcagucaauggcgccacaggacacuccucuucuuuagacgcuagggaggucauccccauggcagcagugaagcaagcacucagggaagcaggugacgaauucgaacuuagguaucggagggcauucagugaucugaccucacagcugcauauaacuccuggcacugcauaccagagcuucgagcaggucgucaaugaauuauuuagagacgggguuaacuggggacggaucguggcuuucuuuuccuucggaggugcucucuguguugaaucuguagacaaggaaaugcagguccuugugucucgcauugcugccuggauggcaacuuaccugaacgaucaccuggagccaugguag

SEQ ID NO: 321894 - RNA, 567 nt, Artificial Sequence
  derived and/or modified sequence
augagccagaguaacagagaacuggugguggacuuucucuccuauaagcucucacagaagggcuauuccuggagucaauuuagcgauguagaggagaaccgaacagaggcccccgaaggcacagaguccgagauggagaccccuucggcaauuaacgguaauccaucuuggcauuuggcugauaguccugcaguuaauggggcaaccggacacaguuccuccuuggaugcacgggagguuauacccauggccgccguaaagcaagcccuccgagaggccggcgaugaauucgagcugagguauagacgagcauucagcgaucuuaccucccaacugcacauuacuccagggacugcauaucagucauuugaacaggugguuaacgagcuauuccgcgauggcgugaacugggggagaauugucgcuuuuuuuucauuuggcggugcucuguguguggaaucaguugacaaagaaaugcaaguucugguuagccggaucgccgcguggauggcuaccuacuuaaacgaucaccucgaacccuggauacaagagaacggaggcugguag

SEQ ID NO: 321895 - RNA, 567 nt, Artificial Sequence
  derived and/or modified sequence
augagccagaguaaucgggagcugguaguugacuuucuguccuacaaacugagucagaaaggguauuccuggucacaauuuucugacguggaggagaauagaacugaagccccagaagguaccgagucugagauggagacaccgagcgcuaucaacggcaacccuagcuggcaccuggcagauucacccgccgucaacggagcuaccggucauagcucuaguuuggaugcacgagagguuauucccauggcugccgugaaacaggccuuacgcgaagcaggcgaugaguuugaacugcgcuauaggagggccuucucggaccugacaagucaacuucacauuacuccgggcaccgcuuaccagaguuucgaacagguuguuaaugaacuauucagagauggaguaaauuggggaagaaucgucgcuuucuucucauucgggggggcauuguguguggaaagcgucgacaaagagaugcaggugcuagucucgagaaucgcugcguggauggcgacuuaccugaaugaccaccuggaaccuuggauacaagagaacggcggcugguag

SEQ ID NO: 321896 - RNA, 567 nt, Artificial Sequence
  derived and/or modified sequence
augucccaguccaauagggagcucgucgucgacuuccucucuuacaaacugucccagaaaggauacuccuggucucaguucagcgauguagaggaaaauagaaccgaggccccagaagguacugagagugaaauggagacccccagugcaauuaauggaaauccuucauggcaccuggcagauucaccagcugugaacggagcgacggggcacaguucuucuuuagacgcucgagaaguuauuccaauggcagcaguuaaacaagcgcuuagggaggcaggggacgaguucgagcucagguacaggagggcuuucucagaucucacaucucaguugcauaucacacccgggaccgcauaccaaagcuuugaacaaguagucaaugagcucuuccgcgacggaguuaacuggggccgcauuguggccuuuuuuucauucgggggugcgcugugcguggaaucaguggauaaggagaugcagguacucguuuccagaaucgccgcuuggauggcuacauaucuaaaugaucaccuagaaccuuggauccaggaaaacggggguugguag

SEQ ID NO: 321897 - RNA, 546 nt, Artificial Sequence
  derived and/or modified sequence
augagucaaagcaauagagaacuggucguggauuuccugaguuauaaguuaucgcaaaaaggcuauaguuggucacaauuuucagacguugaagaaaauaggacugaggcccccgagggaacagaaagcgaaauggagacuccauccgcaaucaauggaaacccgucguggcaccuugccgauucgccugccgugaauggggccaccgggcauucaucuagccuggacgcuagagaagucaucccaauggcugccguaaagcaagcauugagggaggccggcgacgaauucgagcuaagguauagaagagccuuuagugaccuuacaucacagcugcauaucaccccagguacugccuaccaaucuuucgagcaggugguuaacgaacuuuuuagagacggugugaauuggggucggauaguggccuucuuuucguuuggaggcgcacucugcguugagucagucgacaaggagaugcaaguccuagugucuagaauugccgcauggauggcuacauaccugaaugaucaccucgaaccaugguag

SEQ ID NO: 321898 - RNA, 567 nt, Artificial Sequence
  derived and/or modified sequence
augagccaguccaaucgcgaacucguagucgauuuccuguccuauaagcucucacagaaaggcuauagcuggagccaauuuucggauguagaagagaaucgaaccgaagcaccugagggcacagagagugaaauggagacucccucagcuaucaauggcaacccuuccuggcauuuagcagauagcccugccgugaacggggcuaccggccauucaagcucacuagaugcaagagaggugauuccaauggccgcgguuaaacaggcgcugcgcgaagcuggugacgaauuugaguuacguuauagacgagcauucagcgaucuuaccucccaacugcacauuacuccagggacugcauaucagucauuugaacaggugguuaacgagcuauuccgcgauggcgugaacugggggagaauugucgcuuuuuuuucauuuggcggugcucuguguguggaaucaguugacaaagaaaugcaaguucugguuagccggaucgccgcguggauggcuaccuacuuaaacgaucaccucgaacccuggauacaagagaacggaggcugguag

SEQ ID NO: 321899 - protein, 852 aa, Artificial Sequence
  derived and/or modified sequence
MAMRSGRHPSLLLLLVLLLWLLQVSIIDSVQQETDDLTKQTKEKIYQPLRRSKRRWVITTLELEEEDPGPFPKLIGELFNNMSYNMSLMYLISGPGVDEYPEIGLFSLEDHENGRIYVHRPVDREMTPSFTVYFDVVERSTGKIVDTSLIFNIRISDVNDHAPQFPEKEFNITVQENQSAGQPIFQMLAVDLDEENTPNSQVLYFLISQTPLLKESGFRVDRLSGEIRLSGCLDYETAPQFTLLIRARDCGEPSLSSTTTVHVDVQEGNNHRPAFTQENYKVQIPEGRASQGVLRLLVQDRDSPFTSAWRAKFNILHGNEEGHFDISTDPETNEGILNVIKPLDYETRPAQSLIIVVENEERLVFCERGKLQPPRKAAASATVSVQVTDANDPPAFHPQSFIVNKEEGARPGTLLGTFNAMDPDSQIRYELVHDPANWVSVDKNSGVVITVEPIDRESPHVNNSFYVIIIHAVDDGFPPQTATGTLMLFLSDINDNVPTLRPRSRYMEVCESAVHEPLHIEAEDPDLEPFSDPFTFELDNTWGNAEDTWKLGRNWGQSVELLTLRSLPRGNYLVPLFIGDKQGLSQKQTVHVRICPCASGLTCVELADAEVGLHVGALFPVCAAFVALAVALLFLLRCYFVLEPKRHGCSVSNDEGHQTLVMYNAESKGTSAQTWSDVEGQRPALLICTAAAGPTQGVKAYPDATMHRQLLAPVEGRMAETLNQSKERNRFSLSRGCIIPQGRATAGRGLPQDIYKEMMPRRLTQTGKRKHGALARTPSFKKVVYDHKEDEENKAGRKQRSHLFKVMQLRNEQGGVRVQSAHSPSPLNKKACFPGDYRGESAGGHNCRAVSG

SEQ ID NO: 321900 - protein, 444 aa, Artificial Sequence
  derived and/or modified sequence
  misc_feature (1)..(1): Xaa can be any naturally occurring amino acid
XRPGTLLGTFNAMDPDSQIRYELVHDPANWVSVDKNSGVVITVEPIDRESPHVNNSFYVIIIHAVDDGFPPQTATGTLMLFLSDINDNVPTLRPRSRYMEVCESAVHEPLHIEAEDPDLEPFSDPFTFELDNTWGNAEDTWKLGRNWGQSVELLTLRSLPRGNYLVPLFIGDKQGLSQKQTVHVRICPCASGLTCVELADAEVGLHVGALFPVCAAFVALAVALLFLLRCYFVLEPKRHGCSVSNDEGHQTLVMYNAESKGTSAQTWSDVEGQRPALLICTAAAGPTQGVKAYPDATMHRQLLAPVEGRMAETLNQSKERNRFSLSRGCIIPQGRATAGRGLPQDIYKEMMPRRLTQTGKRKHGALARTPSFKKVVYDHKEDEENKAGRKQRSHLFKVMQLRNEQGGVRVQSAHSPSPLNKKACFPGDYRGESAGGHNCRAVSG

SEQ ID NO: 321901 - DNA, 2559 bp, Artificial Sequence
  derived and/or modified sequence
atggccatgagaagcggcagacaccccagcctgctgctgctgctggtgctgctgctgtggctgctgcaggtgagcatcatcgacagcgtgcagcaggagaccgacgacctgaccaagcagaccaaggagaagatctaccagcccctgagaagaagcaagagaagatgggtgatcaccaccctggagctggaggaggaggaccccggccccttccccaagctgatcggcgagctgttcaacaacatgagctacaacatgagcctgatgtacctgatcagcggccccggcgtggacgagtaccccgagatcggcctgttcagcctggaggaccacgagaacggcagaatctacgtgcacagacccgtggacagagagatgacccccagcttcaccgtgtacttcgacgtggtggagagaagcaccggcaagatcgtggacaccagcctgatcttcaacatcagaatcagcgacgtgaacgaccacgccccccagttccccgagaaggagttcaacatcaccgtgcaggagaaccagagcgccggccagcccatcttccagatgctggccgtggacctggacgaggagaacacccccaacagccaggtgctgtacttcctgatcagccagacccccctgctgaaggagagcggcttcagagtggacagactgagcggcgagatcagactgagcggctgcctggactacgagaccgccccccagttcaccctgctgatcagagccagagactgcggcgagcccagcctgagcagcaccaccaccgtgcacgtggacgtgcaggagggcaacaaccacagacccgccttcacccaggagaactacaaggtgcagatccccgagggcagagccagccagggcgtgctgagactgctggtgcaggacagagacagccccttcaccagcgcctggagagccaagttcaacatcctgcacggcaacgaggagggccacttcgacatcagcaccgaccccgagaccaacgagggcatcctgaacgtgatcaagcccctggactacgagaccagacccgcccagagcctgatcatcgtggtggagaacgaggagagactggtgttctgcgagagaggcaagctgcagccccccagaaaggccgccgccagcgccaccgtgagcgtgcaggtgaccgacgccaacgacccccccgccttccacccccagagcttcatcgtgaacaaggaggagggcgccagacccggcaccctgctgggcaccttcaacgccatggaccccgacagccagatcagatacgagctggtgcacgaccccgccaactgggtgagcgtggacaagaacagcggcgtggtgatcaccgtggagcccatcgacagagagagcccccacgtgaacaacagcttctacgtgatcatcatccacgccgtggacgacggcttccccccccagaccgccaccggcaccctgatgctgttcctgagcgacatcaacgacaacgtgcccaccctgagacccagaagcagatacatggaggtgtgcgagagcgccgtgcacgagcccctgcacatcgaggccgaggaccccgacctggagcccttcagcgaccccttcaccttcgagctggacaacacctggggcaacgccgaggacacctggaagctgggcagaaactggggccagagcgtggagctgctgaccctgagaagcctgcccagaggcaactacctggtgcccctgttcatcggcgacaagcagggcctgagccagaagcagaccgtgcacgtgagaatctgcccctgcgccagcggcctgacctgcgtggagctggccgacgccgaggtgggcctgcacgtgggcgccctgttccccgtgtgcgccgccttcgtggccctggccgtggccctgctgttcctgctgagatgctacttcgtgctggagcccaagagacacggctgcagcgtgagcaacgacgagggccaccagaccctggtgatgtacaacgccgagagcaagggcaccagcgcccagacctggagcgacgtggagggccagagacccgccctgctgatctgcaccgccgccgccggccccacccagggcgtgaaggcctaccccgacgccaccatgcacagacagctgctggcccccgtggagggcagaatggccgagaccctgaaccagagcaaggagagaaacagattcagcctgagcagaggctgcatcatcccccagggcagagccaccgccggcagaggcctgccccaggacatctacaaggagatgatgcccagaagactgacccagaccggcaagagaaagcacggcgccctggccagaacccccagcttcaagaaggtggtgtacgaccacaaggaggacgaggagaacaaggccggcagaaagcagagaagccacctgttcaaggtgatgcagctgagaaacgagcagggcggcgtgagagtgcagagcgcccacagccccagccccctgaacaagaaggcctgcttccccggcgactacagaggcgagagcgccggcggccacaactgcagagccgtgagcggctag

SEQ ID NO: 321902 - DNA, 2559 bp, Artificial Sequence
  derived and/or modified sequence
atggccatgcgatccggacgtcaccctagtttgctgctgctgctcgtgttgctcctatggctcttacaagtgtctatcattgactcagtgcagcaggagactgacgaccttaccaagcagaccaaggaaaagatctatcagcccctcaggagatccaagaggagatgggtgattaccaccctcgaactggaagaggaagaccccggacccttcccaaagctcatcggcgagctttttaataatatgagctacaatatgtcccttatgtatctgattagcgggcctggtgtggatgagtaccctgaaattggtcttttttctctggaggaccacgaaaacgggaggatctatgtccacaggccggtggacagggagatgaccccatcattcactgtttattttgatgtcgttgagcggtcaaccggaaagattgtggacacgagcctaatcttcaacatacgaatcagtgatgttaacgaccacgcaccccagttccccgagaaagaatttaacattacagttcaggagaaccagagcgccggccagccgatttttcagatgctcgccgtagatttggatgaggaaaacacccccaactctcaggtcttgtattttcttatttcacagacgccactgctcaaagagagtgggtttcgtgtggaccgcctttccggtgaaattaggctgtcagggtgcctggactatgagacagctccccaatttacgctactgatccgcgcaagagattgtggtgaacccagtctgtcgtcaaccactactgtccacgtggacgtgcaggagggcaataatcacagacctgccttcacccaggagaactataaagtccagatccctgaaggccgggcttctcagggcgtgttacgactcttggttcaagatcgcgactctccgtttacatcagcgtggagggctaagtttaacattctgcatggaaacgaagaaggccacttcgacatctctaccgaccctgagactaatgaaggaattctcaacgttattaagccactggactatgagacccgcccggcccagagcctcataatcgtcgttgaaaatgaagagcgactcgtgttctgcgaacgcggaaagcttcagccacctaggaaagcagcagcttccgccaccgtgtctgtccaagtcaccgatgccaacgatccccctgccttccatccgcagagctttatagttaacaaagaagagggtgcccgcccgggtaccttactgggtacatttaatgccatggatcccgacagccagattcgatatgaacttgtgcatgacccggctaattgggtctcagtggacaagaattccggcgtggtcatcactgtcgaacctatagaccgcgaaagcccgcacgtgaacaacagtttctacgtgatcatcatccacgcagtggacgatgggttcccgcctcagacagccacagggacgctgatgctgttcctatctgatatcaacgacaacgtgcccacactcagaccccgcagtaggtacatggaggtttgtgagagtgccgtgcacgagccactccatatcgaagcggaggatccagacctggagccattctccgaccccttcactttcgagcttgataacacttgggggaatgcggaagacacatggaagctggggcggaactggggccagtctgtggagcttctgactctacgttcattgcctcgcgggaattatctcgttcctttgttcatcggagataaacagggtctcagccagaagcaaacagtgcacgtcaggatctgcccctgtgcgtcgggcctgacatgcgtggaactggcagatgcagaagtgggcctgcacgtcggagcattgtttcccgtgtgcgcagccttcgtggcactggcagtcgccctgctgtttctgttacggtgctacttcgtcctggagccgaaacgccatgggtgttccgtgagcaacgatgagggacaccagaccctcgtcatgtataacgccgagagcaagggtacctctgctcagacttggagcgatgtggagggacagagacccgctctgctaatctgtaccgcagcggctgggccaactcaaggagtaaaagcatatccagacgcgactatgcatcgccagctcttagccccagttgagggaaggatggccgaaacgctgaatcaatctaaggagagaaataggttctcactgagccgcggctgtataattcctcaaggtagagctaccgctggcaggggtctgcctcaagacatttacaaagagatgatgcctaggaggttgacccagacgggaaaacgcaaacatggggccctcgcaagaacccccagcttcaaaaaagtggtgtacgatcataaagaggacgaggaaaacaaggccggacgcaaacagcggagtcatctgtttaaagtcatgcaactccggaacgagcaggggggtgttcgggtccagtctgctcatagtccatccccactcaataaaaaggcttgtttccctggcgattaccgaggcgagtcggccggaggccacaactgtcgtgctgtctccgggtag

SEQ ID NO: 321903 - DNA, 2559 bp, Artificial Sequence
  derived and/or modified sequence
atggccatgaggagcggccgccaccccagcctgctgctgctgctggtgctgctgctgtggctgctgcaggtgtccatcattgattctgtgcagcaggagacagatgacctgaccaagcagaccaaggagaagatctaccagcccctgcggcgcagcaagaggcgctgggtgatcaccaccctggagctggaggaggaggaccccggccccttccccaagctgattggagagctgttcaacaacatgagctacaacatgagcctgatgtacctgatcagcggccctggggtggatgagtacccagaaattggcctcttcagcctggaggaccatgaaaatggccgcatctacgtgcacaggcctgtggaccgggagatgacccccagcttcaccgtgtactttgatgtggtggagaggagcacaggcaagatcgtggacaccagcctcatcttcaacatccgcatcagtgatgtgaatgaccacgccccccagtttcctgagaaggagttcaacatcaccgtgcaggagaaccagagcgctggccagcccatcttccagatgctggccgtggacctggatgaggagaacacccccaacagccaggtgctgtacttcctgatcagccagacccccctgctgaaggagagcggcttccgggtggaccggctgagcggggagatccggctgagcggctgcctggactatgaaacagccccccagttcaccctgctgatccgggcccgggactgtggggagcccagcctgagcagcaccaccaccgtgcacgtggatgtgcaggagggcaacaaccacaggcctgccttcacccaggagaactacaaggtgcagatccctgagggccgggccagccagggcgtgctgcggctgctggtgcaggaccgggacagccccttcaccagcgcctggagggccaagttcaacatcctgcatggaaatgaggagggccactttgacatcagcacagatcctgagaccaatgaaggcatcctgaatgtcatcaagcccctggactatgagaccaggcctgcccagagcctcatcatcgtggtggagaatgaggagcggctggtgttctgtgagcggggcaagctgcagccccccaggaaggccgccgccagcgccaccgtgtctgtgcaggtgacagatgccaatgaccccccagccttccacccccagagcttcatcgtgaacaaggaggagggcgcccggcccggcaccctgctgggcaccttcaatgccatggaccctgacagccagatccgctatgagctggtgcatgaccctgccaactgggtgtctgtggacaagaacagcggcgtggtgatcaccgtggagcccatcgaccgggagagcccccacgtgaacaacagcttctacgtgatcatcatccatgctgtggatgatggcttccccccccagacagccaccggcaccctgatgctgttcctgagtgacatcaatgacaacgtgcccaccctgcggcccaggagccgctacatggaggtgtgtgagagcgctgtgcatgagcccctgcacatcgaggctgaagatcctgacctggagcccttcagtgaccccttcacctttgagctggacaacacctggggcaatgctgaggacacctggaagctgggcaggaactggggccagagcgtggagctgctgaccctgcggagcctgccccggggcaactacctggtgcccctcttcatcggggacaagcagggcctgagccagaagcagacagtgcacgtgcgcatctgcccctgtgccagcggcctgacctgtgtggagctggctgatgctgaggtgggcctgcacgtgggcgccctcttccctgtgtgtgccgcctttgtggccctggccgtggccctgctcttcctgctgcgctgctactttgtgctggagcccaagagacatggctgcagcgtgtccaatgatgagggccaccagaccctggtgatgtacaatgctgagagcaagggcaccagcgcccagacctggagcgatgtggagggccagaggcctgccctgctgatctgcacagctgctgctggccccacccagggcgtgaaggcctacccagatgccaccatgcaccggcagctgctggcccctgtggagggccgcatggccgagaccctgaaccagagcaaggagaggaaccgcttcagcctgagccggggctgcatcatcccccagggccgggccacagctggccggggcctgccccaggacatctacaaggagatgatgccccggcggctgacccagacaggcaagaggaagcatggagccctggcccggacccccagcttcaagaaggtggtgtatgaccacaaggaggatgaggagaacaaggccggcaggaagcagaggagccacctgttcaaggtgatgcagctgagaaatgagcagggcggcgtgcgggtgcagagcgcccacagccccagccccctgaacaagaaggcctgcttccctggggactacagaggagagagcgctgggggccacaactgcagagctgtgtctggatag

SEQ ID NO: 321904 - DNA, 2559 bp, Artificial Sequence
  derived and/or modified sequence
atggccatgcggagcggccggcaccccagcctgctgctgctgctggtgctccttctttggctcttacaggtgtccataattgattccgtccagcaggagaccgatgacctgactaagcagaccaaggagaagatctatcagcctctgaggagatctaaacgaaggtgggtcattaccaccttggagctcgaagaggaggatcctgggccattccccaaacttatcggtgaactgttcaacaatatgagttacaacatgagcctaatgtatctgatctccggcccaggcgtcgacgagtaccccgagatcggactgttttcgctagaagaccacgaaaatggccgcatctacgtccatcgtccagttgatagagagatgacgccttcttttacagtgtacttcgacgtggttgagcgatcaacagggaaaatcgtcgacacctccttgatattcaatataaggatcagcgacgtaaatgaccatgcccctcagtttcccgagaaagagtttaatatcacagtacaggaaaaccagtctgccggacaacctatctttcaaatgctggccgtggatctggacgaggagaacacacccaattcgcaggtgctgtacttcctgatttctcaaactccattgctaaaagagagtgggttccgggtggaccgactgagtggggaaatccggctcagcggttgccttgattacgagaccgctccccaatttaccctgctgattcgggcccgtgattgcggggagcccagtctctcctccaccaccaccgtgcacgtggatgtacaggaagggaataaccatagacccgccttcacccaggagaactacaaggtccaaatccccgaaggccgtgccagtcagggcgtcctccggcttctagtgcaagatcgcgatagcccattcacgagtgcgtggagggccaagttcaacatcctacacgggaacgaggaagggcattttgacatcagcacagaccccgagaccaacgaggggatcctcaacgtgattaagcccctggactatgagacgcgacctgctcagagtctgatcatcgtggtcgaaaacgaggaacggcttgtattttgtgagcgcggcaaactgcagcccccccggaaagctgcggcttctgccaccgtgtctgtgcaggtgacagacgccaacgatcccccggccttccacccccagtcttttatcgtcaacaaggaggagggggccagaccgggcaccctgctggggacctttaacgccatggatccggactctcaaatccgctatgaactggtgcatgacccggcgaattgggtgtcagtcgacaaaaacagcggagtcgtgataaccgtcgaacctattgatcgcgagagtccacatgttaacaattccttctatgttatcattatccatgccgtggatgatggattccctcctcagaccgccacggggaccctgatgctcttcctctccgatataaatgataatgtgccaaccttaaggcctaggagcagatatatggaggtgtgcgagtccgccgttcacgaacctctccacatagaggctgaggaccctgacctagagccattcagcgatcctttcacattcgagcttgacaacacctggggcaatgctgaggacacctggaagttgggacgtaactgggggcagagcgtcgaactgttgaccctgagatccttacctcgcggcaattacttagttccgttattcattggggacaaacagggcctgagtcagaaacagacggtccacgtgcggatttgtccatgtgcatccggccttacatgtgtagagcttgccgacgccgaggtgggactgcatgtcggagcccttttcccggtatgcgcggcctttgttgctctggccgtggccctcctgtttctgctgcgatgctacttcgtgctcgagccaaaacgccatgggtgctcggtgagcaatgatgagggccatcaaactcttgtcatgtacaacgccgagtccaaagggacatcagcacagacttggagtgacgtagagggtcagcggcccgcactccttatttgcacggcagccgccggcccaacacaaggcgtcaaagcttaccctgacgctaccatgcaccgtcagctccttgcccccgtggaaggaagaatggctgaaacactcaatcagagtaaagagagaaataggttcagtttgtcaaggggatgtatcattccacaggggcgtgcaacagctggccggggccttccccaagacatctataaagagatgatgcccagaagactgacgcaaaccggtaaaaggaagcacggagccctcgccagaaccccaagtttcaaaaaggtcgtatacgaccataaggaggacgaggaaaacaaagctgggagaaagcagcgttcccacctttttaaagtcatgcaacttaggaacgaacaaggcggagtgcgggtacagagtgcacatagtcctagcccactcaacaagaaagcctgcttccccggggactatcggggcgagagtgctgggggtcacaattgccgtgctgtgagcggatag

SEQ ID NO: 321905 - DNA, 2559 bp, Artificial Sequence
  derived and/or modified sequence
atggctatgcggagtgggaggcacccatccctactcctgttactagtgctgcttctgtggttgcttcaagtcagtattattgattccgtacagcaggagaccgatgacctcactaagcagacaaaggaaaaaatctatcagcccctgcggagaagtaagcgccgatgggtaattacgacactggaattagaagaggaggatccgggtcctttcccgaaactaattggcgaactgttcaacaacatgtcatataacatgtcactgatgtacctcatctccggtccaggcgttgacgagtacccggagattggtctgttctcgcttgaagaccacgagaatggcagaatttatgtacatcgtcccgttgacagagaaatgacgccatcgttcactgtctacttcgatgttgttgagagaagtaccggcaaaattgttgacacctctctaatattcaacatcaggatatcggacgttaatgatcacgcaccccagtttcccgagaaagaattcaacatcaccgtgcaggagaaccagagcgctggtcagccaatctttcagatgcttgctgtggacctggatgaggaaaatactccaaattcacaggtcctttatttcctgatcagccaaacaccccttttgaaggaatccggatttagggtcgatcggctttcgggcgagatccggctgtcgggttgcctcgactatgaaaccgctccccagttcactctgctgatcagagcacgagattgcggcgagccttcactgtcctcaacgaccacagtgcatgtggacgtgcaggagggtaataatcaccgacctgcctttacccaggagaattataaggtgcagattcctgagggcagagcgtcacagggcgtgttgcgtctgctggttcaggacagagatagtccatttacaagtgcatggcgcgctaagtttaacatcctccatgggaacgaagagggccacttcgatatttcaaccgacccagaaacaaatgagggtatcctgaacgtgataaaacccctggattacgagacaagacctgcacaatcgctgataattgtagtggagaacgaagaacgcttggtgttttgcgagagggggaagctgcaacccccacgaaaggcggcagcctccgctactgtgtccgtccaggtcacagacgcaaatgacccacctgcctttcacccccagtcctttattgtgaacaaggaagagggcgctcgcccaggcaccctcctgggcacttttaacgccatggatcccgatagccaaatccgatatgagctggtgcacgaccctgcaaactgggtgtctgtcgacaagaactctggcgtggtgataactgttgagccaattgatagagaaagcccgcatgtgaataattcgttctatgtaataataattcatgccgtggacgatgggttccccccacaaacggcaaccgggacgctcatgctgtttttatcagacatcaacgacaacgttccgacgttgcgacccagaagcaggtacatggaggtgtgcgaatctgctgtgcacgagcctttgcacattgaggccgaggatcccgacctggaacctttctcggaccctttcaccttcgagctggacaatacatggggcaacgccgaggacacatggaaacttggcaggaactggggacaatccgtggagctcttgaccctgcgtagcctccccagagggaactacctggtcccactgttcattggagacaaacaaggcttgtctcagaaacagaccgtgcatgttcgcatctgcccctgcgcatccggtctgacctgtgtggaattggctgatgcagaggtcgggctgcatgtcggggctttgtttccagtttgcgcggctttcgtcgccctggccgtcgcgctcttgttcctgttacgctgctatttcgtcctcgaacccaaaagacatggatgctcagttagtaatgacgagggccatcagacactcgtgatgtataatgccgaatctaaaggaacatccgcgcagacatggagcgacgtggagggccagcgtcctgccctacttatttgtacagccgcagccggaccaacacaaggggttaaagcttaccctgacgcaacaatgcacagacagctcctagctcccgtggaaggtaggatggcagaaacactaaatcagagtaaagaaagaaaccgcttttccctctcacggggttgcatcatcccccaggggagagcgaccgccggtagaggactgcctcaggacatctataaagagatgatgcctcggaggctgacccagaccggaaagagaaaacatggtgccctagctaggaccccaagttttaagaaggtagtgtacgaccataaggaggacgaagaaaataaggccggacggaagcaacggtctcacttgtttaaagttatgcagctgagaaatgaacagggaggagtacgtgtacagagtgctcactcaccatcgccactgaacaagaaagcctgttttccgggagactatagaggggagagcgcgggaggacacaactgccgtgctgtcagcggttag

SEQ ID NO: 321906 - DNA, 2870 bp, Artificial Sequence
  derived and/or modified sequence
agaccccagccagtcttttgtgtacgtgcaggaccatggtggctttagtttctaccccacccttcctaggaactctacttgtggcaaacgtatgttcaagcttacaagtcagcccaccccactctgataaatgcaagaaaagctgaaaagggaggagcaagatgggatgaaagcatctgggccaaagtgacctgaaaacctttagagaagaagctgctggctgagaaggaggtgtgtggctccggtgagaccaccagcttggaggactggtcatcagctgcacgttctgggtctgtcttgggtattcccatatggccatgagatccgggaggcacccctcgctgctgctgcttctagtgctgctgctgtggctgctgcaggtcagtatcattgacagtgttcaacaggaaacagatgatcttactaagcaaacaaaggaaaagatctaccagcctctacggcgatccaagagaagatgggttatcaccaccttggagctggaggaggaagacccgggaccctttcccaaactcattggtgagctgttcaataatatgtcttataacatgtcactaatgtatctaatcagtggacctggtgtggatgaatatccagagattggtttgttttctctagaagatcatgagaacggaaggatatatgttcaccgccctgtcgatcgagaaatgacaccatctttcacggtttattttgatgttgtggagcgctcaacaggaaaaattgtggatacatccttgattttcaacattaggatcagtgatgtgaatgatcatgcaccccagtttccagagaaggaatttaacatcactgtgcaagaaaaccaatctgcagggcaacctatttttcagatgttagcagtcgatttggatgaagaaaacactccaaattctcaagtcctttacttcctcatttctcaaacaccattactgaaagaaagtggtttccgggttgatcgccttagtggagaaatacgactctctggctgcttagattatgagaccgctcctcagtttacactgctaatcagagccagggactgtggagaaccgtcactgtcatccacgaccaccgttcacgtggatgtgcaagaaggcaacaaccacaggcctgcatttacccaggagaactataaggttcagattcctgaaggccgagccagccagggcgtgttgcgtctcctggttcaagatcgagattctccatttacatcagcttggagagcaaaattcaacatattgcatggcaatgaagaggggcattttgacatttcgactgaccctgagaccaacgaagggatattaaatgttatcaagcctttggattatgagactcgcccagcgcaaagcctcatcattgtcgtggagaatgaggagaggctcgtcttctgtgagagaggaaagcttcagccgccaaggaaggcagcagccagcgccactgtgagtgtgcaggtgacagacgccaacgacccaccagcctttcacccccagagcttcattgtcaataaagaggagggcgccaggcctgggaccctgttgggaacttttaatgccatggatccagacagccagataagatatgaactggttcatgacccagcaaattgggtcagcgtcgacaaaaactccggagtggtcatcaccgtggagccaattgaccgagaatcccctcatgtaaataacagtttttatgtaatcatcattcacgctgttgatgatggcttcccaccgcagactgctacagggaccctaatgctcttcctgtctgacatcaatgacaacgtcccgactctccggccacgttcccgctacatggaggtctgtgagtctgctgtgcatgagcccctccacatcgaggcagaggatccggacctggagccgttctctgacccatttacatttgaattggacaatacctggggaaatgcggaggacacatggaagttggggagaaattggggtcaatcagttgaacttttaaccttgagaagcctgccacgtggtaattacttggtgccactcttcattggagacaaacagggactttcccagaagcaaactgtccatgtaaggatctgcccctgtgccagtgggctcacatgtgtggagcttgcagatgcagaagtggggcttcatgtgggggccctgttccctgtctgtgcagcatttgtggctctggcagtggctctgctttttctgttgcgatgctattttgtgcttgaacctaagaggcatggatgctctgtatccaatgatgaaggccaccaaacactggtcatgtataatgcggagagcaaaggcacttcagcccagacatggtcagatgttgaaggccagaggccggctctgctcatctgcacagctgcagcaggacccacgcagggagttaaggcttacccagatgccacaatgcacagacaactcctggctccggtggaaggaaggatggcagagacattgaatcagtctaaagagagaaatcgcttcagcctcagcaggggctgcatcatcccccagggaagagccacagctgggcgaggattgccacaagacatttacaaggagatgatgccacggagactaacgcagactggtaaacggaaacacggggctttggctcgaacaccctctttcaagaaagttgtttatgaccacaaggaagatgaggagaacaaggctgggagaaagcaaaggagccacttgtttaaggttatgcagctgagaaatgaacaaggtggggttcgagtccagagtgcgcattccccatcaccccttaacaaaaaggcatgtttcccaggagactacagaggagaatcggcaggtggtcacaattgcagggctgtctcaggctga

SEQ ID NO: 321907 - DNA, 1335 bp, Artificial Sequence
  derived and/or modified sequence
tgaagacccggcaccctgctgggcaccttcaacgccatggaccccgacagccagatcagatacgagctggtgcacgaccccgccaactgggtgagcgtggacaagaacagcggcgtggtgatcaccgtggagcccatcgacagagagagcccccacgtgaacaacagcttctacgtgatcatcatccacgccgtggacgacggcttccccccccagaccgccaccggcaccctgatgctgttcctgagcgacatcaacgacaacgtgcccaccctgagacccagaagcagatacatggaggtgtgcgagagcgccgtgcacgagcccctgcacatcgaggccgaggaccccgacctggagcccttcagcgaccccttcaccttcgagctggacaacacctggggcaacgccgaggacacctggaagctgggcagaaactggggccagagcgtggagctgctgaccctgagaagcctgcccagaggcaactacctggtgcccctgttcatcggcgacaagcagggcctgagccagaagcagaccgtgcacgtgagaatctgcccctgcgccagcggcctgacctgcgtggagctggccgacgccgaggtgggcctgcacgtgggcgccctgttccccgtgtgcgccgccttcgtggccctggccgtggccctgctgttcctgctgagatgctacttcgtgctggagcccaagagacacggctgcagcgtgagcaacgacgagggccaccagaccctggtgatgtacaacgccgagagcaagggcaccagcgcccagacctggagcgacgtggagggccagagacccgccctgctgatctgcaccgccgccgccggccccacccagggcgtgaaggcctaccccgacgccaccatgcacagacagctgctggcccccgtggagggcagaatggccgagaccctgaaccagagcaaggagagaaacagattcagcctgagcagaggctgcatcatcccccagggcagagccaccgccggcagaggcctgccccaggacatctacaaggagatgatgcccagaagactgacccagaccggcaagagaaagcacggcgccctggccagaacccccagcttcaagaaggtggtgtacgaccacaaggaggacgaggagaacaaggccggcagaaagcagagaagccacctgttcaaggtgatgcagctgagaaacgagcagggcggcgtgagagtgcagagcgcccacagccccagccccctgaacaagaaggcctgcttccccggcgactacagaggcgagagcgccggcggccacaactgcagagccgtgagcggctag

SEQ ID NO: 321908 - DNA, 1335 bp, Artificial Sequence
  derived and/or modified sequence
tagcgcccgggcacgctgctagggacatttaacgctatggaccccgactctcagatccgatacgagcttgtccatgaccctgccaattgggtctctgttgataaaaactcaggggttgtgatcacagtggaaccaattgacagggaaagtccacacgtgaataacagcttctacgtgattatcattcatgccgtggatgatggcttccctccacagaccgctacaggcacccttatgctattcctgagcgacattaatgacaacgttcccactctaaggccgcgaagccgctacatggaagtctgcgaatccgccgtgcacgaacccttgcacatcgaagcggaagacccagacttggagcctttttccgacccattcactttcgaattggataatacctggggaaatgctgaagatacttggaaattaggacgaaattggggccaatctgtggagcttctgactttgcgcagtctaccgaggggcaactatttggtgcctctgtttattggggacaagcagggacttagccaaaagcagacggtccatgttcgcatctgtccttgcgccagcggccttacctgtgttgaactagcagacgccgaggtggggctgcatgttggcgcactgtttcccgtttgcgcagcttttgtcgcactggcagttgctctcctgtttctgctgcgctgctactttgttttagaacccaaaagacacggatgcagtgtgtccaatgatgagggtcatcagaccctagtgatgtacaacgcggagtctaaaggcacctctgcccaaacctggtcagacgttgagggtcagagacccgccttgcttatctgtacggcggcggctggtcctactcagggggtgaaagcttaccccgatgccacaatgcaccgccaactgttggctcctgttgagggacgaatggccgaaaccctgaatcaatccaaagagaggaacagattctccctgtccaggggatgcatcataccacagggccgggcaactgccggaaggggccttccccaggacatctataaggagatgatgccccgccgcctgacccagacgggcaagcgaaagcacggggccctcgcccgtacaccctcgtttaaaaaagtcgtgtacgaccacaaggaggacgaggagaacaaggccgggaggaagcagcggagccaccttttcaaggtcatgcaactccgaaatgaacaaggaggagttcgcgtccagtccgctcatagccccagcccactgaacaagaaagcttgcttccctggcgattatcgaggcgagagcgctgggggtcataattgccgcgctgtatcaggctag

SEQ ID NO: 321909 - DNA, 1335 bp, Artificial Sequence
  derived and/or modified sequence
tgaagacctggcaccctgctgggcaccttcaatgccatggaccctgacagccagatccgctatgagctggtgcatgaccctgccaactgggtgtctgtggacaagaacagcggcgtggtgatcaccgtggagcccatcgaccgggagagcccccacgtgaacaacagcttctacgtgatcatcatccatgctgtggatgatggcttccccccccagacagccaccggcaccctgatgctgttcctgagtgacatcaatgacaacgtgcccaccctgcggcccaggagccgctacatggaggtgtgtgagagcgctgtgcatgagcccctgcacatcgaggctgaagatcctgacctggagcccttcagtgaccccttcacctttgagctggacaacacctggggcaatgctgaggacacctggaagctgggcaggaactggggccagagcgtggagctgctgaccctgcggagcctgccccggggcaactacctggtgcccctcttcatcggggacaagcagggcctgagccagaagcagacagtgcacgtgcgcatctgcccctgtgccagcggcctgacctgtgtggagctggctgatgctgaggtgggcctgcacgtgggcgccctcttccctgtgtgtgccgcctttgtggccctggccgtggccctgctcttcctgctgcgctgctactttgtgctggagcccaagagacatggctgcagcgtgtccaatgatgagggccaccagaccctggtgatgtacaatgctgagagcaagggcaccagcgcccagacctggagcgatgtggagggccagaggcctgccctgctgatctgcacagctgctgctggccccacccagggcgtgaaggcctacccagatgccaccatgcaccggcagctgctggcccctgtggagggccgcatggccgagaccctgaaccagagcaaggagaggaaccgcttcagcctgagccggggctgcatcatcccccagggccgggccacagctggccggggcctgccccaggacatctacaaggagatgatgccccggcggctgacccagacaggcaagaggaagcatggagccctggcccggacccccagcttcaagaaggtggtgtatgaccacaaggaggatgaggagaacaaggccggcaggaagcagaggagccacctgttcaaggtgatgcagctgagaaatgagcagggcggcgtgcgggtgcagagcgcccacagccccagccccctgaacaagaaggcctgcttccctggggactacagaggagagagcgctgggggccacaactgcagagctgtgtctggatag

SEQ ID NO: 321910 - DNA, 1335 bp, Artificial Sequence
  derived and/or modified sequence
tgacggcccggcaccctgctgggcaccttcaacgccatggaccccgactctcagattagatacgaactggtccatgacccggcgaattgggtgtccgtggataaaaattctggtgtggtgatcacagtggagcctattgaccgcgagtctccccatgtcaataactccttttatgtgatcattatccacgcagttgacgacggcttccctccacaaacagcaacaggaacattaatgctttttctgtccgacattaatgataacgtcccaacacttagaccacgaagccggtatatggaggtctgtgaaagtgctgtccacgaaccgttacatattgaggccgaggatcccgacttggagccctttagcgacccatttacttttgaactggacaatacatggggcaatgccgaggacacttggaagcttgggcggaactgggggcagtcagtggagctcctcacactgagatcgctgcctcgagggaattacctcgtccccctatttatcggggataagcagggattgtctcagaaacagacggtgcacgtacgtatctgtccctgtgcttctggactcacatgtgtggaactggccgacgccgaagttggcttgcacgttggggctctgtttcccgtgtgcgccgcctttgtggcgctcgctgtggccctgctcttcttactccgatgctacttcgttctcgaacctaagaggcatgggtgttctgtatctaacgacgagggacatcagacacttgtaatgtataatgccgaatccaagggaacctcagctcagacgtggagtgacgtggagggccagcggccagcccttctcatatgcactgccgcagcgggacctacacaaggcgtgaaagcctaccccgatgcgactatgcaccgtcagctgctggctccagtcgagggaaggatggctgagacattgaaccagagtaaagagcggaacaggttctctctgtccagggggtgcattattcctcagggccgcgcaacagccggcaggggtctcccacaagacatatataaagagatgatgccccgcagactgacacagacaggcaaaagaaagcatggggctctggcccgcactccctccttcaagaaggtcgtttatgatcataaggaggacgaagagaacaaggctggaagaaaacagagaagccacctcttcaaagtaatgcagcttaggaatgaacagggcggggttcgagtgcagagcgcgcactccccgtcgccactgaataaaaaggcctgctttcccggcgattaccgaggcgaaagtgctgggggtcacaattgtcgggctgtaagcggctag

SEQ ID NO: 321911 - DNA, 1335 bp, Artificial Sequence
  derived and/or modified sequence
tgacgacccggaacgctgctcgggacctttaacgctatggatccagattcccagattaggtatgagctggtccatgaccccgctaattgggtgtctgtagataagaacagtggagtggttattacagtagagcccatcgatcgcgagagccctcacgtgaataacagtttctacgttattataatccacgccgttgacgatggcttccctccacagaccgccaccgggacactgatgctgtttttgtccgacattaacgacaacgtgcctactttaagacctagaagtagatacatggaagtttgcgagagcgcggtgcacgagccacttcacatagaggcggaagatcctgatctcgaaccctttagtgacccctttactttcgagttagacaatacttggggcaatgctgaagacacttggaaactgggaagaaattggggtcagagtgtagagctactcactctccgtagcttacctcgtggcaactatttggtacctctcttcatcggagataagcagggcttgtctcagaagcagacggtgcatgtccgtatttgtccctgtgcaagcggcttgacttgtgtggagctggcggacgcagaggttggcctgcacgtgggagccctattccctgtttgcgcggctttcgttgccctggcagtcgctctgctgttcctcctgagatgctatttcgtactagaaccaaaacgacacgggtgttccgtgagcaatgatgaaggacaccagactctggttatgtacaatgctgagagtaaggggacttccgctcaaacttggagtgatgtggaaggtcagaggcccgctctgctaatatgcacagccgcagccggacctacgcagggagtcaaagcttatcccgatgcaactatgcatcgtcagcttctggcccctgtggaggggaggatggctgagactctgaatcagtctaaggaacgcaatcgctttagcctctctagaggctgcattatcccacagggtcgggcaactgcgggacggggactcccccaggacatttataaagagatgatgccacgaaggctgacccagactggcaagcgcaaacacggtgcactcgccagaaccccttcttttaaaaaggtggtgtacgaccacaaggaagacgaggagaataaggctggacgcaagcagcgcagccacctcttcaaggtgatgcagctgcgcaatgaacaggggggagtccgggtgcagtccgcccacagccccagcccacttaataagaaagcttgctttcccggtgactataggggtgaatccgcaggcggacataactgtagggccgtgagtggttag

SEQ ID NO: 321912 - DNA, 1669 bp, Artificial Sequence
  derived and/or modified sequence
ccaggcctgggaccctgttgggaacttttaatgccatggatccagacagccagataagatatgaactggttcatgacccagcaaattgggtcagcgtcgacaaaaactccggagtggtcatcaccgtggagccaattgaccgagaatcccctcatgtaaataacagtttttatgtaatcatcattcacgctgttgatgatggcttcccaccgcagactgctacagggaccctaatgctcttcctgtctgacatcaatgacaacgtcccgactctccggccacgttcccgctacatggaggtctgtgagtctgctgtgcatgagcccctccacatcgaggcagaggatccggacctggagccgttctctgacccatttacatttgaattggacaatacctggggaaatgcggaggacacatggaagttggggagaaattggggtcaatcagttgaacttttaaccttgagaagcctgccacgtggtaattacttggtgccactcttcattggagacaaacagggactttcccagaagcaaactgtccatgtaaggatctgcccctgtgccagtgggctcacatgtgtggagcttgcagatgcagaagtggggcttcatgtgggggccctgttccctgtctgtgcagcatttgtggctctggcagtggctctgctttttctgttgcgatgctattttgtgcttgaacctaagaggcatggatgctctgtatccaatgatgaaggccaccaaacactggtcatgtataatgcggagagcaaaggcacttcagcccagacatggtcagatgttgaaggccagaggccggctctgctcatctgcacagctgcagcaggacccacgcagggagttaaggcttacccagatgccacaatgcacagacaactcctggctccggtggaaggaaggatggcagagacattgaatcagtctaaagagagaaatcgcttcagcctcagcaggggctgcatcatcccccagggaagagccacagctgggcgaggattgccacaagacatttacaaggagatgatgccacggagactaacgcagactggtaaacggaaacacggggctttggctcgaacaccctctttcaagaaagttgtttatgaccacaaggaagatgaggagaacaaggctgggagaaagcaaaggagccacttgtttaaggttatgcagctgagaaatgaacaaggtggggttcgagtccagagtgcgcattccccatcaccccttaacaaaaaggcatgtttcccaggagactacagaggagaatcggcaggtggtcacaattgcagggctgtctcaggctgagcagagagtacggtggaggggcatgggcctgctgttggcggtgagggccttggaaatggcttcctggaggagatggcaattatccaggtagacaagatgtgtgtgtgtgtgtgtgtgtgtgtgtgtgtgatcatgaagaagaaataatgtgcaaagccctggtcataaataacttttcctctgcaaactgtggatggcagttcaccatgtttctcaccactggcctggtcactgcttatccaatatgcatgtaagaattactttttctcttttttcccttctataaattctcatagaacttcctttaatgcattaaaaaagcaactagcatgttc

SEQ ID NO: 321913 - DNA, 381 bp, Artificial Sequence
  derived and/or modified sequence
atgatcggccccgaggtggtgcaccccctggtgcccctggacaaccacatccccgagagagccggcagcggcagccaggtgcccaccgagcccaagaagctggaggagaacgaggtgatccccaagagaatcagccccgtggaggagagcgaggacgtgagcaacaaggtgagcatgagcagcaccgtgcagggcagcaacatcttcgagagaaccgaggtgctggccgccctgatcgtgggcggcatcgtgggcatcctgttcgccgtgttcctgatcctgctgctgatgtacagaatgaagaagaaggacgagggcagctacgacctgggcaagaagcccatctacaagaaggcccccaccaacgagttctacgcctag

SEQ ID NO: 321914 - DNA, 381 bp, Artificial Sequence
  derived and/or modified sequence
atgatcggtcccgaggtggtccatcctctcgtacctctcgataaccatatccccgagagagcaggatccgggtctcaggtcccgacagagcccaagaaactggaggagaatgaagtcatccctaagcgaatttctccagtggaggagagtgaagatgtgagcaacaaggtgagcatgtcctccaccgtgcagggctctaatatctttgagcggaccgaggtgttggccgccctcatagtggggggcatagtcggtattctcttcgcagtgttcctgattttgctgttgatgtatcgaatgaaaaaaaaggacgaagggagttacgaccttggtaaaaaaccaatatataaaaaggcccctacaaatgagttttacgcctag

SEQ ID NO: 321915 - DNA, 381 bp, Artificial Sequence
  derived and/or modified sequence
atgattggccctgaggtggtgcaccccctggtgcccctggacaaccacatccctgagagagctggcagcggcagccaggtgcccacagagcccaagaagctggaggagaatgaagtcatccccaagaggatcagccctgtggaggagagtgaagatgtgagcaacaaggtgtccatgagcagcacagtgcagggcagcaacatctttgagaggacagaggtgctggccgccctgattgtgggcggcatcgtgggcatcctgtttgctgtgttcctgatcctgctgctgatgtacaggatgaagaagaaggatgagggcagctatgacctgggcaagaagcccatctacaagaaggcccccaccaatgagttctacgcctag

SEQ ID NO: 321916 - DNA, 381 bp, Artificial Sequence
  derived and/or modified sequence
atgatcggccccgaggtggtgcaccccctggtgcccctggacaaccatataccggaacgtgcaggcagcgggagccaggtccctacagagccgaagaaattagaagaaaatgaagtcatccccaaacgtattagcccagtggaggagtctgaggacgtttctaataaagtctcaatgagctcaactgtgcagggctcaaatatttttgaacggactgaggtgttggcagctctgattgtggggggtatagtgggtatcttgtttgcggttttcttaattctcctactgatgtaccggatgaaaaaaaaggacgaggggagctacgatctgggtaagaagcctatttataagaaggcccctaccaacgaattctatgcctag

SEQ ID NO: 321917 - DNA, 381 bp, Artificial Sequence
  derived and/or modified sequence
atgataggtcccgaagttgtgcatcctcttgtgcctcttgataatcacattccagaacgggcaggatccggttctcaggtccccactgaacctaaaaaactcgaggagaacgaggttatcccgaaaagaatttcacccgttgaggaatcggaggacgtctcgaataaggtttctatgtcttccaccgtacagggatcaaacatatttgaacgcaccgaagtacttgccgctctaatagtgggcggtattgtggggatcctcttcgctgtttttttgatccttctgctaatgtaccgaatgaaaaagaaggatgaggggtcttatgatcttgggaaaaagcccatatacaagaaagcaccaactaacgagttttacgcatag

SEQ ID NO: 321918 - DNA, 162 bp, Artificial Sequence
  derived and/or modified sequence
gccacacaggaccttcagttccgcattcgaaggcctcggccgccagccagaggaaggggcggcgaaacccggagctgcgacctgggccgatgccatctcaagggcctagacctcctcgaagctcggacggcagaggaagatggcgaacggaacgcacgctag

SEQ ID NO: 321919 - protein, 828 aa, Artificial Sequence
  derived and/or modified sequence
MRPRPEGRGLRAGVALSPALLLLLLLPPPPTLLGRLWAAGTPSPSAPGARQDGALGAGRVKRGWVWNQFFVVEEYTGTEPLYVGKIHSDSDEGDGAIKYTISGEGAGTIFLIDELTGDIHAMERLDREQKTFYTLRAQARDRATNRLLEPESEFIIKVQDINDSEPRFLHGPYIGSVAELSPTGTSVMQVMASDADDPTYGSSARLVYSVLDGEHHFTVDPKTGVIRTAVPDLDRESQERYEVVIQATDMAGQLGGLSGSTTVTIVVTDVNDNPPRFPQKMYQFSIQESAPIGTAVGRVKAEDSDVGENTDMTYHLKDESSSGGDVFKVTTDSDTQEAIIVVQKRLDFESQPVHTVILEALNKFVDPRFADLGTFRDQAIVRVAVTDVDEPPEFRPPSGLLEVQEDAQVGSLVGVVTARDPDAANRPVRYAIDRESDLDQIFDIDADTGAIVTGKGLDRETAGWHNITVLAMEADNHAQLSRASLRIRILDVNDNPPELATPYEAAVCEDAKPGQLIQTISVVDRDEPQGGHRFYFRLVPEAPSNPHFSLLDIQDNTAAVHTQHVGFNRQEQDVFFLPILVVDSGPPTLSSTGTLTIRICGCDSSGTIQSCNTTAFVMAASLSPGALIALLVCVLILVVLVLLILTLRRHHKSHLSSDEDEDMRDNVIKYNDEGGGEQDTEAYDMSALRSLYDFGELKGGDGGGSAGGGAGGGSGGGAGSPPQAHLPSERHSLPQGPPSPEPDFSVFRDFISRKVALADGDLSVPPYDAFQTYAFEGADSPAASLSSLHSGSSGSEQDFAYLSSWGPRFRPLAALYAGHRGDDEAQAS

SEQ ID NO: 321920 - DNA, 2487 bp, Artificial Sequence
  derived and/or modified sequence
atgcggcctcgccctgaggggcgcggtctacgagctggcgttgcgctgagtcccgcactgctgctccttctgctgttgccacccccacctaccctgctgggtcgtctgtgggccgcagggactccttccccctcagcgcccggtgccaggcaggatggcgccctcggtgccgggagggtgaaacggggatgggtctggaaccaattctttgttgtcgaagagtatacagggaccgagccgctctatgtaggcaaaatccacagtgactccgacgagggggatggggccatcaaatacacgatcagcggagaaggcgccgggactatcttcctaattgatgagctaacaggcgatatccatgccatggaacgactcgacagggagcagaaaaccttctatacccttcgagcacaggcaagggaccgcgccaccaaccgactgcttgaacccgagagcgagtttattatcaaggtgcaggatataaacgatagcgagccacgctttctgcacgggccgtatattgggtctgtggccgagttatctccaaccggaacttctgtgatgcaagtgatggcatccgatgcagacgaccctacttacggttcgagtgccaggctggtgtacagtgtgctggatggagaacaccacttcacagttgacccaaaaaccggagtgattcgcaccgcagttccggatctcgatcgcgagagccaagagaggtacgaagtcgtcatacaggcaacagacatggccggacagctgggggggctgagcgggtcaactactgtaaccatcgtcgttaccgacgtaaacgataaccccccccgctttccacagaagatgtaccagttttccatccaggagagcgcccccatcggaacagcagtagggcgtgttaaggctgaggatagcgatgttggcgagaacacagatatgacataccatctgaaggacgagagctcatcaggaggagacgtgttcaaggtgaccaccgactccgacacccaggaggccattattgttgtgcagaaaagattggacttcgagagccaacctgttcatacagtgattctagaggccttgaataagttcgtagacccgaggtttgcggacctggggacatttagggaccaagccatcgttcgcgtggcggtcacggatgtagacgagccacccgagtttcgtcctccatccgggctcctagaagtgcaggaagatgcgcaagtaggtagcttggttggcgttgttaccgcccgcgatccggacgccgccaatcgaccagtccggtacgctattgaccgagagtcggatctggaccagatattcgacatagatgccgacaccggcgccattgtgactggtaagggcctcgaccgggagacagcgggatggcacaacatcactgtgctcgctatggaagcggataatcacgcccagttaagcagggcgtcactgagaattcggatcttggatgtgaacgacaacccccccgagttagctacaccttacgaagctgccgtgtgtgaggatgcaaaaccaggtcagctcattcagacaatcagtgttgtcgacagggatgagccccaggggggccacagattttactttcgtttagtacctgaggccccatcgaacccccatttcagtctgctggatatccaagacaacactgccgcagtgcatacacagcatgtgggtttcaaccgccaggaacaggatgtgtttttcctgcctatcctcgtggtcgatagtgggccgcccaccctgtcatccacaggcaccttgaccatccgcatttgtgggtgtgatagttctggaactattcagagctgcaacacaaccgcgtttgtcatggccgcctccctctctccaggcgccctaatcgccctgctggtgtgtgtactcattttagttgtcctcgttctcttaattttgactctcaggcgtcaccacaagtcacacctttctagtgatgaagatgaagacatgcgcgacaatgtcattaaatataacgacgagggtggcggtgagcaggataccgaggcctacgatatgtcagcgctccggtccctgtatgatttcggggagcttaaagggggggacggcggcgggagtgccggcgggggtgccggcggaggtagcgggggtggagcggggagccccccccaggcccacctcccctcagagcggcattctctgcctcagggtcctccaagcccagaacctgacttctccgtgttccgggattttatctctcggaaggtggcactcgccgacggcgacctctcagtgcccccctacgacgccttccagacttacgctttcgagggggccgactcgccagcagcaagtttatcttcattgcattcaggctcgagtggtagcgagcaggactttgcatacctgtcctcctggggccctcgatttcggcctctggctgccctttacgccggtcacaggggcgacgacgaggctcaggcttcatag

SEQ ID NO: 321921 - DNA, 2487 bp, Artificial Sequence
  derived and/or modified sequence
atgcggccaagaccagaagggcgcgggctcagagctggcgtggcacttagccctgccttacttctcctcttgctgctgccaccccctccgaccctgctggggaggctctgggcagccggaaccccgtcaccaagtgcccccggagcacggcaagacggcgccctgggggccggccgtgttaagaggggatgggtgtggaatcagtttttcgtagttgaagaatatacagggacagagcccctgtacgtggggaagatccacagcgattcggatgaaggggacggggctatcaaatacacgataagcggcgaaggcgcaggcacaatttttctgatagacgagctgaccggggatatccacgctatggaaaggctagacagggaacagaagaccttctataccttgagagcgcaggccagagatcgcgcaaccaatagattgttggagccagagagcgagtttatcatcaaagtccaggacatcaacgattctgagccacgattcctccacggcccgtatatcggctcagtggctgaactgtcccccactggtaccagtgtaatgcaagttatggctagcgacgccgatgatcctacgtacggatcttctgcgcgtttggtttactccgtgctggatggcgaacaccattttacagtggacccgaaaacaggggtcatccggaccgcagtccctgacctggatagggagtctcaggagcgatacgaggtagtcatccaggctaccgatatggcaggacagctcgggggactgagcggcagcacgaccgttactatcgtggtaaccgacgtcaatgataaccctcctcggtttccacagaagatgtaccagttcagtatacaggagtccgcacccataggaactgccgtgggcagggtgaaggctgaggacagtgacgtcggtgagaatacagatatgacttaccatctaaaggacgagtcatcatcagggggtgacgtgtttaaagtgacaactgactccgatacgcaggaggcaatcatcgtggtgcagaaaagattagacttcgagagccagcccgtgcatactgtcattttagaggctttaaataagttcgtggaccccaggttcgcagatctgggtacgtttcgagaccaggccatcgtccgggttgcagtaaccgatgtagatgaacctccggagttccgacctccaagcggcctcctggaagtgcaagaggatgctcaggtcggatcactggtcggggtggtgaccgcccgagaccccgatgccgcgaaccgaccagtgaggtacgctattgaccgcgaaagtgacctggaccagatctttgatattgacgccgatacaggagcaatcgtgacgggcaagggactggatagagagacggcgggctggcacaacataaccgttctggccatggaggcagacaatcacgcccagctctccagggcttctctccggataagaatcctcgatgtcaacgacaaccctcctgagttggcaacaccatacgaagccgccgtttgtgaagacgctaaaccaggccagctaatacagaccatcagcgttgtcgacagggatgagcctcagggaggccataggttctattttcgcctggtgccagaagctcctagcaacccgcatttctcactgctcgatattcaggacaacacggccgccgttcatacccagcacgtcggctttaaccgccaggaacaagacgtgtttttcctccccattctggtcgtggactccggccctccaaccctttcatctactggcacactgaccatccgcatctgtggctgcgattccagcgggacgattcagtcttgcaacaccacggccttcgttatggcagcctccttgtcgcccggcgcgcttattgcactgctggtttgtgtactgatcctcgtcgtcttggtgttgcttattctcacattaagacggcatcataaatcccatctgagcagtgacgaagacgaagacatgagagacaacgtcatcaagtacaacgacgagggcggcggtgagcaggataccgaagcctacgacatgagcgctttaagatccttgtacgactttggcgagctgaaagggggagatgggggcgggtccgcaggtggaggggccggtggggggtccggtggaggcgctggtagcccaccccaggcccatttgccatctgaacgtcattctttgccacagggcccaccttcgccagagccagattttagcgtatttcgggattttatttcaagaaaagtggcgttagccgacggggatctttccgtccccccttacgatgcctttcagacgtacgccttcgaaggcgccgactcaccggccgcaagtctgagctctctccatagtggctcgagtggatctgagcaggattttgcttatcttagcagttggggtccccgcttccgtcctctggcagctctgtatgcaggacaccggggcgacgacgaagctcaagcctcttag

SEQ ID NO: 321922 - DNA, 2487 bp, Artificial Sequence
  derived and/or modified sequence
atgaggcccaggcctgagggccggggcctgcgggccggcgtggccctgagccctgccctgctgctgctgctgctgctgcccccaccacccaccctgctgggccgcctgtgggccgccggcacccccagccccagcgcccctggggcccggcaggatggagccctgggcgccggccgggtgaagaggggctgggtgtggaaccagttctttgtggtggaggagtacacaggaacagagcccctgtatgtgggcaagatccacagcgacagtgatgaaggagatggagccatcaagtacaccatcagcggggagggcgccggcaccatcttcctgattgatgagctgaccggggacatccacgccatggagcggctggaccgggagcagaagaccttctacaccctgcgggcccaggcccgggaccgggccaccaaccggctgctggagcctgagagcgagttcatcatcaaggtgcaggacatcaatgacagcgagccccgcttcctgcacggcccctacatcggctctgtggccgagctgagccccaccggcacctctgtgatgcaggtgatggccagtgatgctgatgaccccacctacggcagcagcgcccggctggtgtacagcgtgctggatggagagcaccacttcaccgtggaccccaagacaggagtcatcagaacagctgtgcctgacctggaccgggagagccaggagagatatgaggtggtgatccaggccacagacatggccggccagctgggcggcctgagcggcagcaccaccgtgaccatcgtggtgacagatgtgaatgacaaccccccacgcttcccccagaagatgtaccagttcagcatccaggagagcgcccccatcggcacagctgtgggccgggtgaaggccgaggacagtgatgtgggggagaacacagacatgacctaccacctgaaggatgagagcagcagtggaggagatgtgttcaaggtgaccacagacagcgacacccaggaggccatcatcgtggtgcagaagaggctggactttgagagccagcctgtgcacacagtcatcctggaggccctgaacaagtttgtggaccccaggtttgctgacctgggcaccttccgggaccaggccatcgtgcgggtggccgtgacagatgtggatgagcccccagagttccggccccccagcggcctgctggaggtgcaggaggatgcccaggtgggcagcctggtgggcgtggtgacagcccgggaccctgatgctgccaacagacctgtgcgctatgccatcgaccgggagagtgacctggaccagatctttgatattgatgctgacaccggggccatcgtgacaggcaagggcctggaccgggagacagctggctggcacaacatcaccgtgctggccatggaggccgacaaccacgcccagctgagccgggccagcctgcgcatccgcatcctggatgtgaatgacaaccccccagagctggccaccccctatgaagctgctgtgtgtgaagatgccaagccaggccagctgatccagaccatctctgtggtggacagagatgagccccagggcggccaccgcttctacttccggctggtgcctgaggcccccagcaacccccacttcagcctgctggacatccaggacaacacagctgctgtgcacacccagcacgtgggcttcaaccggcaggagcaggatgtgttcttcctgcccatcctggtggtggacagcggcccccccaccctgagcagcacaggcaccctgaccatccgcatctgtggctgtgacagcagcggcaccatccagagctgcaacaccacagcctttgtgatggccgccagcctgagccctggggccctgattgccctgctggtgtgtgtgctgatcctggtggtgctggtgctgctgatcctgaccctgcggcggcaccacaagagccacctgagcagtgatgaagatgaggacatgagggacaacgtcatcaagtacaatgatgagggcggcggggagcaggacacagaggcctatgacatgtctgccctgcggagcctgtatgactttggagagctgaagggaggagatggcggcggcagcgctgggggcggggccggcggcggcagcggcggcggggccggcagccccccccaggcccacctgcccagcgagcggcacagcctgccccagggcccccccagccctgagccagacttctctgtgttccgggacttcatcagcaggaaggtggccctggctgatggagacctgtctgtgcccccctatgatgccttccagacctacgcctttgaaggagctgacagccctgctgccagcctgagcagcctgcacagcggcagcagcggcagcgagcaggactttgcctacctgagctcctggggcccccgcttccggcccctggccgccctgtatgccggccacagaggagatgatgaggcccaggccagctag

SEQ ID NO: 321923 - DNA, 2487 bp, Artificial Sequence
  derived and/or modified sequence
atgcggccccggcccgagggccggggcctgcgggccggcgtggccttgtcccctgccctgctgctgctcctgctcctcccccctccgcccactctgctagggcgcctgtgggcagcaggaacaccgtccccatcagcccccggagcgaggcaggatggcgccctgggggctggccgggtgaagagggggtgggtatggaaccagttctttgtggtagaggagtacactggcacagaaccgctgtatgtgggcaaaatacactctgattctgacgagggagacggagcaatcaaatatactatctccggggagggtgccggaaccatttttctgatcgatgagctcactggagacattcatgctatggaacgtctggaccgggaacaaaagacattctataccctccgcgctcaagcacgtgatagagcgacaaatagactgctggaacctgaaagtgaatttataattaaggttcaggacataaacgacagtgaaccaagatttctgcacgggccttacatcgggagtgtcgcagagctcagtcccaccggaacgagtgtcatgcaggtcatggcctcagacgccgatgatcccacctatggcagctcggcccgcctcgtttacagcgtactggacggggagcatcatttcactgtggacccaaagaccggcgttatcagaactgccgtgcccgaccttgacagagagtcccaggaacgttatgaggtggtgatccaagcaacggacatggcagggcagctagggggcctgtccgggagtacaacggttactatcgttgtgactgacgtcaacgacaaccctcctcgcttccctcagaagatgtaccagttcagcatccaggaatctgctccgattggcaccgctgtcggccgcgtgaaagccgaagactctgacgtcggtgagaacactgacatgacgtatcacctgaaggacgaatcaagctcagggggcgacgtgtttaaggtgacaacagatagtgatacacaggaggcaattatcgtagtccaaaagcgactggactttgagtctcagcctgtgcacaccgtcatcctggaggccctaaataagttcgtggaccccagatttgctgatctgggaacgttcagagaccaagccattgtacgagtcgctgttacggacgtggacgagccaccagagtttcgccctcccagcggcctcctggaagtccaggaggatgcccaggtcggctcccttgtgggcgtggttacagctcgggatcccgacgccgccaaccggccagttcgttacgctattgacagagagagcgacctggaccagatattcgatatcgacgccgacacgggcgctattgtcacagggaaaggcctcgaccgcgagaccgccgggtggcataacattacagttctcgccatggaggcagacaaccacgcccagctttctcgcgccagtctgcgaatcagaattctggacgtgaacgataatcctccagagttggctactccgtacgaggccgcggtctgcgaggacgctaaacctgggcaactgattcagactatatccgttgtagaccgggacgaaccccagggcggccacaggttttacttcagactggtcccagaagcgccttccaacccccatttctcactgctggatattcaggataacaccgcagcggtgcacactcaacatgtggggtttaatagacaggaacaggatgtgttctttttgcccattctcgtggtggatagtgggcctccaactttgtcgtcaaccgggacactgacaatcaggatctgcggatgcgattcatccggcaccatacagagttgcaataccacagccttcgttatggcagctagcttgtcacccggcgccttgatcgctctgttagtatgtgttttgattctagtcgtgctcgtgctgttaattctgaccctcagaaggcaccacaagtcacacctatccagtgacgaggatgaggacatgagagacaacgtgattaagtataacgatgaaggtgggggtgagcaggatactgaagcatacgacatgtccgcgctgcggtctctatacgactttggcgagttaaaagggggcgatggcgggggtagcgcaggcggaggggcaggcggagggtccggcgggggagccggatctcctccacaggcccacctgcctagcgaaagacactccctcccgcagggacccccatcccctgagcccgattttagcgtcttccgcgacttcatttcccggaaggttgcactagctgacggggatctgtcggtccccccatacgatgcatttcagacttacgcttttgagggcgctgatagcccagctgcttcgctttcctctttgcacagtggctcctctggatctgaacaggattttgcctacctgtcaagttggggccctcgattccggcccctcgcagcactgtacgctggccataggggggacgatgaggcccaggcgtcctag

SEQ ID NO: 321924 - DNA, 2487 bp, Artificial Sequence
  derived and/or modified sequence
atgcggccccggcccgagggccggggcctgcgggccggcgtggcccttagcccagccttactactgctactgcttctgccgcccccgccaactttgctagggcggctgtgggccgctggtactccatcaccaagtgccccaggtgctcggcaggacggagccctgggggcagggcgcgtgaagcggggatgggtgtggaaccagttctttgtcgttgaggagtacacaggaaccgagcccctctatgtcggcaaaattcactccgattccgatgagggggacggagccattaagtatactatttctggtgagggcgcggggactatcttcttaattgacgagttgaccggggatatccatgctatggagaggttggaccgcgaacaaaagacattttacacgctcagggcgcaggcacgagatcgtgcaaccaatagattattagaaccagagtctgagtttatcatcaaggtacaggatatcaatgatagtgaaccaaggtttttgcacggcccctacattgggtctgtggctgaactcagccccacaggcacctcagttatgcaggtgatggcgagcgacgccgacgaccctacctatgggagtagcgcacggcttgtatacagcgtactggatggagagcaccatttcacagtggatccaaagacaggtgtcattcgcacggctgtgccggatttagatagagaatcacaggagagatatgaggttgttattcaagctaccgatatggccggccaattaggtggcttaagtggcagcaccacggtgactattgtggttaccgacgtgaatgacaacccccctcggtttccacagaagatgtatcagttcagcatccaagaatcagcccctatcggcaccgctgtcggtagggtgaaggctgaggacagcgatgtaggcgaaaataccgacatgacctatcacctcaaagatgagagcagctccggtggagacgtctttaaagtgacaacagacagcgacactcaggaggcaatcatcgtcgtgcagaagcggctggatttcgagtctcaacccgtgcacactgttatcttggaggccctcaataagttcgtcgatccacggtttgcagacttgggaacatttagggaccaggcaatcgttagagtggcagtgactgatgtggacgaacctcctgagttcagacctccttccggcctgctggaagtccaggaggacgctcaggtcggtagtctggttggggtagtgaccgcaagggacccagacgccgctaaccgcccagtgcgttacgctatcgaccgtgaaagtgacctcgatcagatttttgacatcgacgccgatacaggggctatcgtgacaggcaagggtctcgacagagaaacagcagggtggcataatatcaccgtcttagccatggaagcagacaatcatgcccagttaagccgcgctagtctacggatccggatactggatgtcaacgataatcctcccgagctagccacgccttatgaggctgccgtgtgtgaggacgccaagccagggcagctcattcagaccatctcagtggtggatcgcgatgagcctcagggcggacataggttctatttccggctggttcccgaagcgccatcaaatccacacttcagtctgttagatattcaggataataccgccgcagttcatacacagcatgtcggctttaataggcaagagcaagacgtgttcttcttacctatccttgtcgttgacagtggacctcctactctttcctctacaggaactctgaccatacgcatctgcgggtgtgattcgagcggcacgatccagagttgcaatactaccgcatttgtcatggcagcgtccctgagcccaggggcgttgattgcactgctggtctgcgttcttatactggtcgtgctagtcctgctaatcctgaccctgcgccgccaccataagtctcacctgtcctccgacgaggacgaggatatgcgagacaatgtaattaagtataacgatgagggcggcggagagcaggacacggaggcttacgacatgtccgcactgaggtcattgtacgatttcggcgaactcaaaggcggagacggtggcggttctgctggcggcggggcgggtggtgggtctggaggaggagcaggaagccctccacaggcgcacctgcccagcgagcgccattccttaccgcagggtcctccgagcccggagccagatttctctgtgttccgtgacttcatcagccgcaaggtcgccttggccgatggagacctctcagtgcccccatatgacgcctttcagacctacgccttcgagggggccgatagcccagccgcaagtctgtcaagcctgcattcaggttcatccggtagtgaacaggatttcgcctacttatccagctgggggccacgatttcgcccactggcagctctgtacgctggccatcgtggagacgacgaggcccaggcttcttag

SEQ ID NO: 321925 - DNA, 2487 bp, Artificial Sequence
  derived and/or modified sequence
atgaggccccgacctgaaggcagaggattaagggccggagtcgccctcagcccagcgttattgttactcctgcttttgccgccacctccaacactactcgggcgactctgggccgctggcacgccatccccaagtgctccaggagcacgccaggacggggctctgggagccggaagggttaaaagagggtgggtctggaaccagttcttcgtggtcgaagagtacactggcaccgagccattatacgtgggcaaaattcactctgattcagatgagggggacggtgccattaagtacaccattagcggggagggcgctggaacgatcttcctgatcgatgagctgacaggggacatccatgctatggaaagattggaccgcgagcagaaaactttctacacgttgcgagcccaggcaagagacagagccactaatcgcttgctcgagccagaatcagagtttatcattaaagttcaggatataaacgatagcgagccccgttttctgcatgggccatacatcggttccgttgccgagctttcgcccactggaactagtgtgatgcaggttatggcttcagacgcagacgatccgacttacggaagctcagccaggttggtgtatagtgtcctagatggcgagcaccattttacagtcgatccaaaaacaggcgtgatcagaacagctgtgccagatttggaccgcgagtcccaggagcgatacgaagtcgtcatacaagctaccgacatggccggtcagctcggagggctctccggaagcactactgtcactatagtagtaactgatgtgaatgacaatcctcctagatttcctcaaaaaatgtatcagttttccatccaggagtctgcccctatcggtaccgctgtgggaagggtcaaagccgaggattctgatgtaggagagaatactgacatgacatatcaccttaaggatgagagttcctccggcggtgatgtgtttaaagtcacaactgactcggatacacaggaggcaatcattgttgttcagaagaggcttgactttgagagtcaacctgtgcataccgtgatcttggaagctctgaacaagttcgtggatccccgatttgctgacctcgggacttttagagatcaggccatcgtaagggtggcggtcaccgatgtcgatgagccacccgagtttagacccccaagcggcctgctagaggtgcaggaggacgctcaggtaggatctctggttggcgttgtgaccgccagggacccagatgcggctaatagaccagtgagatacgctatagatagagagtcagacctcgatcagatattcgatattgatgctgataccggcgcaatagtgaccggcaaagggctggatagggagacggctggctggcacaatattactgtgctggccatggaggccgataaccacgcccagctgtcgcgcgcaagcctgagaattcgtattcttgatgtgaatgataatcctcccgaactggcaacaccatacgaagcagcagtgtgcgaggatgctaagccaggacagctgatccaaactattagcgtggtagacagggatgaaccacagggcggacaccgtttctacttccggctggtgcccgaggcaccgagtaatccgcacttctctctgctggacatacaagataacacagctgcggttcacacacagcacgtgggcttcaataggcaggagcaggatgtctttttcctgccaattctggtggttgacagcgggcctccaaccttgtcgagtaccggcactctcactattcgaatatgcgggtgcgactcctctggcactattcagtcgtgcaacaccactgccttcgtgatggctgcgtctctgtcacccggtgcgctgattgccctgctagtatgcgtattgatcctggtggtcctcgtgctccttatactgacactgaggcggcatcacaaatctcacctctcttccgacgaggatgaggacatgcgcgacaacgtgattaaatacaacgacgagggaggcggagaacaggataccgaagcctatgacatgagcgccctgcggtccctctatgattttggggagcttaaaggtggcgacggcggaggcagtgccggtggtggcgctggtgggggaagtggcggaggtgcaggcagcccacctcaggcgcatttgcccagcgaaaggcatagtctccctcagggtcccccatctccagaacctgactttagtgtgttccgcgacttcatcagcagaaaggtggcacttgcagacggcgatctgtcagtgcctccatacgacgctttccaaacatacgctttcgagggggctgacagcccagctgctagcctgtcctcactccattcaggctccagtgggtccgagcaagacttcgcctacctgtcttcatggggacctcggttcagacctctcgcagcactttatgctgggcatagaggtgatgatgaggctcaggccagctag

SEQ ID NO: 321926 - DNA, 2487 bp, Artificial Sequence
  derived and/or modified sequence
atgcgcccaaggcccgaaggcagaggtctgcgagctggcgtagcgctgtccccggctcttctcctgctgcttctgctgccaccccctcccaccttgttgggaagattgtgggcagccggaactccgtcgccaagtgcccctggagcacgccaagacggagctttgggggctgggagagtcaaacggggttgggtttggaatcaattcttcgttgttgaagaatacacaggcaccgagcccctgtacgtgggcaaaatccattccgacagcgacgagggtgacggagccatcaaatataccatcagtggggaaggcgctggtaccatatttctcattgacgagttgaccggcgatatccatgccatggagagactcgaccgggaacagaaaacgttttatacactgcgggctcaagccagagacagggcaaccaaccgcctgctggagcccgagtctgagttcatcatcaaggtgcaggatataaacgattccgagccacgttttctgcacggcccttacatcggatcagttgctgagctctctccaaccggcacctccgtcatgcaagtgatggccagtgatgccgatgatcccacctacgggagctccgccaggctcgtctactctgtgctagacggtgagcaccactttacagttgaccccaagactggggtgattcgcaccgcagtgccagatttagatcgcgagtctcaggagcggtacgaagtggtgattcaggcgactgacatggccggtcagcttggcggactgagtggatcgaccaccgtcacgatagtggtgactgatgtgaatgataaccctccaaggtttcctcagaagatgtatcagttttccattcaagagtccgctccaatcggaactgctgtggggagagtgaaagcagaggattctgatgttggcgagaacaccgacatgacataccacctaaaggatgagtcctcatctgggggtgacgtctttaaagtaaccaccgatagtgatacccaagaggccataatagtcgtccagaaaaggctggacttcgaatcgcagcctgtgcacactgtgatcctggaggcactgaacaagtttgtggacccccgatttgccgatctcggaacctttagggaccaggccatcgtgagagtagcagttactgatgtggatgagcctccagagttccgtccgccaagcggcctgttagaggtgcaggaagatgcccaggttgggtcattggtgggcgtggtgacggcacgtgatccagatgcagccaatagacccgtaaggtatgcaatcgaccgtgaatcagatcttgatcaaatattcgatatagatgcagacacgggtgccatcgtgacaggaaaaggcctggaccgcgagacagccggatggcacaatataaccgtattggcgatggaggctgacaatcacgcgcaattgtcacgagcctcccttcggatcagaatcctcgacgttaatgacaacccacctgagctggccactccttatgaggcagctgtgtgcgaagatgccaaacccggacaattaatacagacgatttccgttgtggaccgggacgaacctcaaggcggacacagattttactttcgcctcgtgcctgaggcccctagcaatcctcactttagcttgctcgacattcaagataacacagccgctgttcatacacagcatgtggggtttaatcgccaggaacaagatgttttcttcttgcctattctagtggttgatagtgggcctccgaccttgtcaagcaccgggaccctgaccatccgcatctgcggctgcgacagctctggtactatccagtcctgtaacactacggcattcgtcatggctgcaagtctgtctcccggtgccctgatcgctctcctcgtctgcgtgctgattctggtggtactcgtgctgctcattctgacattgcggaggcaccataaatctcatctgtcctctgatgaggatgaagatatgagagataacgttatcaaatacaacgatgagggcggtggggagcaggacacagaggcttacgatatgagtgcccttagatcgttatatgattttggcgagttgaagggcggagatgggggtggctccgcaggcggaggtgcaggcggaggctcaggtggtggcgctggcagcccgcctcaggctcacttaccctccgagaggcattcccttccgcagggccctcccagccctgaacccgatttcagtgttttccgcgatttcatctccagaaaagtcgctctagcagacggggatctgtccgtgccaccttatgatgccttccagacatacgcgtttgagggagctgacagtccggctgccagcctgtccagtctgcactctgggtccagcggatcggaacaagattttgcctacctcagttcatggggcccaagattcaggccgctcgcagccctgtacgctggacataggggtgacgacgaggcgcaggctagttag

SEQ ID NO: 321927 - DNA, 3661 bp, Artificial Sequence
  derived and/or modified sequence
aggctcctgatggaaagggaaggcccctagtcctggcaggatctgccggccccaacccgcatcctttctgcgcaggaaccatggcgcttccccgactctggagctgtccaggtgctgcctggtgatccgcacgcgacgcggcgacgggggcgcgggcgggcaccccgggggctgtccatgccccggatgcggccgcgccccctccccctccagccgggtacccccgcggctgggcggcgttcagggccgcgggcccgtccgggtgccccgtcgggggcgacatcccggcggccgcgctgaggccaccatgtgacacggcgccgcatcgttgtgcgaccaagcagcggcgccctggtgcctctcgtccatgctcctgggccccagccccgcgcaggccaaggatgaggccgaggcccgaaggtagggggctccgggcgggagtcgcgctgtcccccgcgctactgctgctgctgctgctgccgccgccgccgacgctgctggggcgcctgtgggcagcgggcacaccctcgccgtcggcgcccggagctcggcaggacggcgcgctgggagccggccgcgtcaaacgcggctgggtgtggaaccagttcttcgtggtagaggagtacacgggcacggagcccctgtatgtgggcaagatccactccgactcagacgagggtgacggggccatcaagtacaccatctcaggcgagggtgctgggaccatcttcctgatcgacgagctgacaggcgacattcatgccatggagcgcctggaccgcgagcagaaaaccttctacacgctgcgggcccaggctcgggatcgcgccaccaaccgcctactggagcccgagtcggagttcatcatcaaggtgcaggacatcaatgacagtgagccccgcttcctgcacggcccctatattggcagcgtggccgagctctcacctacaggcacgtcggtgatgcaggtgatggcctcggatgcggatgaccccacgtacggcagcagcgctcggctggtgtacagcgtgctggacggcgagcaccacttcaccgtggaccccaagaccggcgtaatccggacggctgtgcctgaccttgaccgcgagagccaggagcgctacgaggtggtgatccaggccacagacatggcgggtcagctgggtggcctctcgggctccactaccgtcaccatcgtagtcaccgacgtcaatgacaacccgccccgtttcccgcagaagatgtaccagttcagcatccaggagtcagcccccattggaacggctgtgggacgtgtgaaggctgaggactcagacgtgggagagaacacagacatgacttaccaccttaaggacgagagcagcagcggcggcgatgtgttcaaggtcaccacagacagcgacactcaggaggccatcatcgtagtgcagaagcgcctggacttcgaatcccagcccgtgcacaccgtgatcctggaggccctcaacaagttcgtggacccccgcttcgccgacctgggcacgttccgcgaccaggcgatcgtgcgcgtggccgtgaccgacgtggacgagccccccgagttccggccgccctccggcctcctggaggtgcaggaggacgcgcaggtgggctccctggtcggcgtggtgacggcgcgggaccccgacgccgccaaccggcccgtccggtacgccattgaccgcgaatcagatttggaccagatcttcgatatcgatgcggacacaggcgccatcgtgactggcaaggggctggaccgcgagacggccggctggcacaacatcacagtgctggccatggaggcggacaatcatgcacagctatcccgggcatccctaaggatccgaatcctggatgtgaacgacaatcccccagaactggccacaccctacgaggcagctgtatgcgaggatgccaagccaggccagctcatccagaccatcagcgtggtggacagagacgagccccaaggcgggcaccgcttctatttccgcctggtgcctgaagctcccagcaaccctcatttctctctgcttgacatccaagacaacaccgctgcagtgcacacgcagcacgtgggcttcaaccggcaggagcaggacgtgttcttcctgcccatcctggtggtagacagtgggccgcccacactgagcagcacaggcacgctcaccatccgcatctgtggctgcgacagctccggcaccatccagtcctgcaacaccacggcctttgtcatggccgcctccctcagccccggcgccctcatcgccctcttggtctgcgttctcatcctggttgtgctggtgctgctgatcctcaccctcaggcgccaccacaagagccacctgagctcggacgaggatgaagacatgcgggacaacgtcatcaaatacaacgacgaaggcggcggcgagcaggacaccgaagcctacgacatgtcggcgctgcggagcctctacgacttcggcgagctcaagggcggcgacgggggcggcagcgcgggcgggggagcgggcgggggctcgggcgggggcgcgggcagccccccgcaggcccacctgccctccgagcgccactcgctgccgcaggggccgccgagccccgagccagacttctcagtgttcagggacttcatcagccgcaaggtggcactggcggacggggacctgtcggtgccgccctacgacgccttccagacctacgccttcgagggcgcggactcgccggccgcctcgctcagctccctgcacagcggctcgtcgggctccgagcaggacttcgcctatctcagcagctggggtccgcgcttccggcccctggccgcgctctacgccggccaccgcggggacgacgaggcccaggcctcctagcccctcgccctgccgtcggggcgcggctgctcacccgcccagcacacgccggggccccaggacaacgcgtttcccccgcggaccccctttcctgccctcccccaaccctcccttggcggctggacggaggggggacttgctaggagcggactcttccattcctcctcctctaggggtgcagctttggagcccagaggtgcgggattctgaccaacggcattaaaactgaggcgagaccgggcacggtgtggctctggggttagaatgggagatgggggtggcgttgcagagtcgggaaggggcgggtcactcaatcctggcctgggggagaatgctggagggagcacgccgctgagatgcccccaccccaggtttcccccatcagagttaagaggaaagaaggctgttcacttactaagcacctactgtgtgctgggacgctgtacagagaccagctcagtcgtcagagaaaccatgaggtggtgtcctgcacggaatagaaggggaaaggaccccagagaagtggctgtgacccgtccaagggcacctggccagtgaatggcagagcctctggcactgaccagctgcctggcctcgggcaagtcacttcacttctctggtcctcagtttcctcatctgtcaaatggggttaataacagaacctacctcgaagagttgtgaggctaaaaagggttcatatgtgtcaagtggttaggacagtgcctggcacatagtaggtgttcaataaatgctagcctttgttactattctta

SEQ ID NO: 321928 - DNA, 3249 bp, Artificial Sequence
  derived and/or modified sequence
agacacgcacactccctcgctcccgctcgctcgctcactccctcgctctctcgctctctcgctctctcgctcacacacacgcgcgcacacgccgccgcggctccccctctcgctcccgctctccctccggctcctgcgggcggccgcggggctccggactcgcccgctgcccgcgccggggctcccgccccacgcagcgtcccgaggcggcaggactagggggagccccgggccgctccccgaggctcctgatggaaagggaaggcccctagtcctggcaggatctgccggccccaacccgcatcctttctgcgcaggaaccatggcgcttccccgactctggagctgtccaggtgctgcctggtgatccgcacgcgacgcggcgacgggggcgcgggcgggcaccccgggggctgtccatgccccggatgcggccgcgccccctccccctccagccgggtacccccgcggctgggcggcgttcagggccgcgggcccgtccgggtgccccgtcgggggcgacatcccggcggccgcgctgaggccaccatgtgacacggcgccgcatcgttgtgcgaccaagcagcggcgccctggtgcctctcgtccatgctcctgggccccagccccgcgcaggccaaggatgaggccgaggcccgaaggtagggggctccgggcgggagtcgcgctgtcccccgcgctactgctgctgctgctgctgccgccgccgccgacgctgctggggcgcctgtgggcagcgggcacaccctcgccgtcggcgcccggagctcggcaggacggcgcgctgggagccggccgcgtcaaacgcggctgggtgtggaaccagttcttcgtggtagaggagtacacgggcacggagcccctgtatgtgggcaagatccactccgactcagacgagggtgacggggccatcaagtacaccatctcaggcgagggtgctgggaccatcttcctgatcgacgagctgacaggcgacattcatgccatggagcgcctggaccgcgagcagaaaaccttctacacgctgcgggcccaggctcgggatcgcgccaccaaccgcctactggagcccgagtcggagttcatcatcaaggtgcaggacatcaatgacagtgagccccgcttcctgcacggcccctatattggcagcgtggccgagctctcacctacaggcacgtcggtgatgcaggtgatggcctcggatgcggatgaccccacgtacggcagcagcgctcggctggtgtacagcgtgctggacggcgagcaccacttcaccgtggaccccaagaccggcgtaatccggacggctgtgcctgaccttgaccgcgagagccaggagcgctacgaggtggtgatccaggccacagacatggcgggtcagctgggtggcctctcgggctccactaccgtcaccatcgtagtcaccgacgtcaatgacaacccgccccgtttcccgcagaagatgtaccagttcagcatccaggagtcagcccccattggaacggctgtgggacgtgtgaaggctgaggactcagacgtgggagagaacacagacatgacttaccaccttaaggacgagagcagcagcggcggcgatgtgttcaaggtcaccacagacagcgacactcaggaggccatcatcgtagtgcagaagcgcctggacttcgaatcccagcccgtgcacaccgtgatcctggaggccctcaacaagttcgtggacccccgcttcgccgacctgggcacgttccgcgaccaggcgatcgtgcgcgtggccgtgaccgacgtggacgagccccccgagttccggccgccctccggcctcctggaggtgcaggaggacgcgcaggtgggctccctggtcggcgtggtgacggcgcgggaccccgacgccgccaaccggcccgtccggtacgccattgaccgcgaatcagatttggaccagatcttcgatatcgatgcggacacaggcgccatcgtgactggcaaggggctggaccgcgagacggccggctggcacaacatcacagtgctggccatggaggcggacaatcatgcacagctatcccgggcatccctaaggatccgaatcctggatgtgaacgacaatcccccagaactggccacaccctacgaggcagctgtatgcgaggatgccaagccaggccagctcatccagaccatcagcgtggtggacagagacgagccccaaggcgggcaccgcttctatttccgcctggtgcctgaagctcccagcaaccctcatttctctctgcttgacatccaagacaacaccgctgcagtgcacacgcagcacgtgggcttcaaccggcaggagcaggacgtgttcttcctgcccatcctggtggtagacagtgggccgcccacactgagcagcacaggcacgctcaccatccgcatctgtggctgcgacagctccggcaccatccagtcctgcaacaccacggcctttgtcatggccgcctccctcagccccggcgccctcatcgccctcttggtctgcgttctcatcctggttgtgctggtgctgctgatcctcaccctcaggcgccaccacaagagccacctgagctcggacgaggatgaagacatgcgggacaacgtcatcaaatacaacgacgaaggcggcggcgagcaggacaccgaagcctacgacatgtcggcgctgcggagcctctacgacttcggcgagctcaagggcggcgacgggggcggcagcgcgggcgggggagcgggcgggggctcgggcgggggcgcgggcagccccccgcaggcccacctgccctccgagcgccactcgctgccgcaggggccgccgagccccgagccagacttctcagtgttcagggacttcatcagccgcaaggtggcactggcggacggggacctgtcggtgccgccctacgacgccttccagacctacgccttcgagggcgcggactcgccggccgcctcgctcagctccctgcacagcggctcgtcgggctccgagcaggacttcgcctatctcagcagctggggtccgcgcttccggcccctggccgcgctctacgccggccaccgcggggacgacgaggcccaggcctcctagcccctcgccctgccgtcggggcgcggctgctcacccgcccagcacacgccggggccccaggacaacgcgtttcccccgcggaccccctttcctgccctcccccaaccctcccttggcgg

SEQ ID NO: 321929 - DNA, 2487 bp, Artificial Sequence
  derived and/or modified sequence
atgagacccagacccgagggcagaggcctgagagccggcgtggccctgagccccgccctgctgctgctgctgctgctgccccccccccccaccctgctgggcagactgtgggccgccggcacccccagccccagcgcccccggcgccagacaggacggcgccctgggcgccggcagagtgaagagaggctgggtgtggaaccagttcttcgtggtggaggagtacaccggcaccgagcccctgtacgtgggcaagatccacagcgacagcgacgagggcgacggcgccatcaagtacaccatcagcggcgagggcgccggcaccatcttcctgatcgacgagctgaccggcgacatccacgccatggagagactggacagagagcagaagaccttctacaccctgagagcccaggccagagacagagccaccaacagactgctggagcccgagagcgagttcatcatcaaggtgcaggacatcaacgacagcgagcccagattcctgcacggcccctacatcggcagcgtggccgagctgagccccaccggcaccagcgtgatgcaggtgatggccagcgacgccgacgaccccacctacggcagcagcgccagactggtgtacagcgtgctggacggcgagcaccacttcaccgtggaccccaagaccggcgtgatcagaaccgccgtgcccgacctggacagagagagccaggagagatacgaggtggtgatccaggccaccgacatggccggccagctgggcggcctgagcggcagcaccaccgtgaccatcgtggtgaccgacgtgaacgacaacccccccagattcccccagaagatgtaccagttcagcatccaggagagcgcccccatcggcaccgccgtgggcagagtgaaggccgaggacagcgacgtgggcgagaacaccgacatgacctaccacctgaaggacgagagcagcagcggcggcgacgtgttcaaggtgaccaccgacagcgacacccaggaggccatcatcgtggtgcagaagagactggacttcgagagccagcccgtgcacaccgtgatcctggaggccctgaacaagttcgtggaccccagattcgccgacctgggcaccttcagagaccaggccatcgtgagagtggccgtgaccgacgtggacgagccccccgagttcagaccccccagcggcctgctggaggtgcaggaggacgcccaggtgggcagcctggtgggcgtggtgaccgccagagaccccgacgccgccaacagacccgtgagatacgccatcgacagagagagcgacctggaccagatcttcgacatcgacgccgacaccggcgccatcgtgaccggcaagggcctggacagagagaccgccggctggcacaacatcaccgtgctggccatggaggccgacaaccacgcccagctgagcagagccagcctgagaatcagaatcctggacgtgaacgacaacccccccgagctggccaccccctacgaggccgccgtgtgcgaggacgccaagcccggccagctgatccagaccatcagcgtggtggacagagacgagccccagggcggccacagattctacttcagactggtgcccgaggcccccagcaacccccacttcagcctgctggacatccaggacaacaccgccgccgtgcacacccagcacgtgggcttcaacagacaggagcaggacgtgttcttcctgcccatcctggtggtggacagcggcccccccaccctgagcagcaccggcaccctgaccatcagaatctgcggctgcgacagcagcggcaccatccagagctgcaacaccaccgccttcgtgatggccgccagcctgagccccggcgccctgatcgccctgctggtgtgcgtgctgatcctggtggtgctggtgctgctgatcctgaccctgagaagacaccacaagagccacctgagcagcgacgaggacgaggacatgagagacaacgtgatcaagtacaacgacgagggcggcggcgagcaggacaccgaggcctacgacatgagcgccctgagaagcctgtacgacttcggcgagctgaagggcggcgacggcggcggcagcgccggcggcggcgccggcggcggcagcggcggcggcgccggcagccccccccaggcccacctgcccagcgagagacacagcctgccccagggcccccccagccccgagcccgacttcagcgtgttcagagacttcatcagcagaaaggtggccctggccgacggcgacctgagcgtgcccccctacgacgccttccagacctacgccttcgagggcgccgacagccccgccgccagcctgagcagcctgcacagcggcagcagcggcagcgagcaggacttcgcctacctgagcagctggggccccagattcagacccctggccgccctgtacgccggccacagaggcgacgacgaggcccaggccagctag

SEQ ID NO: 321930 - DNA, 570 bp, Artificial Sequence
  derived and/or modified sequence
atggaccgatccaaagaaaattgtatctcagggcctgtcaaggccactgctcccgttgggggacccaaaagggtactggtgactcaacagttcccttgccaaaaccctctcccggtaaacagtggacaggcacagcgcgtcctgtgtccaagtaactcttctcaacgtatcccactgcaagcacagaaactggtttcttcacataaacccgtgcagaatcagaaacagaagcagctccaggccacctcagtgccccaccccgtgagtaggccgctgaacaatacacagaagagcaaacagccgctgccttctgccccagagaacaaccctgaagaagaactcgccagtaaacagaagaatgaagagagcaaaaagcggcaatgggccctggaagattttgaaattggtaggcctctggggaaaggcaaattcgggaacgtgtaccttgcccgtgaaaagcagagcaagttcatcttagccttgaaagtgctgtttaaggctcaactggagaaagcgggcgttgagcaccagttaaggagagaagtggaaatccaaagtcacttgcgctag

SEQ ID NO: 321931 - DNA, 444 bp, Artificial Sequence
  derived and/or modified sequence
atggatcgatccaaggaaaactgtatttccggccctgtgaaagccacagcccccgtcggtgggccgaaacgcgtcttagtgacccagcagttcccttgccagaatcccctgccagtcaattccggccaggcacagcgagtgttgtgccccagtaactcatctcaaagaataccactgcaagctcaaaaacttgtaagctctcacaaaccagttcaaaaccaaaagcaaaagcagcttcaagctacatcagtgcctcatcctgtaagccgccctcttaacaacacccagaaatccaagcaaccgttgcctagtgctcccgaaaataaccctgaggaggaactggcatccaagcaaaaaaatgaagagtccaagaagagacaatgggccctggaggatttcgaaattggccgacctttggggaaggggaagttcggaaatgtgtag

SEQ ID NO: 321932 - DNA, 240 bp, Artificial Sequence
  derived and/or modified sequence
atggatcgaagcaaggagaactgcatctccgggcccgtgaaagcaactgcccccgtgggcgggcccaagcgggtcctggtaactcagcagtttccgtgccaaaaccccctgcctgttaacagtggacaggcccaaagagtcctgtgtcctagcaattcttcccaacgcatcccgctccaggcccagaaactggtttcctcccataaaccagttcaaaatcagaaacagaaacagctgtag

SEQ ID NO: 321933 - DNA, 321 bp, Artificial Sequence
  derived and/or modified sequence
atggaccgaagcaaagagaattgtatttcaggcccagtcaaagctactgccccagtcggagggccgaaacgcgtcctcgtgacacagcagtttccttgccagaatcccctgcctgtcaattctggccaagcccaacgagtactttgcccaagtaacagtagtcaaagaatccctctccaagcacagaagctggtgtcaagtcataagcccgtccagaaccagaagcaaaaacaactgcaggccacttcggttccccaccctgtaagccgccctcttaataacactcaaaaatctaaacaacccttgccaagcgcaccctag

SEQ ID NO: 321934 - DNA, 570 bp, Artificial Sequence
  derived and/or modified sequence
atggacaggagcaaggagaactgcatcagcggccctgtgaaggccacagcccctgtgggcggccccaagagggtgctggtgacccagcagttcccctgccagaaccccctgcctgtgaacagcggccaggcccagagggtgctgtgccccagcaacagcagccagaggatccccctgcaggcccagaagctggtgagcagccacaagcctgtgcagaaccagaagcagaagcagctgcaggccacctctgtgccccaccctgtgtcccggcccctgaacaacacccagaagagcaagcagcccctgcccagcgcccctgagaacaaccctgaggaggagctggccagcaagcagaagaatgaggagagcaagaagaggcagtgggccctggaggactttgaaattggccggcccctgggcaagggcaagtttggaaatgtgtacctggcccgggagaagcagagcaagttcatcctggccctgaaggtgctcttcaaggcccagctggagaaggccggcgtggagcaccagctgcggcgggaggtggagatccagagccacctgaggtag

SEQ ID NO: 321935 - DNA, 444 bp, Artificial Sequence
  derived and/or modified sequence
atggacaggagcaaggagaactgcatcagcggccctgtgaaggccacagcccctgtgggcggccccaagagggtgctggtgacccagcagttcccctgccagaaccccctgcctgtgaacagcggccaggcccagagggtgctgtgccccagcaacagcagccagaggatccccctgcaggcccagaagctggtgagcagccacaagcctgtgcagaaccagaagcagaagcagctgcaggccacctctgtgccccaccctgtgtcccggcccctgaacaacacccagaagagcaagcagcccctgcccagcgcccctgagaacaaccctgaggaggagctggccagcaagcagaagaatgaggagagcaagaagaggcagtgggccctggaggactttgaaattggccggcccctgggcaagggcaagtttggaaatgtgtag

SEQ ID NO: 321936 - DNA, 240 bp, Artificial Sequence
  derived and/or modified sequence
atggacaggagcaaggagaactgcatcagcggccctgtgaaggccacagcccctgtgggcggccccaagagggtgctggtgacccagcagttcccctgccagaaccccctgcctgtgaacagcggccaggcccagagggtgctgtgccccagcaacagcagccagaggatccccctgcaggcccagaagctggtgagcagccacaagcctgtgcagaaccagaagcagaagcagctgtag

SEQ ID NO: 321937 - DNA, 321 bp, Artificial Sequence
  derived and/or modified sequence
atggacaggagcaaggagaactgcatcagcggccctgtgaaggccacagcccctgtgggcggccccaagagggtgctggtgacccagcagttcccctgccagaaccccctgcctgtgaacagcggccaggcccagagggtgctgtgccccagcaacagcagccagaggatccccctgcaggcccagaagctggtgagcagccacaagcctgtgcagaaccagaagcagaagcagctgcaggccacctctgtgccccaccctgtgtcccggcccctgaacaacacccagaagagcaagcagcccctgcccagcgccccctag

SEQ ID NO: 321938 - DNA, 570 bp, Artificial Sequence
  derived and/or modified sequence
atggaccggagcaaggagaactgcatcagcggccccgtgaaggccactgccccagtggggggtcccaagcgggtcctggtgacccagcaattcccttgtcagaatccactgcctgtgaacagtgggcaggcacaaagagtcctgtgccccagcaacagctcccagaggatccccttacaagcccagaagctggtgtcaagtcacaagcccgtacagaaccagaaacaaaagcagctccaagcgacctctgtcccacatcccgttagccggcctcttaataatacccagaagagcaaacagcctctgccctctgcccccgagaataacccagaagaggagctggcttcaaagcagaagaatgaggaatccaagaagcggcagtgggccctagaggattttgaaattgggcggccactcggaaaaggcaagttcgggaatgtgtacctggcgagggaaaagcagagcaaattcattctggcattaaaggtccttttcaaggcccagttggagaaagccggtgtagagcatcagctgagacgggaggtcgagatccaaagccacctgcgctag

SEQ ID NO: 321939 - DNA, 444 bp, Artificial Sequence
  derived and/or modified sequence
atggaccggagcaaggagaactgcatcagcggccccgtgaaggccaccgcgccagtgggtggaccaaaaagggtgctggtaacacagcagtttccatgccagaaccccctcccagtcaatagcggacaagctcagcgggtgctgtgtcccagcaacagtagtcagaggattcccctgcaagctcagaaactcgtgtcgtcccacaagccagtgcagaatcagaagcagaaacaattacaggctacatctgtgccccatcccgtgagcaggccacttaacaatacacaaaaatcaaagcagcccctaccatccgccccggagaataatccagaagaggaactcgcttctaagcagaagaatgaagagagcaagaagcgccagtgggccttggaagacttcgagatcgggcggcctctcggcaaaggcaagttcggaaatgtgtag

SEQ ID NO: 321940 - DNA, 240 bp, Artificial Sequence
  derived and/or modified sequence
atggaccggagcaaggagaactgcatcagcggccccgtgaaggccactgctccagttggcggaccaaaaagagtgctcgtgactcaacagtttccttgtcagaatccgcttccagtgaactctgggcaggcccagcgggtcctgtgcccttccaactccagccagcgcatccctctgcaggcgcagaagttagtctcctcacacaagcccgtacagaaccaaaagcagaaacagctctag

SEQ ID NO: 321941 - DNA, 321 bp, Artificial Sequence
  derived and/or modified sequence
atggaccggagcaaggagaactgcatcagcggccccgtgaaggccacggcaccagtgggtggcccgaagcgagtgctcgtgacgcaacagttcccctgtcagaatccactgccagtgaactccggtcaagcacagcgtgtactgtgccccagcaatagtagccaacgaatcccattgcaagctcagaagttggtttcttcacataaacctgtacagaaccaaaagcaaaagcagctgcaggccacatcggtcccgcacccggtgagtcgacccctcaataatacacaaaagtccaagcagcctctccccagcgcaccttag

SEQ ID NO: 321942 - DNA, 570 bp, Artificial Sequence
  derived and/or modified sequence
atggacaggtccaaggagaattgcatctcaggaccagtcaaagccacagcccctgtcggcggacccaaacgagtactggtgacacagcagtttccttgccagaatcctctgccagttaactccggccaggctcagcgagtgctatgtccctccaactccagtcagcgtatacctctgcaggctcagaaactggtctcaagccacaagcccgtgcaaaatcagaaacaaaagcagttgcaggccactagtgtgccacaccccgtgagcaggcctctgaataatacccagaagagcaagcagcctttgcctagtgcccctgaaaacaaccctgaggaggagcttgcttcgaaacagaaaaatgaagagtcgaagaagcgacaatgggctctggaggatttcgagatcggcaggcccctaggcaaagggaagttcgggaacgtgtacctggccagagagaagcagtccaaattcatcttggctttaaaggttctctttaaagcgcagctggaaaaggcaggcgttgaacatcagctgaggcgggaagtcgagatccagtctcatctgagatag

SEQ ID NO: 321943 - DNA, 444 bp, Artificial Sequence
  derived and/or modified sequence
atggaccggtcgaaggaaaactgcatctccggcccagtgaaagccaccgcaccagtgggcggtccaaaacgggtcttggtgacacagcagttcccgtgtcagaatccgttacccgtcaattccggccaggcccaaagggtcctgtgcccgtccaactcgtcgcaacggattcctctccaggctcagaagctggtctcctcacataaacccgtccagaatcagaagcagaagcagttgcaggccacttccgtaccccaccctgtgtcaaggccccttaacaacacccagaagtctaagcagcctttgccatccgcaccggagaataatccagaagaggaattagcatcaaagcagaaaaatgaggagtctaaaaaacggcagtgggccctcgaagactttgagattggccgtcctttgggaaaggggaagtttggaaacgtgtag

SEQ ID NO: 321944 - DNA, 240 bp, Artificial Sequence
  derived and/or modified sequence
atggatcgaagtaaagagaattgcatttccggtcccgtgaaggccacagcacccgtaggaggaccaaaaagagtgctggttactcagcaatttccatgtcagaaccctcttcccgtgaacagcggtcaggcgcagagggtgctttgtcccagcaatagtagtcagcggatccctttacaggcccagaaactcgtcagcagccataagcccgtgcagaaccagaaacagaagcagttgtag

SEQ ID NO: 321945 - DNA, 321 bp, Artificial Sequence
  derived and/or modified sequence
atggataggtctaaggagaactgcatttctggacccgtcaaagccacggccccagtcggaggtcctaaaagggttctcgttactcagcaattcccatgccagaaccctctgcccgtgaactcgggtcaggctcagcgcgtgttgtgcccaagcaactccagccaacgtatccctctgcaggcccagaaattagtatcatcacacaagccagtccagaatcaaaagcagaagcagttgcaggccacaagcgtgcctcatcctgtgtccaggcctctgaataacactcaaaagtcaaagcaaccactcccctctgcaccttag

SEQ ID NO: 321946 - DNA, 879 bp, Artificial Sequence
  derived and/or modified sequence
aatcggctttctagctagagggtttaactcctatttaaaaagaagaacctttgaattctaacggctgagctcttggaagacttgggtccttgggtcgcagggtctcactccattgcccaggccagagtgcggggatatttgataagaaacttcagtgaaggccgggcgcggtggctcatgcccgtaatcccagcattttcggaggccgaggctggagtgcaatggtgtgatctcagctcactgcaacctctgcttcctgggtttaagtgattctcctgcctcagcctcccgagtagctgggattacaggcatcatggaccgatctaaagaaaactgcatttcaggacctgttaaggctacagctccagttggaggtccaaaacgtgttctcgtgactcagcaatttccttgtcagaatccattacctgtaaatagtggccaggctcagcgggtcttgtgtccttcaaattcttcccagcgcattcctttgcaagcacaaaagcttgtctccagtcacaagccggttcagaatcagaagcagaagcaattgcaggcaaccagtgtacctcatcctgtctccaggccactgaataacacccaaaagagcaagcagcccctgccatcggcacctgaaaataatcctgaggaggaactggcatcaaaacagaaaaatgaagaatcaaaaaagaggcagtgggctttggaagactttgaaattggtcgccctctgggtaaaggaaagtttggtaatgtttatttggcaagagaaaagcaaagcaagtttattctggctcttaaagtgttatttaaagctcagctggagaaagccggagtggagcatcagctcagaagagaagtagaaatacagtcccaccttcg

SEQ ID NO: 321947 - DNA, 744 bp, Artificial Sequence
  derived and/or modified sequence
ctcagtggcggacgaggacggcggggacaaggggcggctggtcggagtggcggagcgtcaagtcccctgtcggttcctccgtccctgagtgtccttggcgctgccttgtgcccgcccagcgcctttgcatccgctcctgggcaccgaggcgccctgtaggatactgcttgttacttattacagctagagggtctcactccattgcccaggccagagtgcggggatatttgataagaaacttcagtgaaggccgggcgcggtggctcatgcccgtaatcccagcattttcggaggccgaggcatcatggaccgatctaaagaaaactgcatttcaggacctgttaaggctacagctccagttggaggtccaaaacgtgttctcgtgactcagcaatttccttgtcagaatccattacctgtaaatagtggccaggctcagcgggtcttgtgtccttcaaattcttcccagcgcattcctttgcaagcacaaaagcttgtctccagtcacaagccggttcagaatcagaagcagaagcaattgcaggcaaccagtgtacctcatcctgtctccaggccactgaataacacccaaaagagcaagcagcccctgccatcggcacctgaaaataatcctgaggaggaactggcatcaaaacagaaaaatgaagaatcaaaaaagaggcagtgggctttggaagactttgaaattggtcgccctctgggtaaaggaaagtttggtaatgt

SEQ ID NO: 321948 - DNA, 584 bp, Artificial Sequence
  derived and/or modified sequence
tgagctcttggaagacttgggtccttgggtcgcagggtctcactccattgcccaggccagagtgcggggatatttgataagaaacttcagtgaaggccgggcgcggtggctcatgcccgtaatcccagcattttcggaggccgagcaggtatgccagtaggctgcacagggatggaagtgatccattagaggagagatgatggagcagcaagaccatcaggagtgaagactccgtgacagaggatgggacgcagtgcccaaggggaggttggccttgcagggaaagcacatgcctgtccctccctcattagcttcatttggacaaaacatgtaaaatccggcatcatggaccgatctaaagaaaactgcatttcaggacctgttaaggctacagctccagttggaggtccaaaacgtgttctcgtgactcagcaatttccttgtcagaatccattacctgtaaatagtggccaggctcagcgggtcttgtgtccttcaaattcttcccagcgcattcctttgcaagcacaaaagcttgtctccagtcacaagccggttcagaatcagaagcagaagcaattgca

SEQ ID NO: 321949 - DNA, 810 bp, Artificial Sequence
  derived and/or modified sequence
cctttgaattctaacggctgagctcttggaagacttgggtccttgggtcgcaggtgggagccgacgggtgggtagaccgtgggggatatctcagtggcggacgaggacggcggggacaaggggcggctggtcggagtggcggagcgtcaagtcccctgtcggttcctccgtccctgagtgtccttggcgctgccttgtgcccgcccagcgcctttgcatccgctcctgggcaccgaggcgccctgtaggatactgcttgttacttattacagctagagggtctcactccattgcccaggccagagtgcggggatatttgataagaaacttcagtgaaggccgggcgcggtggctcatgcccgtaatcccagcattttcggaggccgaggctggagtgcaatggtgtgatctcagctcactgcaacctctgcttcctgggtttaagtgattctcctgcctcagcctcccgagtagctgggattacaggcatcatggaccgatctaaagaaaactgcatttcaggacctgttaaggctacagctccagttggaggtccaaaacgtgttctcgtgactcagcaatttccttgtcagaatccattacctgtaaatagtggccaggctcagcgggtcttgtgtccttcaaattcttcccagcgcattcctttgcaagcacaaaagcttgtctccagtcacaagccggttcagaatcagaagcagaagcaattgcaggcaaccagtgtacctcatcctgtctccaggccactgaataacacccaaaagagcaagcagcccctgccatcggcacctg

SEQ ID NO: 321950 - DNA, 570 bp, Artificial Sequence
  derived and/or modified sequence
atggacagaagcaaggagaactgcatcagcggccccgtgaaggccaccgcccccgtgggcggccccaagagagtgctggtgacccagcagttcccctgccagaaccccctgcccgtgaacagcggccaggcccagagagtgctgtgccccagcaacagcagccagagaatccccctgcaggcccagaagctggtgagcagccacaagcccgtgcagaaccagaagcagaagcagctgcaggccaccagcgtgccccaccccgtgagcagacccctgaacaacacccagaagagcaagcagcccctgcccagcgcccccgagaacaaccccgaggaggagctggccagcaagcagaagaacgaggagagcaagaagagacagtgggccctggaggacttcgagatcggcagacccctgggcaagggcaagttcggcaacgtgtacctggccagagagaagcagagcaagttcatcctggccctgaaggtgctgttcaaggcccagctggagaaggccggcgtggagcaccagctgagaagagaggtggagatccagagccacctgagatag

SEQ ID NO: 321951 - DNA, 444 bp, Artificial Sequence
  derived and/or modified sequence
atggacagaagcaaggagaactgcatcagcggccccgtgaaggccaccgcccccgtgggcggccccaagagagtgctggtgacccagcagttcccctgccagaaccccctgcccgtgaacagcggccaggcccagagagtgctgtgccccagcaacagcagccagagaatccccctgcaggcccagaagctggtgagcagccacaagcccgtgcagaaccagaagcagaagcagctgcaggccaccagcgtgccccaccccgtgagcagacccctgaacaacacccagaagagcaagcagcccctgcccagcgcccccgagaacaaccccgaggaggagctggccagcaagcagaagaacgaggagagcaagaagagacagtgggccctggaggacttcgagatcggcagacccctgggcaagggcaagttcggcaacgtgtag

SEQ ID NO: 321952 - DNA, 240 bp, Artificial Sequence
  derived and/or modified sequence
atggacagaagcaaggagaactgcatcagcggccccgtgaaggccaccgcccccgtgggcggccccaagagagtgctggtgacccagcagttcccctgccagaaccccctgcccgtgaacagcggccaggcccagagagtgctgtgccccagcaacagcagccagagaatccccctgcaggcccagaagctggtgagcagccacaagcccgtgcagaaccagaagcagaagcagctgtag

SEQ ID NO: 321953 - DNA, 321 bp, Artificial Sequence
  derived and/or modified sequence
atggacagaagcaaggagaactgcatcagcggccccgtgaaggccaccgcccccgtgggcggccccaagagagtgctggtgacccagcagttcccctgccagaaccccctgcccgtgaacagcggccaggcccagagagtgctgtgccccagcaacagcagccagagaatccccctgcaggcccagaagctggtgagcagccacaagcccgtgcagaaccagaagcagaagcagctgcaggccaccagcgtgccccaccccgtgagcagacccctgaacaacacccagaagagcaagcagcccctgcccagcgccccctag

SEQ ID NO: 321954 - protein, 687 aa, Artificial Sequence
  derived and/or modified sequence
MAEELVLERCDLELETNGRDHHTADLCREKLVVRRGQPFWLTLHFEGRNYEASVDSLTFSVVTGPAPSQEAGTKARFPLRDAVEEGDWTATVVDQQDCTLSLQLTTPANAPIGLYRLSLEASTGYQGSSFVLGHFILLFNAWCPADAVYLDSEEERQEYVLTQQGFIYQGSAKFIKNIPWNFGQFEDGILDICLILLDVNPKFLKNAGRDCSRRSSPVYVGRVVSGMVNCNDDQGVLLGRWDNNYGDGVSPMSWIGSVDILRRWKNHGCQRVKYGQCWVFAAVACTVLRCLGIPTRVVTNYNSAHDQNSNLLIEYFRNEFGEIQGDKSEMIWNFHCWVESWMTRPDLQPGYEGWQALDPTPQEKSEGTYCCGPVPVRAIKEGDLSTKYDAPFVFAEVNADVVDWIQQDDGSVHKSINRSLIVGLKISTKSVGRDEREDITHTYKYPEGSSEEREAFTRANHLNKLAEKEETGMAMRIRVGQSMNMGSDFDVFAHITNNTAEEYVCRLLLCARTVSYNGILGPECGTKYLLNLNLEPFSEKSVPLCILYEKYRDCLTESNLIKVRALLVEPVINSYLLAERDLYLENPEIKIRILGEPKQKRKLVAEVSLQNPLPVALEGCTFTVEGAGLTEEQKTVEIPDPVEAGEEVKVRMDLLPLHMGLHKLVVNFESDKLKAVKGFRNVIIGPA

SEQ ID NO: 321955 - protein, 281 aa, Artificial Sequence
  derived and/or modified sequence
MAEELVLERCDLELETNGRDHHTADLCREKLVVRRGQPFWLTLHFEGRNYEASVDSLTFSVVTGPAPSQEAGTKARFPLRDAVEEGDWTATVVDQQDCTLSLQLTTPANAPIGLYRLSLEASTGYQGSSFVLGHFILLFNAWCPADAVYLDSEEERQEYVLTQQGFIYQGSAKFIKNIPWNFGQFEDGILDICLILLDVNPKFLKNAGRDCSRRSSPVYVGRVVSGMVNCNDDQGVLLGRWDNNYGDGVSPMSWIGSVDILRRWKNHGCQRVKYGQCWVFA

SEQ ID NO: 321956 - protein, 160 aa, Artificial Sequence
  derived and/or modified sequence
MAEELVLERCDLELETNGRDHHTADLCREKLVVRRGQPFWLTLHFEGRNYEASVDSLTFSVVTGPAPSQEAGTKARFPLRDAVEEGDWTATVVDQQDCTLSLQLTTPANAPIGLYRLSLEASTGYQGSSFVLGHFILLFNAWCPADAVYLDSEEERQEYV

SEQ ID NO: 321957 - protein, 606 aa, Artificial Sequence
  derived and/or modified sequence
MAEELVLERCDLELETNGRDHHTADLCREKLVVRRGQPFWLTLHFEGRNYEASVDSLTFSVVTADAVYLDSEEERQEYVLTQQGFIYQGSAKFIKNIPWNFGQFEDGILDICLILLDVNPKFLKNAGRDCSRRSSPVYVGRVVSGMVNCNDDQGVLLGRWDNNYGDGVSPMSWIGSVDILRRWKNHGCQRVKYGQCWVFAAVACTVLRCLGIPTRVVTNYNSAHDQNSNLLIEYFRNEFGEIQGDKSEMIWNFHCWVESWMTRPDLQPGYEGWQALDPTPQEKSEGTYCCGPVPVRAIKEGDLSTKYDAPFVFAEVNADVVDWIQQDDGSVHKSINRSLIVGLKISTKSVGRDEREDITHTYKYPEGSSEEREAFTRANHLNKLAEKEETGMAMRIRVGQSMNMGSDFDVFAHITNNTAEEYVCRLLLCARTVSYNGILGPECGTKYLLNLNLEPFSEKSVPLCILYEKYRDCLTESNLIKVRALLVEPVINSYLLAERDLYLENPEIKIRILGEPKQKRKLVAEVSLQNPLPVALEGCTFTVEGAGLTEEQKTVEIPDPVEAGEEVKVRMDLLPLHMGLHKLVVNFESDKLKAVKGFRNVIIGPA

SEQ ID NO: 321958 - protein, 627 aa, Artificial Sequence
  derived and/or modified sequence
MAEGPAPSQEAGTKARFPLRDAVEEGDWTATVVDQQDCTLSLQLTTPANAPIGLYRLSLEASTGYQGSSFVLGHFILLFNAWCPADAVYLDSEEERQEYVLTQQGFIYQGSAKFIKNIPWNFGQFEDGILDICLILLDVNPKFLKNAGRDCSRRSSPVYVGRVVSGMVNCNDDQGVLLGRWDNNYGDGVSPMSWIGSVDILRRWKNHGCQRVKYGQCWVFAAVACTVLRCLGIPTRVVTNYNSAHDQNSNLLIEYFRNEFGEIQGDKSEMIWNFHCWVESWMTRPDLQPGYEGWQALDPTPQEKSEGTYCCGPVPVRAIKEGDLSTKYDAPFVFAEVNADVVDWIQQDDGSVHKSINRSLIVGLKISTKSVGRDEREDITHTYKYPEGSSEEREAFTRANHLNKLAEKEETGMAMRIRVGQSMNMGSDFDVFAHITNNTAEEYVCRLLLCARTVSYNGILGPECGTKYLLNLNLEPFSEKSVPLCILYEKYRDCLTESNLIKVRALLVEPVINSYLLAERDLYLENPEIKIRILGEPKQKRKLVAEVSLQNPLPVALEGCTFTVEGAGLTEEQKTVEIPDPVEAGEEVKVRMDLLPLHMGLHKLVVNFESDKLKAVKGFRNVIIGPA

SEQ ID NO: 321959 - DNA, 2064 bp, Artificial Sequence
  derived and/or modified sequence
atggccgaggagctggtgctggagagatgcgacctggagctggagaccaacggcagagaccaccacaccgccgacctgtgcagagagaagctggtggtgagaagaggccagcccttctggctgaccctgcacttcgagggcagaaactacgaggccagcgtggacagcctgaccttcagcgtggtgaccggccccgcccccagccaggaggccggcaccaaggccagattccccctgagagacgccgtggaggagggcgactggaccgccaccgtggtggaccagcaggactgcaccctgagcctgcagctgaccacccccgccaacgcccccatcggcctgtacagactgagcctggaggccagcaccggctaccagggcagcagcttcgtgctgggccacttcatcctgctgttcaacgcctggtgccccgccgacgccgtgtacctggacagcgaggaggagagacaggagtacgtgctgacccagcagggcttcatctaccagggcagcgccaagttcatcaagaacatcccctggaacttcggccagttcgaggacggcatcctggacatctgcctgatcctgctggacgtgaaccccaagttcctgaagaacgccggcagagactgcagcagaagaagcagccccgtgtacgtgggcagagtggtgagcggcatggtgaactgcaacgacgaccagggcgtgctgctgggcagatgggacaacaactacggcgacggcgtgagccccatgagctggatcggcagcgtggacatcctgagaagatggaagaaccacggctgccagagagtgaagtacggccagtgctgggtgttcgccgccgtggcctgcaccgtgctgagatgcctgggcatccccaccagagtggtgaccaactacaacagcgcccacgaccagaacagcaacctgctgatcgagtacttcagaaacgagttcggcgagatccagggcgacaagagcgagatgatctggaacttccactgctgggtggagagctggatgaccagacccgacctgcagcccggctacgagggctggcaggccctggaccccaccccccaggagaagagcgagggcacctactgctgcggccccgtgcccgtgagagccatcaaggagggcgacctgagcaccaagtacgacgcccccttcgtgttcgccgaggtgaacgccgacgtggtggactggatccagcaggacgacggcagcgtgcacaagagcatcaacagaagcctgatcgtgggcctgaagatcagcaccaagagcgtgggcagagacgagagagaggacatcacccacacctacaagtaccccgagggcagcagcgaggagagagaggccttcaccagagccaaccacctgaacaagctggccgagaaggaggagaccggcatggccatgagaatcagagtgggccagagcatgaacatgggcagcgacttcgacgtgttcgcccacatcaccaacaacaccgccgaggagtacgtgtgcagactgctgctgtgcgccagaaccgtgagctacaacggcatcctgggccccgagtgcggcaccaagtacctgctgaacctgaacctggagcccttcagcgagaagagcgtgcccctgtgcatcctgtacgagaagtacagagactgcctgaccgagagcaacctgatcaaggtgagagccctgctggtggagcccgtgatcaacagctacctgctggccgagagagacctgtacctggagaaccccgagatcaagatcagaatcctgggcgagcccaagcagaagagaaagctggtggccgaggtgagcctgcagaaccccctgcccgtggccctggagggctgcaccttcaccgtggagggcgccggcctgaccgaggagcagaagaccgtggagatccccgaccccgtggaggccggcgaggaggtgaaggtgagaatggacctgctgcccctgcacatgggcctgcacaagctggtggtgaacttcgagagcgacaagctgaaggccgtgaagggcttcagaaacgtgatcatcggccccgcctag

SEQ ID NO: 321960 - DNA, 1821 bp, Artificial Sequence
  derived and/or modified sequence
atggccgaggagctggtgctggagagatgcgacctggagctggagaccaacggcagagaccaccacaccgccgacctgtgcagagagaagctggtggtgagaagaggccagcccttctggctgaccctgcacttcgagggcagaaactacgaggccagcgtggacagcctgaccttcagcgtggtgaccgccgacgccgtgtacctggacagcgaggaggagagacaggagtacgtgctgacccagcagggcttcatctaccagggcagcgccaagttcatcaagaacatcccctggaacttcggccagttcgaggacggcatcctggacatctgcctgatcctgctggacgtgaaccccaagttcctgaagaacgccggcagagactgcagcagaagaagcagccccgtgtacgtgggcagagtggtgagcggcatggtgaactgcaacgacgaccagggcgtgctgctgggcagatgggacaacaactacggcgacggcgtgagccccatgagctggatcggcagcgtggacatcctgagaagatggaagaaccacggctgccagagagtgaagtacggccagtgctgggtgttcgccgccgtggcctgcaccgtgctgagatgcctgggcatccccaccagagtggtgaccaactacaacagcgcccacgaccagaacagcaacctgctgatcgagtacttcagaaacgagttcggcgagatccagggcgacaagagcgagatgatctggaacttccactgctgggtggagagctggatgaccagacccgacctgcagcccggctacgagggctggcaggccctggaccccaccccccaggagaagagcgagggcacctactgctgcggccccgtgcccgtgagagccatcaaggagggcgacctgagcaccaagtacgacgcccccttcgtgttcgccgaggtgaacgccgacgtggtggactggatccagcaggacgacggcagcgtgcacaagagcatcaacagaagcctgatcgtgggcctgaagatcagcaccaagagcgtgggcagagacgagagagaggacatcacccacacctacaagtaccccgagggcagcagcgaggagagagaggccttcaccagagccaaccacctgaacaagctggccgagaaggaggagaccggcatggccatgagaatcagagtgggccagagcatgaacatgggcagcgacttcgacgtgttcgcccacatcaccaacaacaccgccgaggagtacgtgtgcagactgctgctgtgcgccagaaccgtgagctacaacggcatcctgggccccgagtgcggcaccaagtacctgctgaacctgaacctggagcccttcagcgagaagagcgtgcccctgtgcatcctgtacgagaagtacagagactgcctgaccgagagcaacctgatcaaggtgagagccctgctggtggagcccgtgatcaacagctacctgctggccgagagagacctgtacctggagaaccccgagatcaagatcagaatcctgggcgagcccaagcagaagagaaagctggtggccgaggtgagcctgcagaaccccctgcccgtggccctggagggctgcaccttcaccgtggagggcgccggcctgaccgaggagcagaagaccgtggagatccccgaccccgtggaggccggcgaggaggtgaaggtgagaatggacctgctgcccctgcacatgggcctgcacaagctggtggtgaacttcgagagcgacaagctgaaggccgtgaagggcttcagaaacgtgatcatcggccccgcctag

SEQ ID NO: 321961 - DNA, 1884 bp, Artificial Sequence
  derived and/or modified sequence
atggccgagggccccgcccccagccaggaggccggcaccaaggccagattccccctgagagacgccgtggaggagggcgactggaccgccaccgtggtggaccagcaggactgcaccctgagcctgcagctgaccacccccgccaacgcccccatcggcctgtacagactgagcctggaggccagcaccggctaccagggcagcagcttcgtgctgggccacttcatcctgctgttcaacgcctggtgccccgccgacgccgtgtacctggacagcgaggaggagagacaggagtacgtgctgacccagcagggcttcatctaccagggcagcgccaagttcatcaagaacatcccctggaacttcggccagttcgaggacggcatcctggacatctgcctgatcctgctggacgtgaaccccaagttcctgaagaacgccggcagagactgcagcagaagaagcagccccgtgtacgtgggcagagtggtgagcggcatggtgaactgcaacgacgaccagggcgtgctgctgggcagatgggacaacaactacggcgacggcgtgagccccatgagctggatcggcagcgtggacatcctgagaagatggaagaaccacggctgccagagagtgaagtacggccagtgctgggtgttcgccgccgtggcctgcaccgtgctgagatgcctgggcatccccaccagagtggtgaccaactacaacagcgcccacgaccagaacagcaacctgctgatcgagtacttcagaaacgagttcggcgagatccagggcgacaagagcgagatgatctggaacttccactgctgggtggagagctggatgaccagacccgacctgcagcccggctacgagggctggcaggccctggaccccaccccccaggagaagagcgagggcacctactgctgcggccccgtgcccgtgagagccatcaaggagggcgacctgagcaccaagtacgacgcccccttcgtgttcgccgaggtgaacgccgacgtggtggactggatccagcaggacgacggcagcgtgcacaagagcatcaacagaagcctgatcgtgggcctgaagatcagcaccaagagcgtgggcagagacgagagagaggacatcacccacacctacaagtaccccgagggcagcagcgaggagagagaggccttcaccagagccaaccacctgaacaagctggccgagaaggaggagaccggcatggccatgagaatcagagtgggccagagcatgaacatgggcagcgacttcgacgtgttcgcccacatcaccaacaacaccgccgaggagtacgtgtgcagactgctgctgtgcgccagaaccgtgagctacaacggcatcctgggccccgagtgcggcaccaagtacctgctgaacctgaacctggagcccttcagcgagaagagcgtgcccctgtgcatcctgtacgagaagtacagagactgcctgaccgagagcaacctgatcaaggtgagagccctgctggtggagcccgtgatcaacagctacctgctggccgagagagacctgtacctggagaaccccgagatcaagatcagaatcctgggcgagcccaagcagaagagaaagctggtggccgaggtgagcctgcagaaccccctgcccgtggccctggagggctgcaccttcaccgtggagggcgccggcctgaccgaggagcagaagaccgtggagatccccgaccccgtggaggccggcgaggaggtgaaggtgagaatggacctgctgcccctgcacatgggcctgcacaagctggtggtgaacttcgagagcgacaagctgaaggccgtgaagggcttcagaaacgtgatcatcggccccgcctag

SEQ ID NO: 321962 - DNA, 2064 bp, Artificial Sequence
  derived and/or modified sequence
atggctgaggagttagtgctcgaaaggtgcgacttggagctggagactaatggacgcgaccaccataccgccgacttatgtcgtgagaagctcgttgtacggcggggccaacccttttggcttacactgcactttgagggacgcaattacgaggctagcgtcgactctctgactttcagcgtcgttaccggccctgcccccagtcaggaagccggcactaaggcccgcttccctctgagagacgccgtggaggagggcgactggacagccacggtggttgatcaacaggactgtacactgtcactccagctcactactcccgcgaatgccccaattgggttatacaggttatcactagaggcctccacaggctaccagggttcctccttcgttctgggacactttattctcctgttcaatgcctggtgccctgcagacgctgtgtatctcgactcagaggaggaacgccaggagtatgtgctgactcaacaaggatttatctaccaaggatcggcaaagttcataaagaatatcccttggaacttcggacagtttgaagacggtattttggatatctgcctgatcctgctggacgtgaatccaaagtttttaaaaaatgctggacgcgactgctctcgtcgctcatccccagtctacgtcggccgcgtagtgtcgggtatggtgaattgcaacgacgaccaaggggtgttgctcggccgatgggataataactatggcgacggagtttccccaatgagctggatcgggagcgtcgatattctccgtagatggaagaaccatggctgtcagcgagtgaagtatgggcagtgttgggtatttgcagcggtggcctgcaccgtgttgcgctgtctcggcattcctacaagggtggtgacgaattacaattctgcccacgaccagaactcgaacctgctgatcgaatattttagaaatgagttcggcgagatccaaggggacaagtccgaaatgatctggaactttcactgctgggtggaatcttggatgaccagaccggacttgcagcccgggtatgaagggtggcaggctctggatcccacgccccaagagaagtccgagggtacatactgttgcggccctgtgcccgtccgggctattaaagaaggcgacctgagcactaaatatgacgctccctttgttttcgctgaagtgaacgcagatgtcgtggattggatccagcaagatgatggttcagttcataagtctataaaccggtccctcatcgtgggcttgaagatttctaccaaatccgtggggagggacgagcgcgaggatatcacacacacctacaagtatccggaaggtagcagtgaagagcgagaggcctttacacgtgcgaaccatcttaacaagctcgccgagaaggaggagaccggtatggccatgagaattagggtgggccagtcaatgaacatgggcagcgactttgatgttttcgcccatatcaccaataacacggccgaagagtacgtttgtcgattactgctgtgtgctagaacagtctcatataacggaattctggggccagaatgcgggaccaagtacctcctgaatctaaatttggagcccttctcagaaaagtctgtccctctgtgcatcctgtacgagaaataccgcgattgtttgacggaaagcaatctgatcaaggtgagggccctactggtcgagccagtcattaattcctatctgttggccgagagggatctctacctggaaaatccggaaatcaaaataaggattttaggggagccgaagcaaaagcgtaaacttgtggccgaagtgagcctacaaaacccactcccagtggccctagagggatgcacctttaccgttgagggtgccggcttaacagaggaacagaagacggtggaaatcccggaccctgttgaggccggcgaggaggtaaaagttcggatggatttattgcctctgcatatggggctgcacaagttggtcgtcaacttcgagtccgataagctaaaggctgtgaagggcttcaggaacgtcatcatcggccccgcctag

SEQ ID NO: 321963 - DNA, 1821 bp, Artificial Sequence
  derived and/or modified sequence
atggcagaggagttagtgctcgaaagatgcgacctggagctggagacaaatggtagagaccaccacactgccgacctctgtcgggaaaagcttgttgttcgaagaggacagccattttggttgacactccacttcgaagggcgaaattatgaagctagcgtggattccttgacctttagcgtcgtaacagccgacgccgtgtacctagactctgaggaggaacgtcaggagtacgtgctaactcagcagggtttcatctatcaagggagtgctaagttcattaagaacataccctggaatttcggccaattcgaggacgggattctagacatttgcctgattctactcgacgtcaatccaaagttcctgaagaatgccggtcgagactgcagcagacgcagctctcctgtctacgttggaagggttgtgtccggaatggtaaactgtaacgatgatcagggcgtcctgctcgggagatgggacaacaattatggggacggcgtgagtccgatgtcttggatcggctcggtcgacattctgcggcggtggaagaaccacggctgtcagcgagttaagtatgggcagtgctgggtattcgctgcagttgcctgtactgtcttgcggtgcttggggattcccacccgcgtggttactaattacaactccgcacatgaccaaaatagcaatctgcttattgagtactttagaaatgagttcggggagatccagggtgacaagtctgagatgatttggaacttccactgctgggtggagagctggatgactcggcctgatctgcagcctggctatgaaggctggcaggcactcgatcccacaccccaagaaaaaagcgaagggacatactgttgcggacctgttccagtgcgagcaatcaaggagggggatcttagcacaaaatacgatgctcctttcgtcttcgctgaagtgaacgccgatgtggtggattggatccagcaggacgatggaagtgtgcataaaagcattaaccgcagcttaatcgtcgggttgaagatcagtactaagagtgtcggcagagacgaaagagaagacattacacatacctacaaatatccggagggcagctcggaggagagagaagctttcaccagggccaaccatctcaataagctggcagagaaagaagagacgggcatggccatgcggatccgcgtgggccaatctatgaacatgggctctgacttcgacgtgttcgcccatattactaacaatacagcagaggagtatgtatgcagactcctgctgtgtgcacgcacagtttcatacaatggcattctagggcccgagtgtggcaccaaatatctgctgaacctgaacctggagccattcagtgaaaagtccgtcccattgtgcattctctatgagaagtatagggactgtctaaccgaatcgaaccttatcaaggtgcgcgctctgcttgttgagcccgtaataaactcttacctcttagccgagagagatctttatctagagaatcccgagattaagatccgaattttaggagaacctaaacagaagcggaaactggtagccgaggtgagtctgcagaaccctctgccagtggcattggaaggatgcacctttacagtagaaggcgcaggcctgaccgaggagcagaaaaccgtagaaatcccggatccagtggaggccggtgaggaagttaaagttcgcatggacttgctgccactacatatgggcctccacaaactagtggtcaatttcgagtccgacaagctcaaggctgtgaaaggttttagaaatgtgatcattggacccgcctag

SEQ ID NO: 321964 - DNA, 1884 bp, Artificial Sequence
  derived and/or modified sequence
atggcagaaggccccgcaccttcccaggaagctggcacaaaggcccgattcccattacgagatgctgttgaggagggggactggacagcaacggtagtcgatcagcaagattgtactctgagcctgcaattgactacccccgccaacgcccctatcggactttacaggcttagcctggaagcaagcacggggtaccagggaagttccttcgtgctcggacatttcattcttttattcaatgcttggtgtcccgccgacgcggtgtatcttgactccgaagaagagcgtcaggaatatgtcttaactcagcagggtttcatctaccagggtagtgccaagttcattaagaacatcccttggaattttggccagtttgaggatggaattctggatatctgcctgatactgctggatgtaaacccaaagttcctgaagaacgccgggcgggactgcagcaggcggtcgagccccgtgtatgtaggaagggtcgtatcaggtatggttaactgcaatgatgaccagggcgttctgctgggcaggtgggacaacaattacggcgacggcgtttccccgatgtcctggatagggagcgtggatatcttgcgtagatggaagaaccacgggtgccagagagtcaagtacgggcaatgctgggtgttcgccgccgtggcttgcacagtactccgatgcctgggaatccccacaagagtggtgacaaattataatagcgctcacgatcagaactctaatctcttaatagagtactttaggaacgagttcggagagatccagggcgacaagtctgaaatgatatggaactttcattgctgggtggagagctggatgactagacccgacttacaaccaggttatgaagggtggcaggcgctcgatccaactccccaggagaagtcggagggaacatattgctgtggacccgttcccgtgagagccatcaaggaaggcgacttgtccactaaatatgatgcaccctttgtgttcgccgaagtaaacgccgacgtagtcgattggatccaacaggacgatgggtctgtacataaaagcataaataggtcattaatcgtcggcctaaagatttctaccaagagcgtcggccgtgatgagagagaagatattacccatacgtataagtacccggagggttctagtgaggagcgcgaggcattcactcgcgccaatcatcttaataagttggctgagaaggaggagaccgggatggcaatgcgaatccgggtcggccagtccatgaacatgggcagtgacttcgacgtgtttgcccacattacaaacaatacagcagaagagtatgtgtgtagactgttactatgtgcccgcactgtgtcatacaatggcatcttggggcctgaatgcggaactaagtatctcctgaatctaaacctggagccgttctctgagaagtctgtgccactatgcatcctttacgagaagtaccgcgattgcctgaccgagagcaaccttatcaaagtccgggctcttctagtcgagccggtaatcaatagctatctgctcgccgagcgcgatctgtacctcgagaaccctgaaatcaagatcaggatcctgggcgaacctaagcagaaacggaaattggtcgctgaggtgagtctccagaacccactgccagtggctctggaagggtgcacgttcaccgtggaaggggccgggctgaccgaagagcagaaaaccgtggagatcccggatcccgtggaagctggagaagaagtgaaggtccggatggaccttctgccactacatatgggacttcacaagctggtggtcaactttgagagcgacaagctcaaggccgtgaaaggattccgcaacgtcatcattggacccgcttag

SEQ ID NO: 321965 - DNA, 2064 bp, Artificial Sequence
  derived and/or modified sequence
atggccgaggagctggtgctggagcgctgtgacctggagctggagaccaacggccgggaccaccacacagctgacctgtgccgggagaagctggtggtgcggcggggccagcccttctggctgaccctgcactttgagggcaggaactatgaggcctctgtggacagcctgaccttctctgtggtgactggacctgcccccagccaggaggccggcaccaaggcccgcttccccctgagagatgctgtggaggagggggactggacagccaccgtggtggaccagcaggactgcaccctgagcctgcagctgaccaccccagccaatgcccccatcggcctgtaccgcctgagcctggaggccagcacaggctaccagggcagcagctttgtgctgggccacttcatcctgctcttcaatgcctggtgcccagcagatgctgtgtacctggacagcgaggaggagcggcaggagtatgtgctgacccagcagggcttcatctaccagggcagcgccaagttcatcaagaacatcccctggaactttggccagtttgaagatggcatcctggacatctgcctgatcctgctggatgtgaaccccaagttcctgaagaatgccggccgggactgcagcagaagaagcagccctgtgtatgtgggccgggtggtgtctggcatggtgaactgcaatgatgaccagggcgtgctgctgggccgctgggacaacaactatggagatggagtgagccccatgtcctggattggctctgtggacatcctgcggcgctggaagaaccacggctgccagagggtgaagtatggccagtgctgggtgtttgctgctgtggcctgcaccgtgctgcgctgcctgggcatccccaccagggtggtgaccaactacaacagcgcccatgaccagaacagcaacctgctgattgagtacttcagaaatgaatttggagagatccagggcgacaagtctgagatgatctggaacttccactgctgggtggagagctggatgaccaggccagacctgcagcccggctatgagggctggcaggccctggaccccaccccccaggagaagtctgagggcacctactgctgcggccctgtgcctgtgcgggccatcaaggagggggacctgagcaccaagtatgatgccccctttgtgtttgctgaggtgaatgctgatgtggtggactggatccagcaggatgatggctctgtgcacaagagcatcaacagaagcctgattgtgggcctgaagatcagcaccaagtctgtgggcagagatgaaagagaggacatcacccacacctacaagtacccagagggcagcagcgaggagcgggaggccttcacccgggccaaccacctgaacaagctggccgagaaggaggagaccggcatggccatgaggatccgggtgggccagagcatgaacatgggcagtgactttgatgtgtttgcccacatcaccaacaacacagctgaggagtatgtgtgccgcctgctgctgtgtgccaggacagtgtcctacaacggcatcctgggcccagaatgtggcaccaagtacctgctgaacctgaacctggagcccttcagcgagaagtctgtgcccctgtgcatcctgtatgagaagtacagagactgcctgacagagagcaacctgatcaaggtgcgggccctgctggtggagcccgtcatcaacagctacctgctggccgagcgggacctgtacctggagaaccctgagatcaagatccgcatcctgggggagcccaagcagaagaggaagctggtggccgaggtgtccctgcagaaccccctgcctgtggccctggagggctgcaccttcaccgtggagggcgccggcctgacagaggagcagaagacagtggagatcccagaccctgtggaggccggggaggaggtgaaggtgaggatggacctgctgcccctgcacatgggcctgcacaagctggtggtgaactttgaaagtgacaagctgaaggctgtgaagggcttcagaaatgtcatcatcggccctgcctag

SEQ ID NO: 321966 - DNA, 1821 bp, Artificial Sequence
  derived and/or modified sequence
atggccgaggagctggtgctggagcgctgtgacctggagctggagaccaacggccgggaccaccacacagctgacctgtgccgggagaagctggtggtgcggcggggccagcccttctggctgaccctgcactttgagggcaggaactatgaggcctctgtggacagcctgaccttctctgtggtgacagcagatgctgtgtacctggacagcgaggaggagcggcaggagtatgtgctgacccagcagggcttcatctaccagggcagcgccaagttcatcaagaacatcccctggaactttggccagtttgaagatggcatcctggacatctgcctgatcctgctggatgtgaaccccaagttcctgaagaatgccggccgggactgcagccgccgcagcagccctgtgtatgtgggccgggtggtgtctggcatggtgaactgcaatgatgaccagggcgtgctgctgggccgctgggacaacaactatggagatggagtgagccccatgtcctggattggctctgtggacatcctgcggcgctggaagaaccacggctgccagagggtgaagtatggccagtgctgggtgtttgctgctgtggcctgcaccgtgctgcgctgcctgggcatccccaccagggtggtgaccaactacaacagcgcccatgaccagaacagcaacctgctgattgagtacttcagaaatgaatttggagagatccagggcgacaagtctgagatgatctggaacttccactgctgggtggagagctggatgaccaggccagacctgcagcccggctatgagggctggcaggccctggaccccaccccccaggagaagtctgagggcacctactgctgcggccctgtgcctgtgcgggccatcaaggagggggacctgagcaccaagtatgatgccccctttgtgtttgctgaggtgaatgctgatgtggtggactggatccagcaggatgatggctctgtgcacaagagcatcaacagaagcctcatcgtgggcctgaagatcagcaccaagtctgtgggcagagatgagcgggaggacatcacccacacctacaagtacccagagggcagcagcgaggagcgggaggccttcacccgggccaaccacctgaacaagctggccgagaaggaggagaccggcatggccatgaggatccgggtgggccagagcatgaacatgggcagtgactttgatgtgtttgcccacatcaccaacaacacagctgaggagtatgtgtgccgcctgctgctgtgtgccaggacagtgtcctacaacggcatcctgggcccagaatgtggcaccaagtacctgctgaacctgaacctggagcccttcagcgagaagtctgtgcccctgtgcatcctgtatgagaagtacagagactgcctgacagagagcaacctgatcaaggtgcgggccctgctggtggagcctgtgatcaacagctacctgctggccgagcgggacctgtacctggagaaccctgagatcaagatccgcatcctgggggagcccaagcagaagaggaagctggtggccgaggtgtccctgcagaaccccctgcctgtggccctggagggctgcaccttcaccgtggagggcgccggcctgacagaggagcagaagacagtggagatcccagaccctgtggaggccggggaggaggtgaaggtgaggatggacctgctgcccctgcacatgggcctgcacaagctggtggtgaactttgaaagtgacaagctgaaggctgtgaagggcttcagaaatgtcatcatcggccctgcctag

SEQ ID NO: 321967 - DNA, 1884 bp, Artificial Sequence
  derived and/or modified sequence
atggccgagggccctgcccccagccaggaggccggcaccaaggcccgcttccccctgagagatgctgtggaggagggggactggacagccaccgtggtggaccagcaggactgcaccctgagcctgcagctgaccaccccagccaatgcccccatcggcctgtaccgcctgagcctggaggccagcacaggctaccagggcagcagctttgtgctgggccacttcatcctgctcttcaatgcctggtgcccagcagatgctgtgtacctggacagcgaggaggagcggcaggagtatgtgctgacccagcagggcttcatctaccagggcagcgccaagttcatcaagaacatcccctggaactttggccagtttgaagatggcatcctggacatctgcctgatcctgctggatgtgaaccccaagttcctgaagaatgccggccgggactgcagcagaagaagcagccctgtgtatgtgggccgggtggtgtctggcatggtgaactgcaatgatgaccagggcgtgctgctgggccgctgggacaacaactatggagatggagtgagccccatgtcctggattggctctgtggacatcctgcggcgctggaagaaccacggctgccagagggtgaagtatggccagtgctgggtgtttgctgctgtggcctgcaccgtgctgcgctgcctgggcatccccaccagggtggtgaccaactacaacagcgcccatgaccagaacagcaacctgctgattgagtacttcagaaatgaatttggagagatccagggcgacaagtctgagatgatctggaacttccactgctgggtggagagctggatgaccaggccagacctgcagcccggctatgagggctggcaggccctggaccccaccccccaggagaagtctgagggcacctactgctgcggccctgtgcctgtgcgggccatcaaggagggggacctgagcaccaagtatgatgccccctttgtgtttgctgaggtgaatgctgatgtggtggactggatccagcaggatgatggctctgtgcacaagagcatcaacagaagcctgattgtgggcctgaagatcagcaccaagtctgtgggcagagatgaaagagaggacatcacccacacctacaagtacccagagggcagcagcgaggagcgggaggccttcacccgggccaaccacctgaacaagctggccgagaaggaggagaccggcatggccatgaggatccgggtgggccagagcatgaacatgggcagtgactttgatgtgtttgcccacatcaccaacaacacagctgaggagtatgtgtgccgcctgctgctgtgtgccaggacagtgtcctacaacggcatcctgggcccagaatgtggcaccaagtacctgctgaacctgaacctggagcccttcagcgagaagtctgtgcccctgtgcatcctgtatgagaagtacagagactgcctgacagagagcaacctgatcaaggtgcgggccctgctggtggagcccgtcatcaacagctacctgctggccgagcgggacctgtacctggagaaccctgagatcaagatccgcatcctgggggagcccaagcagaagaggaagctggtggccgaggtgtccctgcagaaccccctgcctgtggccctggagggctgcaccttcaccgtggagggcgccggcctgacagaggagcagaagacagtggagatcccagaccctgtggaggccggggaggaggtgaaggtgaggatggacctgctgcccctgcacatgggcctgcacaagctggtggtgaactttgaaagtgacaagctgaaggctgtgaagggcttcagaaatgtcatcatcggccctgcctag

SEQ ID NO: 321968 - DNA, 2064 bp, Artificial Sequence
  derived and/or modified sequence
atggccgaggagctggtgctggagcggtgcgacctggagctggagaccaacggcagggaccatcacacagccgacctgtgtcgggagaaactggttgttagaaggggccagcctttctggctaactcttcactttgagggaagaaactacgaagctagtgtcgactccttgaccttcagcgtggtgactggaccagcacccagtcaagaagccggcaccaaggctcgttttcccctgagggacgccgtggaggagggggactggaccgccacagtcgtcgaccagcaagactgcacgctcagtctccagctgactacacccgctaacgccccaatcggcctgtatcggctgagcctggaggcctccacaggatatcaaggctcgtcatttgtgttggggcactttatcttgctgttcaacgcctggtgccccgcagacgctgtctaccttgatagcgaggaagagagacaggagtacgttctgacacagcagggttttatatatcaaggctctgccaagttcattaaaaacatcccatggaatttcgggcaattcgaggacggcatactcgatatctgcttgatactgcttgatgttaaccctaaattcctaaagaacgcggggcgcgattgctctagacgcagctccccagtatacgtggggagggtcgtctcaggtatggtcaactgcaacgacgaccagggtgttctgctgggcagatgggacaacaactatggagatggggtttctcccatgtcttggatagggtcagtggatatactgcgcagatggaagaatcatgggtgtcagcgggtgaagtacggtcagtgttgggtgtttgccgccgtcgcctgtactgtcctccgttgcctcgggatcccgaccagagttgtgacgaattataattcagcccacgatcaaaactccaatttactgattgaatacttcagaaatgagtttggagagatacagggagacaaatccgaaatgatttggaacttccactgttgggtggagagctggatgacgcgtcccgatctacaaccgggttacgaggggtggcaggcactcgatcctactcctcaggaaaaaagtgagggcacctattgctgcggtccagtgccagtcagagccattaaggaaggagatttgagcactaagtacgacgccccctttgtatttgcggaggtcaacgctgacgttgtcgattggatacagcaagacgacggaagtgtgcataagagcattaatcggtctttgattgtggggcttaaaatcagcacaaaatctgtcggccgggatgaacgggaagacattactcacacttacaagtacccagagggctccagcgaggagagagaggcttttaccagagctaatcatttgaataaacttgccgaaaaggaggagaccggcatggcaatgaggatcagagtgggacagtctatgaacatggggagtgatttcgacgtgttcgcgcatatcactaataataccgctgaggaatacgtgtgcaggcttcttctctgtgcaagaaccgtgtcttataacggtatcctgggacccgagtgtggtaccaagtatttactcaacctgaacctggagcccttcagtgaaaagagtgttccactatgtattctgtatgaaaaatatcgggactgtctcactgagtcaaatctcataaaggtcagagcacttctggtggaacccgtgatcaactcctatttactggcagagcgggatctttacctggaaaatcccgaaattaagatacgcatccttggagaacctaaacagaagcgcaagctcgtagcagaagttagcctgcagaacccactacccgttgccctagaaggctgtacgttcaccgtggaaggagcgggacttactgaagagcagaaaaccgtggagatacctgatcccgtggaggcaggagaggaggtcaaagtgagaatggaccttctcccattgcacatgggcttgcacaagctggtggttaattttgaaagcgataaactcaaagctgtgaagggattccggaatgttatcatcgggcccgcctag

SEQ ID NO: 321969 - DNA, 1821 bp, Artificial Sequence
  derived and/or modified sequence
atggccgaggagctggtgctggagcggtgcgacctggagctggagacaaacggtagagaccaccacactgccgatttgtgtagagagaagctggtggtgcgaaggggccagccgttttggctgaccttacactttgagggtcgaaactatgaagcatccgtcgatagcctgacctttagtgttgtgactgcagatgcagtttatctggactccgaggaggaacgtcaagagtacgtcctgactcagcagggatttatttatcagggaagcgccaagtttatcaagaacatcccatggaacttcggccagttcgaagacggtatcttagacatttgccttattctgttggacgtgaacccaaagtttctcaaaaatgctggaagggattgttcgcggcgctcttctcccgtctacgtggggcgcgttgtgtctggcatggttaactgtaatgacgaccagggagtgctcctggggcgatgggacaacaattatggggacggcgtgtctcctatgtcatggataggatccgtggatattttacgtcggtggaagaaccatggctgccagcgggtgaagtatgggcagtgttgggttttcgcagccgtggcttgtactgtccttcgttgcctgggtatacccacgcgggtagtgaccaattataacagtgcacatgaccagaattccaatctgctcatagaatattttcggaatgaattcggagaaattcagggggacaaatccgagatgatctggaactttcattgttgggttgagtcctggatgacccgtccggacctccaaccgggttacgaggggtggcaggccctcgatccgaccccccaggaaaagtcggaaggaacatactgttgtgggcccgtgcccgtgagggccattaaagagggggatctgtcaacaaaatatgacgccccatttgtatttgcggaggtcaatgcagacgttgttgactggatccaacaggatgacggcagtgtgcacaagtctatcaataggtctctgattgttggtctgaaaatctccacaaagtctgttgggcgggatgagagggaggatataacacacacgtacaaataccccgagggctcttcagaggaacgcgaggccttcacgagagcaaatcatcttaataaactggccgaaaaggaagagacaggaatggcaatgcgcatcagggtaggccagtccatgaacatgggctccgattttgatgtatttgcacacattactaacaatactgccgaggagtacgtgtgccggctgcttctgtgtgcccgaacggtgagctataatgggattctgggtcccgagtgcggcacgaagtacctgctcaatcttaatcttgaacccttctctgagaagtccgtgccactctgtattctgtacgaaaagtatagggactgcctgactgagtccaatctgatcaaggtgagggccttgttggtcgaacctgtcattaattcatatctgttagcagaacgtgatctttaccttgagaacccagagataaagattaggatcctcggggagcctaagcagaaacgcaaactcgtggcagaagtgtctttgcagaaccccctccctgttgccctggagggatgtacattcaccgtcgagggggccggcctcaccgaagagcagaagaccgtggaaattccggatcctgtagaagctggcgaagaggtgaaggttagaatggacctgctgccccttcacatgggcctgcataaacttgtagttaattttgaatctgacaaactcaaagccgtgaaaggatttcgaaatgtgatcataggacccgcatag

SEQ ID NO: 321970 - DNA, 1884 bp, Artificial Sequence
  derived and/or modified sequence
atggccgagggccccgcccccagccaggaggccggcaccaaggcccgctttcccctgagagacgcagtagaggagggagattggactgcaactgtggtggaccaacaagactgtacactcagcctccagcttaccacccctgccaatgctcccatcggattgtacaggctttccttggaggcttccactggataccaagggtctagctttgttctaggccactttattctgctatttaacgcctggtgtccagcagatgctgtttatctggactccgaggaggagcgccaagagtacgtactaacacagcaggggttcatctaccagggatcagccaagtttatcaagaatattccatggaacttcggccaatttgaggatggcatcctcgacatctgcctgattttgctggatgtaaatccaaaatttctgaaaaatgctggaagagactgttctcgccgatcctcccctgtttacgttggaagggtcgtttccggaatggtgaactgtaatgatgatcagggagtcttgttgggccgctgggacaataattatggcgacggcgtgtctcccatgagctggatcggctccgtcgatatacttaggaggtggaagaatcacggctgccagagagtgaagtatgggcaatgctgggtctttgccgcagtggcgtgcactgtgctccgctgcctcggcattcccacgcgagtagtgaccaactacaactcagctcacgaccaaaattccaacctgctgatcgaatacttcagaaacgaatttggagaaattcaaggggacaaatccgagatgatttggaacttccattgttgggtagaaagctggatgacgcggcccgacctccagcccggctacgagggctggcaggctctggacccaacaccccaggagaagagcgaaggaacctattgttgtgggccagttcctgtcagagctatcaaggagggtgatctaagcactaagtatgacgcaccctttgtttttgcagaggtgaacgccgatgtggtcgactggattcagcaggacgatggtagcgtacacaaaagtattaaccggtccctgattgtgggcctgaagatctcaactaaatccgtaggacgggatgagagggaagacattacccacacttacaagtatccagagggttctagcgaagagagagaagcctttacccgcgccaaccatctgaacaaattagcagagaaagaagaaacaggtatggccatgaggattcgggttgggcagagcatgaatatgggttcagatttcgacgtgttcgctcacattactaacaacacagctgaagagtacgtgtgccgcctgcttctatgcgcacgaaccgtttcctataacggaatactggggcctgagtgcggaacaaagtatttgctcaatctcaatctcgagccttttagcgagaagtccgttcctctttgcattctgtacgagaaatatagagactgcctgacggaatccaatctcatcaaagtgcgtgctttgctagtggaacccgtgataaacagttacttgctggcggaaagagatttgtatcttgaaaacccggaaatcaagattcgcattctgggtgagcccaagcagaagcggaagctggttgccgaagttagcttacaaaatcccctgcctgtggccctcgaaggctgcacatttacagttgagggcgcaggcctgaccgaagaacaaaagacggtcgagattccggaccccgtagaagctggcgaggaagtgaaagtgcgcatggatcttctgcctctgcacatgggcctgcataagctcgttgtaaactttgagtcagataaacttaaagccgtgaaggggttcaggaatgtcattatcggccctgcatag

SEQ ID NO: 321971 - DNA, 2064 bp, Artificial Sequence
  derived and/or modified sequence
atggcggaagaattggtgcttgagaggtgtgacctggagctggaaaccaatggtagagatcaccacactgctgatctgtgtcgggagaagctagtagtgaggcggggtcaacctttctggctcactctgcactttgaaggccgaaactacgaggccagcgtcgactcactaaccttcagcgtggtcactggcccagcacctagccaggaggctggcactaaagcaaggtttcccttacgggacgctgtcgaggagggagattggacagcaactgtcgtcgatcaacaagactgtaccctcagcctccagcttaccactccagccaacgctccaattggcttgtatcggcttagtcttgaggctagcaccgggtaccagggttctagctttgttctgggccactttatcctgctgttcaatgcatggtgtccagccgatgcggtatacttggatagcgaggaagaacgccaggaatatgtcctgacccagcaagggtttatctatcaaggctccgctaaatttattaaaaatattccatggaatttcggacaatttgaagatggcatattggatatatgcctgatcctgctggatgttaaccccaagttcctgaagaacgccggtagagattgctctaggaggtcttcccccgtgtatgtgggacgagtggtgagtggtatggttaattgtaacgatgatcaaggagtcctgttgggtcgatgggacaataattatggcgatggcgtaagtccgatgtcttggattggcagcgtggatattttgcgcagatggaagaaccacggctgtcaacgggtcaagtacggacagtgttgggtgtttgcagcagtcgcctgtaccgtccttcgctgcttgggaatcccaacacgcgtggtaactaactacaactccgctcacgaccagaattcaaatctgttgatcgaatactttcgcaacgaatttggcgagatccagggggacaagagcgagatgatttggaatttccactgctgggtagaatcttggatgactcgaccagacctccagcccggatacgaaggatggcaggcgctcgatcctacacctcaagagaagagcgagggcacatactgttgcggcccagtgcctgtccgggctatcaaggaaggggacctgagcaccaagtatgatgccccttttgtgttcgcggaagtgaacgccgacgtggtggattggatacaacaggacgatgggtcagtccataagtcgattaacagatccttaattgttgggttaaaaatttcaaccaagtccgtcggccgtgacgaacgggaggacattacacatacttataagtatcccgaggggagtagcgaagagcgggaggcctttacgagggctaaccatcttaacaagctcgccgagaaggaggaaacaggcatggcgatgcgcatacgcgtggggcagtctatgaacatgggaagcgacttcgatgtgtttgcacacatcacaaataatacggctgaagaatacgtctgtcgactgctcctttgcgcgaggacagtgtcttataatggaatcctgggccctgaatgtggaaccaagtatctcctgaatctcaacttagagcccttttctgagaagtctgtacccctgtgcatactttatgagaaatacagagattgtctgactgaaagtaacctgatcaaggttagagcactgctggttgaacccgtgatcaactcgtacctcctggctgagcgtgatttgtacctggagaaccccgagattaagatcagaattctcggcgagccaaagcagaaacgtaagctggtcgctgaggtgtccctccaaaacccgcttcctgtggccctggagggttgcacgttcactgtggaaggggcagggcttaccgaggaacaaaaaacagtggagatcccagaccccgtcgaagccggagaggaggtaaaggtgagaatggacttgctgcccttgcacatgggcttgcacaagctggtcgtaaatttcgagtcagacaagctcaaagccgttaagggcttccgcaacgtcatcatcggacccgcatag

SEQ ID NO: 321972 - DNA, 1821 bp, Artificial Sequence
  derived and/or modified sequence
atggccgaggaactagtactagaaaggtgcgatctggaactggagaccaacggaagagaccaccacaccgcagacctgtgccgggagaagttggtggtgagaaggggtcaacccttttggctgactctgcacttcgagggtagaaattatgaggcaagtgtggactccctcacatttagtgtagtcacagctgatgccgtgtatttggattcagaggaagagagacaggagtacgtacttacacaacaagggtttatctatcaaggatccgccaagtttattaaaaatattccctggaactttggccagttcgaggatggcatcctggatatctgcttaattctattggacgtgaacccaaaattcctgaagaacgccggacgcgattgttcacggagatcgagccccgtatacgtgggacgcgtagtaagcggcatggtaaattgcaacgacgaccagggtgttctgctaggcaggtgggacaataactacggcgacggcgtgtccccgatgtcctggatcggatccgtggacattctccggagatggaagaatcatggctgccagagggtgaagtatggtcagtgttgggtgttcgcagctgtggcttgtacagtcctcagatgccttggtatcccaactcgggtggtgaccaactacaattccgcccacgatcagaactcaaacctcctgattgaatattttcgcaacgagtttggagagattcagggcgacaagagtgaaatgatttggaatttccactgctgggttgaatcatggatgacgcggccagatctccagccagggtacgagggatggcaagctctggaccccaccccccaggaaaagagcgaggggacctattgctgcggccctgtgcccgtgagggcgattaaggagggtgacttgagcacgaaatatgacgcccctttcgtttttgcggaagtcaacgccgacgttgtggattggattcagcaagacgacggcagcgtgcacaagagtatcaatagaagtctgattgtcggtcttaagatctccactaaatcagtgggacgcgacgaacgagaagacatcactcacacctacaagtatcctgaagggagcagtgaagagcgagaggccttcactagggccaaccacctgaacaagctggcggaaaaagaggaaaccggtatggctatgcgcataagggtggggcagtcgatgaacatgggctccgactttgacgtgttcgctcacatcaccaataataccgctgaagagtatgtgtgtcggctgctgctatgtgcaagaacagtgagttataatggcatcctcggacctgagtgtggtactaaatatcttcttaacctgaacctcgaaccctttagcgagaagagtgttcccctgtgtatcctttatgagaaataccgggactgtcttacagagagtaacctgatcaaggtgcgtgccttactggttgagcctgtgattaactcttacttgttggcagaacgcgacttatatttggagaatccggaaattaaaattcggatcctgggagaaccaaaacaaaaaagaaagctcgttgccgaagtttccctccagaatcccttgcccgtcgccttggagggctgtacattcaccgtagagggggcagggctaacagaagaacaaaagactgtggaaattccagaccccgtggaggcaggcgaagaggtaaaggttaggatggacttgttgcctctgcatatggggctgcataagctcgtggtgaactttgagtctgacaagctgaaggctgtaaagggcttccgaaatgtgatcatcggacccgcatag

SEQ ID NO: 321973 - DNA, 1884 bp, Artificial Sequence
  derived and/or modified sequence
atggccgagggcccagccccttcccaggaagccggtaccaaggctcggtttcctctcagggatgctgttgaggaaggcgattggacggcaaccgtagtcgaccagcaggattgtacgctatcacttcagttgacaacacccgcaaatgccccaattgggctctacaggctcagtcttgaagcaagcactggctaccaggggagtagctttgttctgggccacttcattctgctgttcaatgcatggtgtcctgcagatgccgtctacctggactctgaagaggagagacaggagtatgtgcttacgcagcaagggttcatctaccagggctctgccaagtttatcaaaaacataccatggaatttcggtcagttcgaggacgggatcctcgacatctgcctgatcttgctggatgtaaatcctaaatttctcaaaaatgccggaagagattgctcaagaagatcctccccggtctacgttggccgagtcgtgtccggtatggtgaactgcaatgatgatcagggcgtcctgttgggtcgttgggataacaactacggcgacggcgtatcacccatgagctggattggatccgttgatatcctccgacggtggaagaatcatggatgtcagcgggtaaaatatggtcaatgttgggtcttcgctgctgtggcctgtacagtcctccggtgcttgggaatccccacgagggtggtcaccaattataattccgcacatgaccaaaatagcaatctactcatcgaatattttagaaacgagttcggggagattcagggagataagtctgagatgatatggaactttcattgttgggtggaatcatggatgacccggcctgacttacagcctggatacgagggatggcaggctctagacccaactccacaagaaaaatcggagggtacatactgctgcgggcctgtgccggtcagggcgatcaaagaaggagacctcagtacaaagtatgacgcccctttcgtatttgccgaggtgaatgccgatgttgtcgattggattcaacaagatgacggcagcgtccataaatctatcaacagaagcctgattgttggactaaagatctctacaaagtccgtcggaagggatgagcgtgaggacatcacccacacatacaaataccccgaaggtagctcggaagaacgcgaggccttcaccagagccaaccacctcaacaagctcgccgaaaaggaagaaacagggatggctatgcggattagagtggggcagagtatgaacatgggctctgactttgacgtgttcgcccacatcacaaataatactgcagaggaatacgtctgcaggctccttctgtgcgcgagaaccgtgtcttataatgggatcctgggaccggaatgtggtactaaatatctactgaacctgaaccttgagccattttccgaaaagtcagttcccctgtgcatcctgtatgaaaagtatcgggactgcctaacagagagtaacttaattaaggtccgagcattactagtggaaccggtgatcaatagttacctcttggccgagcgcgatctgtatctggaaaaccctgagattaagattcgaatccttggcgaacccaagcagaagcgcaagctggtcgctgaggtttcactccaaaaccccttgccagtggcccttgaggggtgtacttttactgtcgagggtgcaggactcacagaggaacagaaaaccgtggaaatcccagatcctgttgaggcaggcgaggaggtcaaggttcgcatggacttgctgccactgcatatgggcctgcataagctggtggtgaattttgaatctgataaattgaaggctgtcaagggatttcggaatgtgataatcggcccagcttag

SEQ ID NO: 321974 - DNA, 3996 bp, Artificial Sequence
  derived and/or modified sequence
actgggcaatgggtggcctcccaggtcgccgccttcccgcggggccccgcccccggcccgccccaaagcgggctataagttagcgccgctctccgcctcggcagtgccagccgccagtggtcgcacttggagggtctcgccgccagtggaaggagccaccgcccccgcccgaccatggccgaggagctggtcttagagaggtgtgatctggagctggagaccaatggccgagaccaccacacggccgacctgtgccgggagaagctggtggtgcgacggggccagcccttctggctgaccctgcactttgagggccgcaactacgaggccagtgtagacagtctcaccttcagtgtcgtgaccggcccagcccctagccaggaggccgggaccaaggcccgttttccactaagagatgctgtggaggagggtgactggacagccaccgtggtggaccagcaagactgcaccctctcgctgcagctcaccaccccggccaacgcccccatcggcctgtatcgcctcagcctggaggcctccactggctaccagggatccagctttgtgctgggccacttcattttgctcttcaacgcctggtgcccagcggatgctgtgtacctggactcggaagaggagcggcaggagtatgtcctcacccagcagggctttatctaccagggctcggccaagttcatcaagaacataccttggaattttgggcagtttgaagatgggatcctagacatctgcctgatccttctagatgtcaaccccaagttcctgaagaacgccggccgtgactgctcccgccgcagcagccccgtctacgtgggccgggtggtgagtggcatggtcaactgcaacgatgaccagggtgtgctgctgggacgctgggacaacaactacggggacggcgtcagccccatgtcctggatcggcagcgtggacatcctgcggcgctggaagaaccacggctgccagcgcgtcaagtatggccagtgctgggtcttcgccgccgtggcctgcacagtgctgaggtgcctgggcatccctacccgcgtcgtgaccaactacaactcggcccatgaccagaacagcaaccttctcatcgagtacttccgcaatgagtttggggagatccagggtgacaagagcgagatgatctggaacttccactgctgggtggagtcgtggatgaccaggccggacctgcagccggggtacgagggctggcaggccctggacccaacgccccaggagaagagcgaagggacgtactgctgtggcccagttccagttcgtgccatcaaggagggcgacctgagcaccaagtacgatgcgccctttgtctttgcggaggtcaatgccgacgtggtagactggatccagcaggacgatgggtctgtgcacaaatccatcaaccgttccctgatcgttgggctgaagatcagcactaagagcgtgggccgagacgagcgggaggatatcacccacacctacaaatacccagaggggtcctcagaggagagggaggccttcacaagggcgaaccacctgaacaaactggccgagaaggaggagacagggatggccatgcggatccgtgtgggccagagcatgaacatgggcagtgactttgacgtctttgcccacatcaccaacaacaccgctgaggagtacgtctgccgcctcctgctctgtgcccgcaccgtcagctacaatgggatcttggggcccgagtgtggcaccaagtacctgctcaacctcaacctggagcctttctctgagaagagcgttcctctttgcatcctctatgagaaataccgtgactgccttacggagtccaacctcatcaaggtgcgggccctcctcgtggagccagttatcaacagctacctgctggctgagagggacctctacctggagaatccagaaatcaagatccggatccttggggagcccaagcagaaacgcaagctggtggctgaggtgtccctgcagaacccgctccctgtggccctggaaggctgcaccttcactgtggagggggccggcctgactgaggagcagaagacggtggagatcccagaccccgtggaggcaggggaggaagttaaggtgagaatggacctgctgccgctccacatgggcctccacaagctggtggtgaacttcgagagcgacaagctgaaggctgtgaagggcttccggaatgtcatcattggccccgcctaagggacccctgctcccagcctgctgagagcccccaccttgatcccaatccttatcccaagctagtgagcaaaatatgccccttcttgggccccagaccccagggcagggtgggcagcctatgggggctctcggaaatggaatgtgcccctggcccatctcagcctcctgagcctgtgggtccccactcaccccctttgctgtgaggaatgctctgtgccagaaacagtgggagccctgaccttggctgactggggctggggtgagagaggaaagacctacattccctctcctgcccagatgccctttggaaagccattgaccacccaccatattgtttgatctacttcatagctccttggagcaggcaaaaaagggacagcatgccccttggctggatcagggaatccagctccctagactgcatcccgtacctcttcccatgactgcacccagctccaggggcccttgggacagccagagctgggtggggacagtgataggcccaaggtcccctccacatcccagcagcccaagcttaatagccctccccctcaacctcaccattgtgaagcacctactatgtgctgggtgcctcccacacttgctggggctcacggggcctccaacccatttaatcaccatgggaaactgttgtgggcgctgcttccaggataaggagactgaggcttagagagaggaggcagccccctccacaccagtggcctcgtggttattagcaaggctgggtaatgtgaaggcccaagagcagagtctgggcctctgactctgagtccactgctccatttataaccccagcctgacctgagactgtcggagaggctgtctggggcctttatcaaaaaaagactcagccaagacaaggaggtagagaggggactgggggactgggagtcagagccctggctgggttcaggtcccacgtctggccaggcactgccttctcctctctgggcctttgtttccttgttggtcagaggagtgattgaaccagctcatctccaaggatcctctccactccatgtttgcaatgcttttatatggcccagccttgtaaataaccacaaggtccactccctgctccacgaagccttaagccataggcccaggatatttctgagagtgaaaccatgactgtgaccaccttctgtccccagccctgtcctggttccttcctatgcccaggtaccacccttcagaccccagttctaggggagaagagccctggacacccctgctctacccatgagcctgcccgctgcaatgcctagacttcccaacagccttagctgccagtgctggtcactaaccaacaaggttggcaccccagctaccccttctttgcagggctaaggcccccaaacatagcccctgccccggaggaagcttggggaacccatgagttgtcagctttgactttatctcctgctctttctacatgactgggcctcccttgggctggaagaattggggattctctattggaggtgagatcacagcctccagggccccccaaatcccagggaaggacttggagagaatcatgctgttgcatttagaactttctgctttgcacaggaaagagtcacacaattaatcaacatgtatattttctctatacatagagctctatttctctacggttttataaaagccttgggttccaaccaggcagtagatgtgcttctgaaccgcaaggagcaaacactgaaataaaatagtttatttttcacactcaaa

SEQ ID NO: 321975 - DNA, 2157 bp, Artificial Sequence
  derived and/or modified sequence
agtgccagccgccagtggtcgcacttggagggtctcgccgccagtggaaggagccaccgcccccgcccgaccatggccgaggagctggtcttagagaggtgtgatctggagctggagaccaatggccgagaccaccacacggccgacctgtgccgggagaagctggtggtgcgacggggccagcccttctggctgaccctgcactttgagggccgcaactacgaggccagtgtagacagtctcaccttcagtgtcgtgaccgcggatgctgtgtacctggactcggaagaggagcggcaggagtatgtcctcacccagcagggctttatctaccagggctcggccaagttcatcaagaacataccttggaattttgggcagtttgaagatgggatcctagacatctgcctgatccttctagatgtcaaccccaagttcctgaagaacgccggccgtgactgctcccgccgcagcagccccgtctacgtgggccgggtggtgagtggcatggtcaactgcaacgatgaccagggtgtgctgctgggacgctgggacaacaactacggggacggcgtcagccccatgtcctggatcggcagcgtggacatcctgcggcgctggaagaaccacggctgccagcgcgtcaagtatggccagtgctgggtcttcgccgccgtggcctgcacagtgctgaggtgcctgggcatccctacccgcgtcgtgaccaactacaactcggcccatgaccagaacagcaaccttctcatcgagtacttccgcaatgagtttggggagatccagggtgacaagagcgagatgatctggaacttccactgctgggtggagtcgtggatgaccaggccggacctgcagccggggtacgagggctggcaggccctggacccaacgccccaggagaagagcgaagggacgtactgctgtggcccagttccagttcgtgccatcaaggagggcgacctgagcaccaagtacgatgcgccctttgtctttgcggaggtcaatgccgacgtggtagactggatccagcaggacgatgggtctgtgcacaaatccatcaaccgttccctgatcgttgggctgaagatcagcactaagagcgtgggccgagacgagcgggaggatatcacccacacctacaaatacccagaggggtcctcagaggagagggaggccttcacaagggcgaaccacctgaacaaactggccgagaaggaggagacagggatggccatgcggatccgtgtgggccagagcatgaacatgggcagtgactttgacgtctttgcccacatcaccaacaacaccgctgaggagtacgtctgccgcctcctgctctgtgcccgcaccgtcagctacaatgggatcttggggcccgagtgtggcaccaagtacctgctcaacctcaacctggagcctttctctgagaagagcgttcctctttgcatcctctatgagaaataccgtgactgccttacggagtccaacctcatcaaggtgcgggccctcctcgtggagccagttatcaacagctacctgctggctgagagggacctctacctggagaatccagaaatcaagatccggatccttggggagcccaagcagaaacgcaagctggtggctgaggtgtccctgcagaacccgctccctgtggccctggaaggctgcaccttcactgtggagggggccggcctgactgaggagcagaagacggtggagatcccagaccccgtggaggcaggggaggaagttaaggtgagaatggacctgctgccgctccacatgggcctccacaagctggtggtgaacttcgagagcgacaagctgaaggctgtgaagggcttccggaatgtcatcattggccccgcctaagggacccctgctcccagcctgctgagagcccccaccttgatcccaatccttatcccaagctagtgagcaaaatatgccccttcttgggccccagaccccagggcagggtgggcagcctatgggggctctcggaaatggaatgtgcccctggcccatctcagcctcctgagcctgtgggtccccactcaccccctttgctgtgaggaatgctctgtgccagaaacagtgggagccctgaccttggctgactggggctggggtgag

SEQ ID NO: 321976 - DNA, 2041 bp, Artificial Sequence
  derived and/or modified sequence
agtgccagccgccagtggtcgcacttggagggtctcgccgccagtggaaggagccaccgcccccgcccgaccatggccgagggcccagcccctagccaggaggccgggaccaaggcccgttttccactaagagatgctgtggaggagggtgactggacagccaccgtggtggaccagcaagactgcaccctctcgctgcagctcaccaccccggccaacgcccccatcggcctgtatcgcctcagcctggaggcctccactggctaccagggatccagctttgtgctgggccacttcattttgctcttcaacgcctggtgcccagcggatgctgtgtacctggactcggaagaggagcggcaggagtatgtcctcacccagcagggctttatctaccagggctcggccaagttcatcaagaacataccttggaattttgggcagtttgaagatgggatcctagacatctgcctgatccttctagatgtcaaccccaagttcctgaagaacgccggccgtgactgctcccgccgcagcagccccgtctacgtgggccgggtggtgagtggcatggtcaactgcaacgatgaccagggtgtgctgctgggacgctgggacaacaactacggggacggcgtcagccccatgtcctggatcggcagcgtggacatcctgcggcgctggaagaaccacggctgccagcgcgtcaagtatggccagtgctgggtcttcgccgccgtggcctgcacagtgctgaggtgcctgggcatccctacccgcgtcgtgaccaactacaactcggcccatgaccagaacagcaaccttctcatcgagtacttccgcaatgagtttggggagatccagggtgacaagagcgagatgatctggaacttccactgctgggtggagtcgtggatgaccaggccggacctgcagccggggtacgagggctggcaggccctggacccaacgccccaggagaagagcgaagggacgtactgctgtggcccagttccagttcgtgccatcaaggagggcgacctgagcaccaagtacgatgcgccctttgtctttgcggaggtcaatgccgacgtggtagactggatccagcaggacgatgggtctgtgcacaaatccatcaaccgttccctgatcgttgggctgaagatcagcactaagagcgtgggccgagacgagcgggaggatatcacccacacctacaaatacccagaggggtcctcagaggagagggaggccttcacaagggcgaaccacctgaacaaactggccgagaaggaggagacagggatggccatgcggatccgtgtgggccagagcatgaacatgggcagtgactttgacgtctttgcccacatcaccaacaacaccgctgaggagtacgtctgccgcctcctgctctgtgcccgcaccgtcagctacaatgggatcttggggcccgagtgtggcaccaagtacctgctcaacctcaacctggagcctttctctgagaagagcgttcctctttgcatcctctatgagaaataccgtgactgccttacggagtccaacctcatcaaggtgcgggccctcctcgtggagccagttatcaacagctacctgctggctgagagggacctctacctggagaatccagaaatcaagatccggatccttggggagcccaagcagaaacgcaagctggtggctgaggtgtccctgcagaacccgctccctgtggccctggaaggctgcaccttcactgtggagggggccggcctgactgaggagcagaagacggtggagatcccagaccccgtggaggcaggggaggaagttaaggtgagaatggacctgctgccgctccacatgggcctccacaagctggtggtgaacttcgagagcgacaagctgaaggctgtgaagggcttccggaatgtcatcattggccccgcctaagggacccctgctcccagcctgctgagagcccccaccttgatcccaatccttatcccaagctagtgagcaaaatatgccccttctt

SEQ ID NO: 321977 - protein, 446 aa, Artificial Sequence
  derived and/or modified sequence
MAQAPADPGREGHLEQRILQVLTEAGSPVKLAQLVKECQAPKRELNQVLYRMKKELKVSLTSPATWCLGGTDPEGEGPAELALSSPAERPQQHAATIPETPGPQFSQQREEDIYRFLKDNGPQRALVIAQALGMRTAKDVNRDLYRMKSRHLLDMDEQSKAWTIYRPEDSGRRAKSASIIYQHNPINMICQNGPNSWISIANSEAIQIGHGNIITRQTVSREDGSAGPRHLPSMAPGDSSTWGTLVDPWGPQDIHMEQSILRRVQLGHSNEMRLHGVPSEGPAHIPPGSPPVSATAAGPEASFEARIPSPGTHPEGEAAQRIHMKSCFLEDATIGNSNKMSISPGVAGPGGVAGSGEGEPGEDAVAAFTEVLNPSKSFMKFGINFFQTPVNVDSLTSSHESQMFLTACRLVIFSRRFSTYFAQIHLRNHSVLHLCPHKIYLLKNKK

SEQ ID NO: 321978 - DNA, 1341 bp, Artificial Sequence
  derived and/or modified sequence
atggcccaggcccccgccgaccccggcagagagggccacctggagcagagaatcctgcaggtgctgaccgaggccggcagccccgtgaagctggcccagctggtgaaggagtgccaggcccccaagagagagctgaaccaggtgctgtacagaatgaagaaggagctgaaggtgagcctgaccagccccgccacctggtgcctgggcggcaccgaccccgagggcgagggccccgccgagctggccctgagcagccccgccgagagaccccagcagcacgccgccaccatccccgagacccccggcccccagttcagccagcagagagaggaggacatctacagattcctgaaggacaacggcccccagagagccctggtgatcgcccaggccctgggcatgagaaccgccaaggacgtgaacagagacctgtacagaatgaagagcagacacctgctggacatggacgagcagagcaaggcctggaccatctacagacccgaggacagcggcagaagagccaagagcgccagcatcatctaccagcacaaccccatcaacatgatctgccagaacggccccaacagctggatcagcatcgccaacagcgaggccatccagatcggccacggcaacatcatcaccagacagaccgtgagcagagaggacggcagcgccggccccagacacctgcccagcatggcccccggcgacagcagcacctggggcaccctggtggacccctggggcccccaggacatccacatggagcagagcatcctgagaagagtgcagctgggccacagcaacgagatgagactgcacggcgtgcccagcgagggccccgcccacatcccccccggcagcccccccgtgagcgccaccgccgccggccccgaggccagcttcgaggccagaatccccagccccggcacccaccccgagggcgaggccgcccagagaatccacatgaagagctgcttcctggaggacgccaccatcggcaacagcaacaagatgagcatcagccccggcgtggccggccccggcggcgtggccggcagcggcgagggcgagcccggcgaggacgccgtggccgccttcaccgaggtgctgaaccccagcaagagcttcatgaagttcggcatcaacttcttccagacccccgtgaacgtggacagcctgaccagcagccacgagagccagatgttcctgaccgcctgcagactggtgatcttcagcagaagattcagcacctacttcgcccagatccacctgagaaaccacagcgtgctgcacctgtgcccccacaagatctacctgctgaagaacaagaagtag

SEQ ID NO: 321979 - DNA, 1341 bp, Artificial Sequence
  derived and/or modified sequence
atggcccaggctcccgctgatccaggcagagaaggccatttagaacaacgaatcttgcaggtgctgacagaggctggttccccggtcaaacttgctcagctggtgaaggagtgtcaggccccaaaaagagagcttaatcaagtgctatatcgaatgaaaaaggaactgaaagtttccctcacaagccccgcaacatggtgccttggtggcactgacccagaaggagaaggcccagccgagctggctctttcctcccccgctgaaaggccccagcaacatgccgccaccattcccgaaacacccggcccacagttttcgcagcaaagagaggaggacatctacaggttcctgaaagataatgggcctcaacgagctttagtgatcgcccaggcactgggaatgcggacggctaaggatgtaaaccgcgacttatacaggatgaaaagcaggcacttgttggatatggatgaacagtcaaaagcatggacaatatatcgcccagaagattctggacgacgagctaaaagcgcctcaattatctaccaacataatcctataaacatgatatgtcaaaacgggcctaactcctggataagtatcgcaaattctgaggccattcaaattggtcatggaaacattatcacaagacagaccgtatctcgcgaggacggatcagccgggccccggcatctgcccagtatggcacccggggactcaagcacttggggaacccttgtggatccctggggcccccaagacatccacatggagcaaagcatcttgagaagagtgcagctgggccacagtaacgagatgcgactgcatggtgtgccttctgagggccccgcgcatataccacctggtagcccgccagtctcagctaccgcagccgggcccgaggcatcattcgaagctcgcataccctctcccggcacccatcccgagggggaggccgctcagaggattcacatgaaatcctgctttctggaggatgccaccattgggaactctaataagatgagtatatcgccaggagttgctgggccaggcggagtggcggggagtggtgagggagaaccaggagaagacgctgtggccgcctttactgaggtgttgaatccatctaaatcctttatgaaattcggcatcaatttctttcagacgcctgtcaatgttgactctctcacctcttcccacgagtcccagatgtttctcaccgcatgcagactggtcatcttcagccgccgcttttctacatatttcgcccaaattcacctaaggaaccattcagtgctgcacctgtgcccacataaaatttatctgctgaaaaataagaaatag

SEQ ID NO: 321980 - DNA, 1341 bp, Artificial Sequence
  derived and/or modified sequence
atggcccaggccccagctgaccccggccgggagggccacctggagcagaggatcctgcaggtgctgacagaagctggcagccctgtgaagctggcccagctggtgaaggagtgccaggcccccaagcgggagctgaaccaggtgctgtacaggatgaagaaggagctgaaggtgtccctgaccagccctgccacctggtgcctgggcggcacagatcctgagggggagggccctgctgagctggccctgagcagccctgctgagcggccccagcagcacgccgccaccatccctgagaccccaggcccccagttcagccagcagcgggaggaggacatctaccgcttcctgaaggacaatggcccccagagggccctggtgattgcccaggccctgggcatgaggacagccaaggatgtgaacagagacctgtacaggatgaagagccgccacctgctggacatggatgagcagagcaaggcctggaccatctacagacctgaggacagcggccggcgggccaagagcgccagcatcatctaccagcacaaccccatcaacatgatctgccagaatggccccaacagctggatcagcatcgccaacagcgaggccatccagatcggccacggcaacatcatcacccggcagacagtgtcccgggaggatggcagcgctggccccaggcacctgcccagcatggcccctggggacagcagcacctggggcaccctggtggacccctggggcccccaggacatccacatggagcagagcatcctgcggcgggtgcagctgggccacagcaatgagatgaggctgcatggagtgcccagcgagggccctgcccacatccccccaggcagcccccctgtgtctgccacagctgctggccctgaggccagctttgaggcccgcatccccagccctggcacccaccctgagggggaggccgcccagaggatccacatgaagagctgcttcctggaggatgccaccatcggcaacagcaacaagatgagcatcagccctggggtggccggccctggaggagtggccggcagcggggagggggagcccggggaggatgctgtggccgccttcacagaggtgctgaaccccagcaagagcttcatgaagtttggcatcaacttcttccagacccctgtgaatgtggacagcctgaccagcagccatgagagccagatgttcctgacagcctgccgcctggtgatcttcagccgccgcttcagcacctactttgcccagatccacctgaggaaccacagcgtgctgcacctgtgcccccacaagatctacctgctgaagaacaagaagtag

SEQ ID NO: 321981 - DNA, 1341 bp, Artificial Sequence
  derived and/or modified sequence
atggcccaggcccccgccgaccccggccgggagggccacctggagcaacgcattctgcaagtcctcactgaggctggaagccctgtgaagctcgctcagcttgtgaaggaatgccaagccccaaagagagagttgaatcaggtcctctacagaatgaagaaggagctgaaagtgtccttaacaagccccgccacttggtgcctgggtgggaccgaccccgaaggcgagggtcctgccgagctggctctcagcagtccggccgaacggcctcaacagcacgccgccactatacctgagactccaggcccacaattcagccaacagcgagaagaggatatatatagattcttgaaggataacggtccccagcgcgctctggtcatcgcccaggccctcggtatgaggactgccaaggatgtgaaccgggacctgtacaggatgaagtctcgccacctgctggatatggacgagcagtctaaggcctggaccatttacagacctgaggacagcggaaggagagcaaaatctgcaagtatcatctatcagcacaaccccataaacatgatctgtcagaatgggccgaattcatggatatccatcgccaacagcgaagctatccaaatcggccacgggaatatcatcactcgacagacagtgagtagagaggacggcagcgccgggcctaggcaccttcccagtatggcaccaggagattccagtacctgggggacactggtagatccctgggggccgcaggatatccacatggagcagtccatcttacgccgggtgcaattaggccactcaaatgagatgaggttgcacggcgtacccagcgaaggacctgcacacatacctcccggttctccccctgtgtccgcaaccgccgcagggcccgaggcctcttttgaagctaggattccctctcctggtactcacccggagggagaagccgcccaaaggatccatatgaagagttgctttctcgaggacgctacaataggaaactctaacaagatgagtatttcacctggagtcgctgggccaggcggggtggctggtagcggtgagggggaacctggtgaagacgcagtggcagctttcactgaggtgctgaatccgagtaagtccttcatgaagttcggaatcaattttttccagacgcccgtaaatgtggatagtctgacatcctcgcacgagagccaaatgtttctcaccgcatgtcgcttggtcatcttctcgagaagattttccacatattttgcgcagattcacctgaggaaccattcagtgctgcacctttgtccgcacaagatatatttgcttaaaaacaagaagtag

SEQ ID NO: 321982 - DNA, 1341 bp, Artificial Sequence
  derived and/or modified sequence
atggctcaggctcccgctgaccccggtagagaaggccatttggagcagcggatactccaggttttgaccgaagccggttctcccgtgaagcttgcccagcttgtgaaagagtgccaggcacccaagagggaacttaaccaggtgctgtaccggatgaagaaagaacttaaggtgagcctaaccagtcccgctacctggtgtttgggcggaacagatccagagggcgaggggccagcagaactggccctaagctcgcctgcagagcggcctcaacagcatgccgctactattcccgagacaccaggacctcagttctctcagcagcgggaggaagacatttataggttcctcaaggacaacggcccacagagagcactggtgattgctcaagcactgggaatgagaactgccaaagatgtgaatagggacctgtacaggatgaaaagccgccacctgctggacatggatgagcaatccaaggcttggaccatctacaggcccgaagactccggcaggagggctaagtccgcttccattatttatcagcataacccgatcaacatgatctgccagaatggtcctaattcttggatttctattgctaactctgaggccatccagataggccatggcaatatcattactcgtcaaaccgtgagcagagaagatgggtctgctggacccagacaccttcctagtatggcgcctggcgactccagcacttgggggacgctggtagatccttggggccctcaggatatccatatggagcaaagcatcctccggagagtccagctgggacacagcaatgaaatgcgtctgcacggcgtcccatccgagggaccagcccacattcccccaggatcccctcctgtgtcagccactgccgcaggccctgaggctagttttgaggcccgtatcccgagtcctggtactcaccctgagggcgaggccgctcagcggattcacatgaaatcatgctttctcgaggacgccacaattggaaattctaataagatgtctatctcacccggagtggccggacctggcggagtcgctggaagcggagaaggagagccaggtgaggatgctgtggctgcctttaccgaagtcctgaaccctagcaagtccttcatgaagttcggtatcaatttctttcagacaccagtgaatgtggatagtttgaccagcagtcacgaatcacagatgtttcttacggcctgtcgccttgtgatcttcagcagacgtttttctacttactttgcgcagatccacctccgtaatcactctgtcctacacctgtgtcctcataagatttacctgctgaaaaacaagaagtag

SEQ ID NO: 321983 - DNA, 1622 bp, Artificial Sequence
  derived and/or modified sequence
tttttttttctttcaaaagacgaacagagaagtttcattttctttttctcctgaaaccgaatctggccggcctggctaggcatctatttccgggctgtaagcagctgacacctgcccagtggaagctggcatccctccccttgtgggttcagagctgcaagaagcaccaggctcggccacttcagaagccccagcctcgacctagcccaccctctcagggccacagtgcagaagcctgcacacctgccaagtctctccgactccttgcagctgctgtcagcatggcccaggctcctgctgacccgggcagagaaggccaccttgaacaaagaatcctgcaggtgctgacagaggctggctccccggtgaaacttgcccagctggtgaaggaatgccaagcacccaagagggagctcaaccaagtcctctaccgaatgaaaaaggagttgaaagtctccctcacatcccctgccacctggtgcttgggcgggactgatcctgaaggcgagggtcctgcagagctggccttgtccagccctgccgagaggccccagcaacatgcagctacaattccagagacccctggccctcagttcagccaacaacgggaggaagacatctacaggtttctcaaagacaatggtccccagagggccctggtcatcgcccaagcactgggaatgaggacagcaaaagatgtgaaccgagacttgtacaggatgaagagcaggcaccttctggacatggatgagcagtccaaagcatggacgatttaccgcccagaagattctggaagaagagcaaagtcagcctcaattatttaccagcacaatccaatcaacatgatctgccagaatggacccaacagctggatttccattgcaaactccgaagccatccagattggacacgggaacatcattacaagacagacagtctccagggaggacggttccgccggtccacgccacctcccttcaatggcaccaggtgattcctcaacttgggggaccctagttgatccctgggggccccaggacatccacatggagcagtccatactgagacgggtgcagctgggacacagcaatgagatgaggctccacggcgtcccgtccgagggccctgcccacatcccccctggcagccccccagtctctgccactgctgccggcccagaagcttcgtttgaagcaagaattcccagtccaggaactcaccctgagggggaagccgcccagagaatccacatgaaatcgtgctttctcgaggacgccaccatcggcaacagcaacaaaatgtctatcagcccaggggtggctggcccaggaggagtcgcagggtctggagagggggagccaggggaggacgcagttgctgccttcactgaagtcttgaacccctcaaagtcattcatgaaatttggaatcaacttcttccagactcctgtgaatgttgatagtttgacctcctcccatgaatcacaaatgttcttaacggcatgtagattggtgatcttttccagaagattttcaacttactttgcccagatccatctgaggaatcactctgtgttgcacttatgccctcataaaatatatttattgaagaataagaagtga

SEQ ID NO: 321984 - protein, 501 aa, Artificial Sequence
  derived and/or modified sequence
MRLPKLLTFLLWYLAWLDLEFICTVLGAPDLGQRPQGTRPGLAKAEAKERPPLARNVFRPGGHSYGGGATNANARAKGGTGQTGGLTQPKKDEPKKLPPRPGGPEPKPGHPPQTRQATARTVTPKGQLPGGKAPPKAGSVPSSFLLKKAREPGPPREPKEPFRPPPITPHEYMLSLYRTLSDADRKGGNSSVKLEAGLANTITSFIDKGQDDRGPVVRKQRYVFDISALEKDGLLGAELRILRKKPSDTAKPAAPGGGRAAQLKLSSCPSGRQPASLLDVRSVPGLDGSGWEVFDIWKLFRNFKNSAQLCLELEAWERGRAVDLRGLGFDRAARQVHEKALFLVFGRTKKRDLFFNEIKARSGQDDKTVYEYLFSQRRKRRAPLATRQGKRPSKNLKARCSRKALHVNFKDMGWDDWIIAPLEYEAFHCEGLCEFPLRSHLEPTNHAVIQTLMNSMDPESTPPTCCVPTRLSPISILFIDSANNVVYKQYEDMVVESCGCR

SEQ ID NO: 321985 - DNA, 753 bp, Artificial Sequence
  derived and/or modified sequence
atgatccagagcagccagcccatgagcctgaagctgacctgcagcgccttcagactgcagagagccctgagattcctgctgggcagactgccctggagagtggccagcggcgccagaagattcagaagatggctgaacagatacagctacaccgtgctgagcagctggcccgagagagccctgatcagcctgaagaacagaagcagattcctggtgagacccaacaccagaaacagagccttcagctggacctgcagagccgccagaagcaagcccagacccagaagaagcaccgccctgcccagaagccaggccagcagcagcagacacagctgggccgagttcctgaagttcagaaagagcttccagatgagcaacaccagccagcccgaccccagcagacccggcaccgagagaaccagcagcaaggaggccggctgcagacccctgggccagctggacagcttcagctgggccgccagacccccccccggcgccgccggcctggccgtgagcgagggcttcttcagaaagatcagaagcagcgcccccagcagccccagcttcagcagagccctgatgagcaacacctacctgtgcttcctgaccaccggccccagaagcagcagagagaacacccagaagagcttccccgccaccagccccagagagcccgtgaccagcagactgagaggcaaggcccccgccctgagccccagcagagagctgagcttcaccagcgcccccttctag

SEQ ID NO: 321986 - DNA, 753 bp, Artificial Sequence
  derived and/or modified sequence
atgatccagagttctcagcccatgagcctgaaactgacgtgcagcgcgttcagacttcaacgggctctgcgattcttactgggtagattgccctggcgggtcgcttcaggagcccgacggtttcggcggtggctgaacagatactcatacactgtgttgtcaagctggcctgagcgagctctgatctcgttaaaaaatagaagccggttcttggtgcggccaaacacccgtaatcgtgccttttcgtggacatgtagggccgccaggtccaaaccacggccccgccggtcgactgccctgccgcgaagccaggcctctagctcacgccacagttgggccgagtttctgaagtttagaaagtccttccagatgtccaatacttcccagcctgacccgtcacggcctggcaccgagaggacttcatcgaaagaggctggctgtcggcccctagggcagctcgactcattcagttgggctgcccgacctcccccaggggccgctggtttagccgtgtcagaaggtttctttcgaaaaattcggtcaagcgcccctagctccccatcttttagccgggcactgatgtctaatacctatctttgtttcctgactacggggccccgaagtagccgagagaacacacagaagagctttcctgcaaccagtccgagagagcctgtaacctctcggctgcggggcaaggcccctgcactgtcgccttccagagaacttagcttcacgtcagccccattctag

SEQ ID NO: 321987 - DNA, 1734 bp, Artificial Sequence
  derived and/or modified sequence
agggatctattttggagacaacaaacttgactaaggaatctcaagaagaaaatataattctgctgccaggccccaatggagcaaatagagctcgggacccaggggcctttggaaggaacaggaatgcggttagaggagtgcaggaaggggctcttgggatgtgccacccaggaagacagagggccagtgctgctacctgcagccacacgactccacgaccatgtcctcatactgcttatacaccacgttgttggcagagtcaatgaagaggatgctgatgggactcagccgcgtgggcacacagcaggtgggtggtgtggactcggggtccatggagttcatcagggtctggatgactgcatgattcgtgggctccaggtgggagcgcaatgggaactcgcacagcccctcgcagtggaaagcctcgtactcaaggggtgcgatgatccagtcgtcccagcccatgtccttgaagttgacatgcagtgccttccgactgcagcgagccttaaggttcttgctgggtcgcttgccctggcgagtggccagtggggcccgccgttttcgccgctggctgaacaggtactcatacacggtcttatcgtcctggccagagcgggccttaatctcattaaagaacaggtcccgtttcttggtgcggccaaacaccaggaacagggccttctcgtggacctgccgggcggcgcggtcgaagcccaggccacggaggtccacggccctgccccgttcccaggcctccagctccaggcacagctgggccgagttcttaaagtttcggaagagcttccagatgtcgaacacctcccagccagatccgtccaggcctggcacggagcgcacatccagcaaggaggccggctgccggccgctggggcagctggacagcttcagctgggcagcccgcccgcctccgggggccgctggcttggccgtgtccgagggcttcttccgcaagatccgcagctcggcccccagcagcccatccttctccagggcactaatgtcaaacacgtacctctgcttcctgaccacgggacctcggtcatctagagagaacacccagaagtcattccctgcaacctcaccaagggagccagtcacttcgaggctgcgggggaaggccccagctctctccccgtccagagagctttctttcacctctgccccattctgacagaagccaagagccaaaccactgagagcctttttgaaaatgagagcatttcctacatagccgaccaagtaggggtgttcacctgaagatgtggctggggatgatttgcgtgattctggtgtttgtgtcatgatatacgtgttatcagagatttatcagctttgtaactgccttctacctatctctctcccagccatgagctaacgtgatgtctcatttgtgagataggtggagtgagcattaaaattactcctgttgactgggcacagtggctcacacctgcaatcccagcactttgggaggctgaggtgggtggattgcttgagctccggagttcgaaaccagcctgcacaacatggtgacactctgtctctacaaaaaatacaaaaattaaccaggcatggtggcgtgcacatgtagtcccagctactcaggaggctgaggtgggaggattgattgaccccagggaggtcaaggcttcagtgagccgtgaattcgctattgcactccggcctgggcaacagagaaagaccctggct

SEQ ID NO: 321988 - DNA, 753 bp, Artificial Sequence
  derived and/or modified sequence
atgatccagagcagccagcccatgagcctgaagctgacctgcagcgccttccggctgcagagggccctgcgcttcctgctgggccgcctgccctggagggtggccagcggggcccggcgcttccgccgctggctgaaccgctacagctacacagtgctgagctcctggccagagcgggccctgatcagcctgaagaacagaagccgcttcctggtgcggcccaacaccaggaacagagccttctcctggacctgcagagctgcccggagcaagccccggcccaggaggagcacagccctgcccaggagccaggccagcagcagccgccacagctgggccgagttcctgaagttcaggaagagcttccagatgagcaacaccagccagcctgaccccagcaggcctggaacagagaggaccagcagcaaggaggccggctgccggcccctgggccagctggacagcttctcctgggccgcccggcccccacctggagctgctggcctggccgtgtctgagggcttcttcaggaagatccgcagcagcgcccccagcagccccagcttcagccgggccctgatgagcaacacctacctgtgcttcctgaccaccggccccaggagcagccgggagaacacccagaagagcttccctgccaccagcccccgggagcctgtgaccagccggctgcggggcaaggccccagccctgagccccagccgggagctgtccttcaccagcgcccccttctag

SEQ ID NO: 321989 - DNA, 753 bp, Artificial Sequence
  derived and/or modified sequence
atgatccagagcagccagcccatgagcctgaagctgacctgcagcgcatttcgcctgcagagagctcttcgctttctcttgggaagactgccttggcgggttgcatcaggtgcccgcagattccggagatggctgaatcgatactcctacactgttctaagctcttggcctgagcgtgcacttatcagcctgaaaaacagatcccgcttcttggtacgtccaaacactcggaacagggcgtttagctggacatgtcgggccgccagatctaagcctaggccacggcggtctacagctctccctaggagtcaagcttcaagcagtagacactcctgggccgagtttctgaagttcagaaaatcctttcagatgagtaatacaagtcaaccagacccgtcacgccctggcactgagcgtacaagcagtaaagaagccggctgtagaccgcttgggcagttggattccttctcctgggccgcacgcccgccacccggggccgccggattagccgtgagtgaaggctttttcaggaagataaggtcttctgcaccctccagcccctccttctcccgtgccttgatgagcaacacttatctgtgctttcttaccaccggacctcgcagttcgcgggagaacacacagaagtcttttcccgccacgtctccccgcgaacctgtaaccagccgcctgaggggcaaggctcccgcgctctccccctctagggaactatccttcacaagcgccccattctag

SEQ ID NO: 321990 - DNA, 753 bp, Artificial Sequence
  derived and/or modified sequence
atgatccagtcctcccagcctatgtctctcaagctaacttgttcagctttccgattgcagagggcgctgagattcctcctcggacgcctgccttggcgggtcgcatccggagctaggaggtttaggcgctggctgaaccgctactcttacaccgtgttgagttcctggccagaaagggctctgatatcccttaagaataggagtagatttctggtccgtcccaacacacgcaatcgggcattttcatggacctgtagggctgcacgctcgaagcctcgccctcggcgtagcaccgcactgcctcgctcccaagccagttcgagtcgacactcttgggccgagttcctaaagttcagaaaatctttccaaatgtcaaatacgtcccaacctgacccaagcagacctgggacagaacgaacctcgagtaaggaggccggttgtcgtcctctcgggcaacttgacagtttttcatgggctgccaggccgcctcccggagccgctgggctcgctgtgagtgagggatttttcagaaaaattcgctcaagcgcgccttcgagcccaagcttcagccgggctctgatgagcaatacatacctgtgctttttaaccactggccctaggtcttctcgcgagaatacacagaagtcatttcccgcaacatctcctcgagaacccgtcaccagccggctccgtggtaaagctcctgctctgtctcccagtcgggagctgagcttcacctcagccccattttag

SEQ ID NO: 321991 - DNA, 1506 bp, Artificial Sequence
  derived and/or modified sequence
atgaggctgccgaaactgctgacattcctgctgtggtacctggcttggctcgacctcgagttcatctgcacagtcttaggggcacctgaccttggccagagacctcaaggaacacgtccagggctagcgaaagccgaagctaaagagagacctcccctggcacgaaacgtctttcgaccaggagggcatagctacggcgggggggccaccaatgcgaacgcccgggctaagggcggtacgggccagactggggggctgacccagccaaaaaaggatgagcctaaaaaactacctccgagaccaggtgggccagaacccaaacctggtcatccgcctcagactcgacaggccactgcccggacggttacacccaagggccagctgcctgggggtaaagctcctccaaaagcaggcagcgtgccctcaagctttctgttgaaaaaggctcgtgagcccggtccaccaagagagcctaaggagccatttcgcccacctcccatcacgcctcacgagtacatgttgagtctgtaccggaccctctcagatgctgatagaaaaggtggcaatagcagcgtgaaattggaagccggcctggctaacacaataaccagcttcatcgataaaggccaggacgataggggacctgtggttcgcaagcagcggtacgtatttgacatttccgcactcgaaaaggatggcctgctgggcgccgaactgagaattttgcggaagaaaccttccgacaccgccaaacccgccgcccccggtggcggcagggcagcgcagttaaaactctcttcctgcccgtccggtaggcaaccagccagcttactggacgtccgctctgttccaggcctggatggctccggatgggaagttttcgatatttggaagttatttcgaaattttaaaaattctgcccagctgtgtctggagctggaggcgtgggaacgcggcagagctgtcgatctcaggggtctcggttttgaccgagccgctcgccaggttcatgaaaaagccctgttcctggtcttcggccgaacaaagaagcgtgacctgttcttcaatgagatcaaggccagaagtgggcaggacgacaaaacggtatacgaatatctgtttagccagcgacggaagcgcagggctcccctggcaactaggcaggggaaaagacccagcaagaacctaaaagctaggtgtagtcgcaaagcgctgcatgtgaatttcaaggatatgggctgggatgattggattattgcacctcttgagtatgaggccttccattgtgaggggctgtgcgaatttcccctacgctcacacctcgagcccacaaatcacgccgtgattcagacgttaatgaatagcatggacccggagagtacaccaccgacatgttgcgtgccaactcgtctaagtccaattagtattctgtttatcgattcggctaacaatgtggtctacaagcaatacgaagacatggtggtggaatcctgtggctgtcgatag

SEQ ID NO: 321992 - DNA, 1506 bp, Artificial Sequence
  derived and/or modified sequence
atgcgactgccaaagcttctcacattcttgctctggtatttagcctggctcgacctggaattcatttgcacagttctcggtgcccccgacctggggcagcggcctcagggcacacgtccggggctggcaaaagctgaggctaaagagagacctcccctggcacggaatgtgtttcgccccggaggtcattcctacggcggcggcgcaacgaatgcgaatgcccgagctaagggaggtacaggtcagacgggcgggctaacacagcccaaaaaggatgagccaaaaaagctgccacctcggcccggaggacccgaacctaagcccggtcaccctccccagacacgtcaagcaaccgcgcgaaccgtcacccctaagggacaactgcccggcggcaaggcaccacccaaggccggctccgttccgtccagcttcttgctgaagaaggctagagagccaggacccccaagagagcccaaagaaccctttcggccaccccccataaccccccatgaatacatgttgtcactgtaccggacactgagtgacgccgaccgcaaaggcgggaattcttccgtgaagctagaggccggtctcgccaataccatcacctcattcatcgataaaggccaggacgaccgggggccggttgtacgaaaacagagatacgtcttcgacatatctgccctggagaaagacggcctcctgggagcagaactgcgaattcttcgaaagaagccgtccgatacagccaagcccgccgctcccgggggcggccgggccgcacagcttaaattgtctagttgcccctcaggcaggcaacctgccagcctcctggatgtgcgctctgtgcccggcctagatggctccggctgggaggtcttcgacatctggaaactctttagaaatttcaaaaacagcgctcaactgtgtctggaactggaagcctgggagcgaggaagagcagtggatctccggggactggggttcgaccgggcagccaggcaggtacacgaaaaagccttgttcctggtgtttggccgtactaagaagagggatctattctttaatgaaataaaagcgcgcagcggacaggacgataagactgtgtatgagtacctgttctcccaacgacggaagaggcgagcaccactggccactagacagggtaaaagaccctcaaagaatcttaaggcccgttgttcacggaaggcgctacatgtaaatttcaaagacatgggttgggatgactggattatagctccactggagtatgaggcgtttcattgcgaaggcttatgtgagtttcctctgaggtcccatcttgagccaacgaaccacgccgtgattcagactctgatgaattcaatggatcctgagagcacacctccaacttgctgtgtgcccactcgtttgtccccaatctcaatcctgtttattgatagtgcaaataatgtggtttacaagcagtacgaagatatggtagtcgaaagttgcgggtgtcggtag

SEQ ID NO: 321993 - DNA, 2383 bp, Artificial Sequence
  derived and/or modified sequence
ttcaagccctcagtcagttgtgcaggagaaagggggcggttggctttctcctttcaagaacgagttattttcagctgctgactggagacggtgcacgtctggatacgagagcatttccactatgggactggatacaaacacacacccggcagacttcaagagtctcagactgaggagaaagcctttccttctgctgctactgctgctgccgctgcttttgaaagtccactcctttcatggtttttcctgccaaaccagaggcacctttgctgctgccgctgttctctttggtgtcattcagcggctggccagaggatgagactccccaaactcctcactttcttgctttggtacctggcttggctggacctggaattcatctgcactgtgttgggtgcccctgacttgggccagagaccccaggggaccaggccaggattggccaaagcagaggccaaggagaggccccccctggcccggaacgtcttcaggccagggggtcacagctatggtgggggggccaccaatgccaatgccagggcaaagggaggcaccgggcagacaggaggcctgacacagcccaagaaggatgaacccaaaaagctgccccccagaccgggcggccctgaacccaagccaggacaccctccccaaacaaggcaggctacagcccggactgtgaccccaaaaggacagcttcccggaggcaaggcacccccaaaagcaggatctgtccccagctccttcctgctgaagaaggccagggagcccgggcccccacgagagcccaaggagccgtttcgcccaccccccatcacaccccacgagtacatgctctcgctgtacaggacgctgtccgatgctgacagaaagggaggcaacagcagcgtgaagttggaggctggcctggccaacaccatcaccagctttattgacaaagggcaagatgaccgaggtcccgtggtcaggaagcagaggtacgtgtttgacattagtgccctggagaaggatgggctgctgggggccgagctgcggatcttgcggaagaagccctcggacacggccaagccagcggcccccggaggcgggcgggctgcccagctgaagctgtccagctgccccagcggccggcagccggcctccttgctggatgtgcgctccgtgccaggcctggacggatctggctgggaggtgttcgacatctggaagctcttccgaaactttaagaactcggcccagctgtgcctggagctggaggcctgggaacggggcagggccgtggacctccgtggcctgggcttcgaccgcgccgcccggcaggtccacgagaaggccctgttcctggtgtttggccgcaccaagaaacgggacctgttctttaatgagattaaggcccgctctggccaggacgataagaccgtgtatgagtacctgttcagccagcggcgaaaacggcgggccccactggccactcgccagggcaagcgacccagcaagaaccttaaggctcgctgcagtcggaaggcactgcatgtcaacttcaaggacatgggctgggacgactggatcatcgcaccccttgagtacgaggctttccactgcgaggggctgtgcgagttcccattgcgctcccacctggagcccacgaatcatgcagtcatccagaccctgatgaactccatggaccccgagtccacaccacccacctgctgtgtgcccacgcggctgagtcccatcagcatcctcttcattgactctgccaacaacgtggtgtataagcagtatgaggacatggtcgtggagtcgtgtggctgcaggtagcagcactggccctctgtcttcctgggtggcacatcccaagagccccttcctgcactcctggaatcacagaggggtcaggaagctgtggcaggagcatctacacagcttgggtgaaaggggattccaataagcttgctcgctctctgagtgtgacttgggctaaaggcccccttttatccacaagttcccctggctgaggattgctgcccgtctgctgatgtgaccagtggcaggcacaggtccagggagacagactctgaatgggactgagtcccaggaaacagtgctttccgatgagactcagcccaccatttctcctcacctgggccttctcagcctctggactctcctaagcacctctcaggagagccacaggtgccactgcctcctcaaatcacatttgtgcctggtgacttcctgtccctgggacagttgagaagctgactgggcaagagtgggagagaagaggagagggcttggatagagttgaggagtgtgaggctgttagactgttagatttaaatgtatattgatgagataaaaagcaaaactgtgcctaaaa

SEQ ID NO: 321994 - DNA, 2572 bp, Artificial Sequence
  derived and/or modified sequence
cgctgccactggttagcgataatactggcagcgcgaccggtttctgagggttgttcaccttgctgctcagacgctccgagaagcttcaggcagcataacacttacagtagagacagggtttcaccatgttagccaggatggtcttgatctcctgacctcgtgatccacctgcctcggcctcccaaagtgctgggattacaggcgtgagccactgcgcctggccgcaatttacttcattgaatctccaacaagagtcctgtgagctgctgactggagacggtgcacgtctggatacgagagcatttccactatgggactggatacaaacacacacccggcagacttcaagagtctcagactgaggagaaagcctttccttctgctgctactgctgctgccgctgcttttgaaagtccactcctttcatggtttttcctgccaaaccagaggcacctttgctgctgccgctgttctctttggtgtcattcagcggctggccagaggatgagactccccaaactcctcactttcttgctttggtacctggcttggctggacctggaattcatctgcactgtgttgggtgcccctgacttgggccagagaccccaggggaccaggccaggattggccaaagcagaggccaaggagaggccccccctggcccggaacgtcttcaggccagggggtcacagctatggtgggggggccaccaatgccaatgccagggcaaagggaggcaccgggcagacaggaggcctgacacagcccaagaaggatgaacccaaaaagctgccccccagaccgggcggccctgaacccaagccaggacaccctccccaaacaaggcaggctacagcccggactgtgaccccaaaaggacagcttcccggaggcaaggcacccccaaaagcaggatctgtccccagctccttcctgctgaagaaggccagggagcccgggcccccacgagagcccaaggagccgtttcgcccaccccccatcacaccccacgagtacatgctctcgctgtacaggacgctgtccgatgctgacagaaagggaggcaacagcagcgtgaagttggaggctggcctggccaacaccatcaccagctttattgacaaagggcaagatgaccgaggtcccgtggtcaggaagcagaggtacgtgtttgacattagtgccctggagaaggatgggctgctgggggccgagctgcggatcttgcggaagaagccctcggacacggccaagccagcggcccccggaggcgggcgggctgcccagctgaagctgtccagctgccccagcggccggcagccggcctccttgctggatgtgcgctccgtgccaggcctggacggatctggctgggaggtgttcgacatctggaagctcttccgaaactttaagaactcggcccagctgtgcctggagctggaggcctgggaacggggcagggccgtggacctccgtggcctgggcttcgaccgcgccgcccggcaggtccacgagaaggccctgttcctggtgtttggccgcaccaagaaacgggacctgttctttaatgagattaaggcccgctctggccaggacgataagaccgtgtatgagtacctgttcagccagcggcgaaaacggcgggccccactggccactcgccagggcaagcgacccagcaagaaccttaaggctcgctgcagtcggaaggcactgcatgtcaacttcaaggacatgggctgggacgactggatcatcgcaccccttgagtacgaggctttccactgcgaggggctgtgcgagttcccattgcgctcccacctggagcccacgaatcatgcagtcatccagaccctgatgaactccatggaccccgagtccacaccacccacctgctgtgtgcccacgcggctgagtcccatcagcatcctcttcattgactctgccaacaacgtggtgtataagcagtatgaggacatggtcgtggagtcgtgtggctgcaggtagcagcactggccctctgtcttcctgggtggcacatcccaagagccccttcctgcactcctggaatcacagaggggtcaggaagctgtggcaggagcatctacacagcttgggtgaaaggggattccaataagcttgctcgctctctgagtgtgacttgggctaaaggcccccttttatccacaagttcccctggctgaggattgctgcccgtctgctgatgtgaccagtggcaggcacaggtccagggagacagactctgaatgggactgagtcccaggaaacagtgctttccgatgagactcagcccaccatttctcctcacctgggccttctcagcctctggactctcctaagcacctctcaggagagccacaggtgccactgcctcctcaaatcacatttgtgcctggtgacttcctgtccctgggacagttgagaagctgactgggcaagagtgggagagaagaggagagggcttggatagagttgaggagtgtgaggctgttagactgttagatttaaatgtatattgatgagataaaaagcaaaactgtgcctaaaa

SEQ ID NO: 321995 - DNA, 1506 bp, Artificial Sequence
  derived and/or modified sequence
atgaggctgcccaagctgctgaccttcctgctgtggtacctggcctggctggacctggagttcatctgcaccgtgctgggcgccccagacctgggccagaggccccagggcacccggcccggcctggccaaggccgaggccaaggagaggcctcccctggccagaaatgtgttccggcctgggggccacagctatggaggaggagccaccaatgccaatgcccgggccaagggcggcaccggccagacaggaggcctgacccagcccaagaaggatgagcccaagaagctgccccccaggcctgggggccctgagcccaagccaggccaccccccccagacccggcaggccacagccaggacagtgacccccaagggccagctgcccggcggcaaggccccacccaaggccggctctgtgcccagcagcttcctgctgaagaaggcccgggagcccggccccccccgggagcccaaggagcccttccggcccccacccatcacccctcatgagtacatgctgagcctgtaccgcaccctgagtgatgctgacaggaagggcggcaacagctctgtgaagctggaggccggcctggccaacaccatcaccagcttcatcgacaagggccaggatgaccggggccctgtggtgaggaagcagcgctacgtgtttgacatcagcgccctggagaaggatggcctgctgggcgctgagctgcgcatcctgaggaagaagcccagcgacacagccaagccagctgcccctgggggcggccgggccgcccagctgaagctgagcagctgccccagcggccggcagcctgccagcctgctggatgtgcgctctgtgcccggcctggatggcagcggctgggaggtgtttgacatctggaagctgttcaggaacttcaagaacagcgcccagctgtgcctggagctggaggcctgggagcggggccgggctgtggacctgcggggcctgggctttgaccgggccgcccggcaggtgcatgagaaggccctcttcctggtgtttggaagaaccaagaagagggacctcttcttcaatgagatcaaggcccggagcggccaggatgacaagacagtgtatgagtacctgttcagccagaggaggaagaggcgggcccccctggccacccggcagggcaagaggcccagcaagaacctgaaggcccgctgcagcaggaaggccctgcacgtgaacttcaaggacatgggctgggatgactggatcatcgcccccctggagtatgaggccttccactgtgagggcctgtgtgagttccccctgcggagccacctggagcccaccaaccacgctgtgatccagaccctgatgaacagcatggaccctgagagcaccccacccacctgctgcgtgcccacccggctgagccccatcagcatcctcttcattgattctgccaacaacgtggtgtacaagcagtatgaggacatggtggtggagagctgtggctgcaggtag

SEQ ID NO: 321996 - DNA, 1506 bp, Artificial Sequence
  derived and/or modified sequence
atgcggctgcccaagctgctgaccttcctgctgtggtacctggcctggttagatcttgagttcatttgcacggtgctcggcgctccggatctcggacaacgaccgcagggtacccgtccaggtctagcgaaagctgaagccaaggagaggccaccactggcacggaacgtatttcgacccggtgggcattcttatggagggggcgcaacaaatgcaaacgcacgcgcgaaagggggcaccggccagactgggggacttacacagcctaagaaggacgagcctaagaaactgcctcctagaccgggtgggccagaacccaagcctgggcacccgccccagacccgacaggctaccgccagaacagtcacacccaaggggcagctgccaggcggtaaagctccgccaaaggcagggtcagtgcctagtagcttcctgctgaagaaggctcgcgagccaggtccacccagagaaccaaaggaaccattccggcctccccctatcacaccacacgagtacatgttgtctttatatcgcacactgagtgatgcagatcggaagggaggtaacagtagcgtgaagcttgaagccggactggctaatactatcacatctttcattgataagggtcaggacgaccggggcccagtggtcagaaaacagaggtatgtgttcgacattagtgctctggagaaagacggactacttggcgctgagttacgaatcttgcgcaagaaaccaagtgacaccgcaaagcctgctgcgccaggcggtggcagagctgcgcagttaaagctgtcctcttgcccttccggtcgtcagcccgcctctctcctggatgtccggtcagtccccggactggatgggagtggatgggaagtattcgatatatggaaactgttccgcaacttcaagaatagcgcgcagttatgcttagaactcgaggcatgggagagaggacgcgccgtggatctgagagggctagggttcgatcgcgccgcacgtcaggtgcacgaaaaagcgttgtttctggtgttcgggcgcacaaagaaacgggacctcttttttaacgagattaaagcccgctcagggcaggatgataagaccgtgtacgaatatttattctcccagcgccgaaaaagacgagctcctctggctaccagacagggaaaaaggcccagcaaaaatcttaaagccagatgttccaggaaggctctgcacgttaattttaaagacatggggtgggacgactggatcattgcacctctggagtacgaggcctttcattgtgaagggctctgcgagtttcccttgagatctcatctggaacccacaaatcatgctgtcatacagacccttatgaattctatggaccccgagtccaccccgcccacttgttgcgtgcccacgcgcctgtctcccatctcaattcttttcattgacagtgccaataatgtcgtgtataagcagtatgaagatatggtagtagaaagttgtgggtgtcggtag

SEQ ID NO: 321997 - DNA, 1506 bp, Artificial Sequence
  derived and/or modified sequence
atgcggctgcccaagctgctgaccttcctgctgtggtacctggcctggctggacttggaattcatctgtacagtgctgggggcccccgatttgggccagcggcctcagggaactcggcccggcctagctaaggccgaggctaaagaaaggccccccctggcgaggaatgtgttccgacctggcggccatagttatggcggaggcgcaacaaatgccaacgctcgggcaaagggtggaactggtcagaccgggggattgactcagcccaagaaggacgaacccaaaaaactcccacccagaccaggtggccctgagcctaagccgggccaccctcctcagaccagacaagctactgcccgcacggtcaccccaaagggtcagctccctggcggcaaggcccctccgaaggccgggtctgtgccttcaagttttttgctgaagaaggcccgagaacctgggccgcctcgggaacctaaagaaccttttcgaccacctccaatcacaccacacgagtacatgctttccctgtatagaactctatccgacgctgatagaaagggaggaaatagcagcgtgaagttggaggcaggactcgcgaacaccatcaccagtttcatagataagggccaggacgatcggggccccgtggttcggaagcaacggtacgtgttcgacatcagcgccctggagaaagacggattactgggggccgagctgcggattttaagaaaaaaacctagtgatacagcaaagcccgctgcccccgggggcggccgtgccgcacagctgaagctctcttcatgtccttccggaaggcagccggcttctctgctagatgtgagaagtgttcccggattggatggcagtggctgggaagtctttgatatctggaaactgtttcgcaatttcaagaactccgcgcagctgtgcctggagcttgaggcatgggagagggggcgggctgtggatctccgcggccttggctttgacagagccgcccgccaagttcatgagaaggcactgttcttagtgttcggacggaccaaaaaacgtgacctgtttttcaatgagataaaagctcgctccggtcaagatgacaaaaccgtgtacgaatacctattttctcagcgccgaaagcgccgtgctccattggccaccaggcagggcaaacggcccagtaagaatctcaaggccaggtgttctaggaaggcgcttcatgtgaactttaaggacatggggtgggacgactggatcatcgcgccattggagtacgaagcctttcattgtgagggcttatgcgagtttccgcttaggagccacctggagccgacaaaccatgccgtcatccagacgcttatgaactctatggaccccgagagtacacccccgacatgctgcgtcccgacgagactctcccccatctcaatccttttcatcgattccgccaacaatgtcgtctataagcagtacgaggacatggtagttgaaagctgtggttgcaggtag

SEQ ID NO: 321998 - DNA, 1506 bp, Artificial Sequence
  derived and/or modified sequence
atgcgcctgcctaagctgttaaccttcctcctctggtatctcgcctggttggacctagagtttatatgcactgtgctgggcgctcccgacctgggccagagacctcaaggcactaggccaggactcgccaaggccgaagccaaagaaagacctcccctagcgcgaaacgtgtttaggccaggagggcactcgtatggcggtggtgccaccaatgctaacgctcgggctaaagggggaaccggtcaaacaggcggacttacacagccaaagaaagatgagcccaagaagctgccccctaggccaggcggacctgagcccaaaccaggacaccctccccagaccagacaagctactgctcgaactgtgaccccgaagggacagctgcccggtggaaaagccccacccaaggctgggtcggtgccatcatccttcctactaaaaaaggccagagagcctggtccacccagagaacccaaggaacccttcaggccacctcctatcactccgcacgagtacatgctgagcttgtaccgaaccttgtccgacgctgatcgtaaaggaggcaactcttcagttaagctcgaggccggactggcgaacacaattaccagtttcattgacaagggccaggacgaccggggtcctgttgtccgcaagcagagatatgttttcgatattagcgctttagagaaagacgggctgctgggcgcagaactgaggatccttagaaagaagccaagcgataccgccaaacccgcagcaccaggcggaggaagggctgcacagctgaagcttagctcttgcccaagtggccgacaaccagcctctctgctggacgtgagaagcgtaccgggacttgacggcagtgggtgggaggtgtttgatatttggaagctgttcaggaatttcaagaattcggcccaactgtgcctggagctagaggcatgggagcggggaagagccgtggatcttcggggactggggttcgacagagctgccaggcaggtccacgagaaggcactgtttttggttttcggaaggacgaagaaacgcgatttattttttaacgagataaaggctagatctgggcaggatgataagactgtatacgagtatttgttttctcaaagaagaaagcggcgtgcgcctctcgcgacacggcaggggaagcgcccaagtaaaaatctgaaggcaagatgctcaagaaaggctctccacgtcaacttcaaggacatgggatgggatgattggatcattgcccctttggaatacgaggccttccattgtgaagggctgtgtgaatttcccctgcggagccatctggagcccaccaaccacgcagtcattcagacccttatgaattctatggaccctgagtctacccctcccacttgctgcgtccccactcggctctcaccgatttctatcctgtttatcgactcagccaacaacgttgtgtacaagcagtacgaagatatggtcgtggagtcatgtgggtgcagatag

SEQ ID NO: 321999 - DNA, 1506 bp, Artificial Sequence
  derived and/or modified sequence
atgcggctgccaaaactgcttacatttcttttgtggtaccttgcctggctggatcttgagttcatttgtacagtgctgggcgcaccagacctcgggcagcggccacaaggcacacggcctggcttggcaaaagccgaagccaaagagaggccccctctggcacgaaacgtcttccgccctgggggtcactcttatgggggaggtgctactaatgctaacgccagggcgaagggcggtacaggccaaactggaggattaacccagcccaaaaaagacgagccaaagaagctcccacccaggccgggaggaccagagccaaagccaggtcacccccctcaaacgcgccaagcaaccgccaggaccgttaccccgaaaggacaactgccgggaggaaaggcccctcccaaagctggttcggtccctagcagcttcctgcttaaaaaggccagggaaccaggacccccacgggagccgaaggagccctttagaccacctcctattacgccacatgaatacatgctgagtctgtaccggaccctgtcggacgctgatcgtaaggggggtaattctagcgtgaaactggaggctggcttggccaatacaatcacctctttcatcgacaaaggtcaggacgatcgcggaccagtggtgcgcaaacaacgctacgtttttgacatttccgccctcgaaaaggacggtttgttgggagccgagctgcgaattctcaggaaaaagcccagtgatacagccaaaccggctgcccctggtggtggcagagccgctcagctgaagttaagctcgtgtccatctggtagacagcccgcttcgctgctagacgtgcggtccgtacccggtttggacggatccggatgggaggttttcgatatctggaaactgttccggaatttcaagaattccgcccagctttgtttggagctggaggcctgggagcgcggtagagctgtggatttacgtggactgggatttgatcgagccgcacggcaggtgcacgagaaagcgctgttccttgtcttcggacgcaccaaaaaacgtgatctctttttcaacgaaattaaggcacgctccgggcaagacgacaagacagtgtacgaatacctgttctcccaaagacgcaagcggagagccccattggccaccaggcaagggaagaggcctagcaagaacttgaaggcccgttgttcccgcaaggccttgcatgtgaactttaaggacatggggtgggacgactggatcatcgcacccctcgaatatgaggcctttcattgcgaaggcctgtgcgaattcccactgaggtcacatctcgagcctacaaatcacgcagttatccagactttgatgaattcaatggatcctgagtccacccccccaacctgctgtgtgcctacaagactctcaccgatcagtattctgttcatcgattcagctaataacgtagtgtacaaacagtatgaagatatggtggtggagtcttgcggctgcaggtag

SEQ ID NO: 322000 - DNA, 1503 bp, Artificial Sequence
  derived and/or modified sequence
atgaggctgcccaaattgctgaccttcctgctctggtacctcgcatggctggacctggagtttatctgtactgtgctgggggcccccgaccttggacagcgccctcaaggcacaaggccagggctcgctaaagccgaggccaaagagcgccctccccttgcgcggaatgtttttcgccctggtgggcactcctacggcggcggggcgactaatgccaacgcccgggccaagggaggcactggtcagaccggcggacttacgcagccaaaaaaagatgaacccaagaaacttccgcctagacctgggggacctgagcctaagccagggcaccctcctcagacgaggcaggcaacagcccggaccgtcactccgaagggtcagttgccgggcggaaaggcacctccaaaggccggttctgtgccctcatcgttcctgctgaaaaaagccagagaacctggcccgcctagagaaccgaaagagcctttcaggccccctccgataaccccacatgagtacatgctgtccctgtataggacactgtccgacgccgaccgcaagggcggtaacagctccgtcaagctagaggccggactggccaacacgattacatcattcatcgacaagggacaggacgatagaggccctgtagtgcgaaagcagcgatatgtatttgatattagtgccctggagaaagatggcttgctcggtgccgagcttcgcatccttcgcaagaaaccatccgatactgctaaacctgcggcccccggtggcggacgggccgcccagctaaaattgtcctcatgtccctccgggcggcagccagcaagtcttctcgacgtccggtcggttcctggcctggatggtagtggttgggaggtgtttgatatctggaagctcttccgcaactttaagaacagcgctcagctgtgcttggaactggaggcatgggagaggggcagagctgttgatctccggggccttggcttcgatcgggccgcgagacaggtccacgagaaagctctgtttctggtttttggacgcacaaaaaagcgcgatcttttcttcaacgaaatcaaggcgaggtccggtcaggacgacaagaccgtttacgaatacctgtttagccagaggcggaagagacgggcacccctggccacccgccaagggaagcggccctccaagaatctaaaggcccggtgctctcgtaaagctctgcacgtgaacttcaaggacatgggatgggatgactggataatcgcgcctttggagtacgaagcttttcattgcgaaggactatgtgagttccccctccggtctcacctggaacccacgaaccacgctgtgattcagaccttgatgaactctatggaccctgagtcaactcctcctacgtgctgcgtgcccacacgactgtcccccattagtatcctgtttatcgatagtgctaacaatgtcgtgtataagcaatacgaagatatggttgtcgagtcttgcggttgcaga

SEQ ID NO: 322001 - DNA, 1503 bp, Artificial Sequence
  derived and/or modified sequence
atgaggcttcccaaattgctcacttttctcctgtggtaccttgcttggcttgacttggagtttatctgcacagtattgggagcccccgatcttgggcaaagaccccaaggaacccgcccgggccttgcaaaggcagaggcaaaggaacgcccgcctttagcgcgcaacgtttttaggcccggaggccactcttacggagggggagccacaaacgcaaacgccagggccaaaggaggcacggggcagactggagggttgacccaaccaaagaaagacgaacccaagaaactgcctccccggcctggcggtcctgagcctaagcctgggcaccctccccaaaccaggcaggctaccgcaagaaccgtcacccctaagggtcaacttcccgggggcaaagctcctccgaaagctggcagcgtccctagctcctttttgttaaagaaagctagagagcctggcccacctcgcgagcccaaggaaccctttcggccaccgcctatcaccccacatgagtacatgctcagtctttatcggaccttatccgacgccgacaggaaaggagggaactcttcagtcaaattagaggcaggcttagctaacactatcacctctttcatagacaaaggtcaagatgatagaggccccgtggttaggaagcaaagatacgttttcgatatatcagcgctggagaaagacggcctcttgggggccgaactcaggatccttcgtaaaaagcctagcgacactgccaaaccagcagctccaggcggaggacgggctgctcagcttaaactgtccagctgtccctccggcagacagcccgcctctctcctggatgtgaggagtgtgccaggccttgatgggtctgggtgggaagtgtttgacatctggaaattgttccgcaattttaagaactctgcgcagctgtgcctggaactggaagcttgggagagaggcagagccgtagacctaagaggcttgggattcgatcgtgctgcaagacaagttcacgaaaaggctctgttcctggtcttcggcagaacgaagaagcgtgatctttttttcaacgaaatcaaggcaaggtctggccaggacgataagactgtctatgagtatctgttctcacaaagaaggaaaaggcgtgcaccactggccaccagacagggcaagagacctagtaagaacctgaaagccagatgcagtcgcaaggcattgcacgtgaacttcaaagatatgggctgggatgactggattatcgctccattggaatatgaggcctttcattgcgaaggattgtgcgagttccccctcagatctcacttggaacctacaaatcatgcagttattcaaaccctcatgaacagcatggaccctgagagcaccccaccaacctgctgtgtgccgaccaggctctccccaattagcatcctgtttattgacagcgcgaataatgtggtctacaaacagtacgaggatatggtggtggaaagttgcggatgccgg

SEQ ID NO: 322002 - DNA, 1503 bp, Artificial Sequence
  derived and/or modified sequence
atgagactgccgaaactgctgacctttctgctgtggtatctggcctggctcgatctggagttcatctgtaccgttctgggagctccggatcttgggcagcgccctcaagggacacggccgggactggctaaagctgaagctaaggaaaggcctccgctggctcggaatgtgtttagaccgggcggacattcttacggaggcggagcgacaaacgcgaacgcccgagccaagggcggtaccggccagaccggggggttaacacaacctaaaaaggacgaacctaagaagctccctccaagacctgggggccccgagccgaagcctggccaccctcctcagactcgacaggcgaccgccagaaccgtaactcctaaaggtcagctgcctggtggcaaggcaccacccaaagcagggtcagtcccctcctccttccttctgaaaaaagcgcgggaaccgggcccaccccgagagccaaaagagcccttccgacccccccccatcacccctcacgagtacatgctatccctctacaggacactgagcgacgctgacaggaagggcggtaattcctccgtcaaattggaggcgggtttggctaacaccatcacttcgttcattgataaaggtcaggacgatcgcggcccagtcgtcaggaaacagagatacgtcttcgacatttctgcgctcgagaaggatggcctgctgggagccgagctgaggatccttagaaaaaagccaagcgacaccgccaaaccagccgcgccaggcggcggccgtgccgctcagcttaaactgtcttcttgtccctcaggtcggcaaccagctagcctcctagacgtgcgcagtgtgcccgggttggatgggtccggttgggaggtatttgacatctggaaactattcaggaatttcaaaaatagcgctcagctctgcttggagcttgaagcctgggaaaggggaagggccgtcgatctcagagggctgggctttgatcgagcagcacgccaggtgcacgagaaggcactgtttctggtattcgggcggaccaaaaaacgcgacttgttttttaacgagatcaaagccagatccggacaggatgataagaccgtatatgagtatctgttttcacaaagacggaaacggcgggcccctctcgctactagacagggcaaaagaccatccaagaacctcaaggcccggtgttcacgaaaggcactgcatgtgaattttaaagatatgggatgggacgactggatcatcgccccgctggaatacgaggcatttcactgcgaaggactctgtgaattccccctgcgctcccatctggagcccaccaatcacgctgtcatccaaacactgatgaattctatggatcccgagtcaacccctccgacatgctgcgttcccacccggctcagtccaatctcaatcctgtttatagactcagcgaacaatgtggtgtacaagcagtacgaggatatggtcgtggaatcctgcgggtgcaga

SEQ ID NO: 322003 - DNA, 1503 bp, Artificial Sequence
  derived and/or modified sequence
atgagattgccaaagcttctcaccttcctcttgtggtacctggcatggctggatctggagttcatatgtaccgtactcggagctccggacctgggccagcgacctcaggggacacggcctgggctggccaaggcggaggcaaaggagcgaccacctctggcaagaaacgtgttccggcctgggggtcacagctatggcggaggagccaccaacgcaaacgcaagggccaagggggggactggccagacagggggacttacacaacctaagaaggacgaacccaaaaaactgcctcccaggccaggaggtccagagccaaagccgggccaccctccacagactaggcaagccacagcgagaacggttactccaaaagggcaactgccaggcgggaaagccccgcctaaggccggttctgtgccatccagcttcttactcaaaaaagctagggagcctggacctcccagggaacctaaagagccgttcaggcccccaccaatcaccccccatgaatatatgctgagtttgtatcgcacgctgtctgacgcggatagaaaagggggcaattcctcagtgaagctggaggctggattggccaataccatcacctcctttatcgacaaggggcaggatgaccgcggccccgtcgtaaggaagcagcgctacgtgttcgacatttccgctctcgaaaaggatggcctgctcggcgctgaacttaggattttgcgcaagaaaccctcagacactgccaagcctgccgcgccagggggtggccgggcggctcagctcaagctgtcttcttgtccctcagggaggcagccagcaagcttactggacgtgcgaagtgtgcccggactcgacgggagcgggtgggaagtcttcgacatttggaaactcttcagaaatttcaaaaactcggcacagctgtgcctggagcttgaggcttgggaacgcggcagggctgtcgacctacgaggtctcggttttgatcgggccgccagacaggtgcacgaaaaagcactgttccttgtgtttggtaggacaaagaaacgggatctctttttcaacgaaatcaaggcacgaagcggccaggacgacaagacagtttacgagtatttgttctctcagcggcgaaagcggcgagctccccttgccacaagacaaggcaaacggccttccaagaatctcaaggctcggtgcagcagaaaagcccttcatgtgaattttaaggacatgggatgggacgattggatcattgctcccctggagtatgaggcgttccattgtgaaggtctatgcgagttcccactacggtcccacttggaaccaacaaaccacgcagttatccagaccctcatgaactctatggatccagagagcaccccccccacctgctgcgtgcctacgaggctcagcccgattagcatcttgtttatcgacagcgccaataacgtggtgtacaagcagtatgaggacatggtggtggagtcctgcggctgtagg

SEQ ID NO: 322004 - DNA, 1503 bp, Artificial Sequence
  derived and/or modified sequence
atgagattacctaaacttttgaccttccttctctggtatctggcctggctggacttggagttcatatgtacagtcttaggggcgcccgacctggggcagcgtccgcagggcacccgccctgggctggctaaggctgaggcgaaagaacgccccccgctggcacggaacgtatttaggcctggaggccactcttatggaggaggcgccacgaatgcaaacgctcgggccaagggaggaactggacagactggcggcctgacgcagcccaaaaaagatgaacctaagaagctgccaccgaggcctggggggcccgaacctaaaccaggacaccctccacagaccagacaggcaactgctaggactgttacaccaaagggccagttgcccggcggcaaggcccctccaaaggccggctctgtcccaagctccttcctcctgaagaaggccagggagccaggcccaccccgggaaccaaaggagccattcagacctcccccaattactccgcacgagtacatgctctccttataccggactctcagtgatgccgaccgtaaaggtggtaacagctccgtgaaactcgaagcaggcctggccaataccattacgtcctttatagacaagggccaggatgataggggtcctgtcgttagaaaacagcgatatgtgtttgacattagtgcgctggaaaaagatggcctactgggtgccgaactcagaatactgagaaaaaagccgagcgacactgccaagcctgccgcgcctggcggtggcagagcagcccaactgaagctgtctagctgccccagtgggcgtcagccagcttctttactcgacgtcagatccgtgcccgggcttgatggctcaggttgggaggtgttcgatatttggaaactcttcagaaactttaagaactccgcccagctgtgtctggagcttgaagcctgggagcgtggcagggctgttgacctgagaggactcgggtttgacagggctgcccggcaggttcacgagaaggctctctttctcgtctttggcagaactaaaaagagggacctcttttttaatgagataaaagcacgcagtggccaggacgataagactgtgtacgagtacctgttctcccagcggcggaagcgccgtgctcctctcgcaacgagacaggggaaacggcccagcaaaaatttaaaggccagatgctcccgaaaagctctgcatgttaatttcaaagacatgggttgggatgactggatcatcgcaccactcgagtacgaggcattccactgcgagggcttatgtgagtttccactccggagtcacttggagcctaccaaccacgccgtgatccaaaccttgatgaatagcatggacccagaatcaactcctccaacatgctgtgtgccgacgaggttgtcacccatctcaattctgtttatagactccgccaacaacgtggtgtataaacagtatgaggatatggtagtcgagagctgcgggtgccgc

SEQ ID NO: 322005 - DNA, 1503 bp, Artificial Sequence
  derived and/or modified sequence
atgcgcctgcccaagctgctgaccttcctcctgtggtatctcgcctggctggatcttgagtttatatgcacggtactcggagccccagatttgggacagcggccccagggcacaaggcccggactggcaaaggccgaagccaaggaacggcctcccctcgcccgaaatgtgtttcggcctggaggccactcgtatgggggcggtgctactaatgcaaacgccagagccaaaggcggcacaggccagacagggggcctaacgcagccaaagaaagatgagcccaagaaactaccacctaggcccggtgggccagagccaaagccagggcaccccccacagacacggcaagctacagcccgtaccgtgacacctaaggggcagctcccaggtggcaaggccccacctaaagccggctcagtgcccagtagctttctcctgaagaaagcaagagagccaggaccccccagagaacctaaggaaccattcagaccaccccctattaccccccacgagtacatgttgtccctttaccgcactttgagcgacgccgacagaaagggggggaatagtagcgttaagctggaagctggactggctaacactattacgagttttatagacaagggtcaggacgaccggggccccgtggtcaggaagcagcgctacgttttcgacatctcggcactggaaaaggatgggttgctcggcgccgaactgcggattctgaggaaaaaaccctcagataccgctaaacccgcggctcctggtgggggccgggccgcacagctgaaactgagcagctgcccctccggcagacagccggcaagcctcctggatgtacgcagtgtccctggactggatggatcaggttgggaggtcttcgacatatggaagctatttcggaacttcaagaactctgcacagctgtgcctggagcttgaggcttgggagagaggcagggccgtagatctgagaggtctcggattcgaccgcgctgctagacaagttcatgaaaaggctctctttctggtgttcggcaggacaaagaagcgggatctgtttttcaacgagatcaaagctcggagtggtcaagacgataagaccgtgtacgagtatctgttctctcagcggagaaagcggcgggcccctctggcaacacggcaaggaaaaaggccatctaagaatctgaaagctcggtgttctagaaaagcccttcatgtgaactttaaggacatggggtgggatgactggattattgcaccgcttgagtacgaagcctttcattgtgaaggactgtgtgagttccctctaaggtcgcatttggagccgacaaaccatgccgtgatccagacattgatgaattccatggatccagaatcaaccccacctacctgctgcgttcctaccagacttagccccatctccatacttttcattgactccgctaacaacgtagtatacaagcagtacgaggacatggtcgtagaatcatgcgggtgtcga

SEQ ID NO: 322006 - DNA, 1503 bp, Artificial Sequence
  derived and/or modified sequence
atgcgactgcctaaattattaacatttctcctgtggtatctagcctggcttgacctggagttcatatgtaccgtcctgggggcgccagatcttgggcagcgcccccagggcacaagacctggattggctaaagctgaggccaaagaacgtcctcctcttgctcgcaacgtgttcaggccaggtggccactcctatgggggtggcgccaccaatgcaaacgcccgggccaaggggggaactggacagacaggaggattaactcagcccaaaaaagatgaacctaaaaagctgccacctagaccgggggggccagaaccgaagccaggccaccccccacagacaaggcaggcgactgccagaactgtaactcccaaaggtcaactgcctggaggaaaggccccacccaaggcgggctcagtaccatcctcttttctgctcaagaaggccagggagcccggtcctccgagggaaccgaaagaaccattccggccccctccaataaccccacacgagtatatgctcagtctctatcgtaccctgagcgacgccgatcgaaaaggcggtaacagctctgtgaagctggaagccggactggccaacaccatcacgtcgtttattgataagggacaggacgatcgagggcccgtcgtcagaaagcaacgctacgttttcgacatcagcgctcttgagaaggacggattgctcggggccgaactgcgcatcctcaggaaaaagccaagtgataccgccaagccagccgcaccaggcggagggcgtgccgcccagctgaagctctcttcttgtccctccggcagacaacccgctagcctgctggacgtacggagtgtgccagggcttgacggctctggctgggaggtctttgacatatggaagctgttccgtaacttcaaaaacagcgcccagctgtgtctcgagttggaggcatgggagagggggagagcagtggacttgaggggcctgggcttcgacagggccgcgcgacaggtgcacgaaaaggcgctgttcctggtgtttgggcgcactaaaaagcgtgatctgtttttcaacgagatcaaggcccggagcggtcaggatgacaagaccgtctacgagtacctgttttcccagcgccgcaagcgtagagctccgctggccacacgacagggcaaacggccatcgaaaaatttaaaggccagatgcagtaggaaagcgctccatgtcaattttaaggatatggggtgggatgattggattattgctcctttggagtatgaggctttccactgtgaggggctgtgtgagttcccactgcggagtcacctcgagcccaccaatcacgctgtgatccaaaccctgatgaatagcatggatcccgagtcgactccacccacctgttgcgtcccgacaagactttcccctatcagcatactgttcatcgacagcgcaaacaatgtagtgtacaagcagtacgaggatatggtggtcgaatcctgcggatgtagg

SEQ ID NO: 322007 - DNA, 1503 bp, Artificial Sequence
  derived and/or modified sequence
atgagactcccaaaactcctgacttttctgctctggtaccttgcgtggctcgacctggaattcatttgcactgtgctgggtgctccagaccttggccaacgcccccaaggtactcgcccaggccttgcaaaagcggaggcaaaggagcgcccgccgctggcccgaaacgtgttccggccggggggtcactcatacggcggtggggcaactaatgcaaatgcgcgggccaaagggggaaccggtcagactggcggcctcacccaacctaaaaaggatgagcctaagaaactgccaccccgcccaggcggccccgagccgaagcccggacatccgccacaaaccagacaggcaacggctcgaaccgtcacgccgaagggtcaactgccaggaggaaaggcccctccgaaagctggatctgtgcctagctcgttcttgctcaagaaggctcgggaaccaggtcctcctagggaacctaaggagccctttagacctccccctataacccctcacgaatacatgctttcactttatcgcaccctgtcagatgctgatcggaagggcggtaactcatccgtgaaacttgaagcagggctggccaacactatcacgtcgtttatcgacaaaggtcaggatgacagaggacccgtagtgaggaagcagagatacgtgtttgacatctccgcactggagaaggatgggcttctcggagccgaactccggattctccgtaagaagccttccgatactgcaaagccagccgcacctggaggcggaagagcagcgcagttgaagctgagctcctgtcccagtgggcgtcaacctgcatcgcttcttgacgtgcgttccgtgcctggtttggatggttcggggtgggaagtttttgatatatggaagttgtttcgtaactttaagaattcggcacagctttgtctggaacttgaagcgtgggaacgaggaagagcggtggacctcagaggtttggggtttgatcgcgccgcacggcaggttcacgagaaggcgctcttcctggtgttcggcaggaccaagaaacgtgacctgttctttaatgaaatcaaagcaaggtcgggacaagatgacaagaccgtgtacgaatacctgttttcccaaagacggaaaaggcgagcaccacttgcaactcgacaggggaaacgcccttccaagaatctcaaggcacgatgctcccgtaaagctcttcatgtcaacttcaaggatatgggatgggatgactggatcatcgcgccactggaatacgaggcctttcattgtgaagggctgtgcgaatttcctcttaggagccacctggagcccaccaaccatgcagttatccaaacgctcatgaactcaatggatcccgaaagtacccctccgacctgttgcgtcccgactcgtctcagcccgatctccattctcttcattgactcggcaaacaatgtcgtgtacaaacaatacgaggatatggtggtggagtcttgtggatgtcgg

SEQ ID NO: 322008 - DNA, 1503 bp, Artificial Sequence
  derived and/or modified sequence
atgaggcttccaaaactgctgacgttcctgttgtggtacttggcctggctggacctggagttcatttgtaccgtgctgggagcccctgacctggggcagcggcctcaggggacgagacctgggcttgcaaaagcggaggcgaaagaacggcctcctctggcccggaacgtttttcggccagggggacacagctatggcggtggcgccacaaacgcaaacgcccgggccaaggggggaaccgggcagactggcgggctcactcagccgaagaaggacgagcccaagaaactacctccacgccctggcgggcccgagcccaaacccggacatccgccccagaccagacaggccactgcccgaactgtgacacccaagggacagctccctgggggaaaggcacctcccaaagccggcagcgtgccaagttcttttctcctgaagaaggctagggagcctggaccacctagagaacctaaggaaccgtttagacctcctccaatcacgccgcacgagtacatgctgtcactttatagaactctctccgatgcagaccgcaaggggggcaattcttccgttaagctcgaggcgggcttggcaaatacaattacgtctttcattgacaaaggacaagatgacagagggccggtggtgaggaaacagaggtacgttttcgacatctctgccttagaaaaagatgggttgctcggtgcagagctacgcatacttagaaaaaaacctagcgacacagctaagccagccgcccctggaggaggacgtgcagcacagctcaaactctccagctgtccatccggccggcagcctgcatctctgcttgatgtcagatctgtgccgggtctcgatgggtctgggtgggaggtatttgatatctggaaactgttccggaatttcaaaaactccgcccagctatgtctggagctagaagcctgggaaagaggccgggccgtggatctgcgggggctgggcttcgaccgggcagcacgccaagtccacgagaaagctctgtttctggtgttcggccggaccaaaaagagagacctgttcttcaacgaaattaaggcccgctctggccaggacgacaagaccgtctacgagtacctgttctctcagaggagaaagcgtcgagcgcctttagctacccggcaggggaaacgccctagtaaaaaccttaaggccagatgttcgcggaaggcacttcacgtaaatttcaaggacatggggtgggatgattggatcatagcgcccctcgaatacgaagcctttcattgtgagggcctttgcgagttccccctgcgctcccacctggagccaacaaatcacgctgtcattcagacgcttatgaattcgatggaccccgaatctacgcctcccacatgctgtgtgcctactcgtttgtcaccaatctccatcctctttatcgattctgccaacaacgtagtctacaaacaatacgaagatatggtggtcgagagttgtggttgtaga

SEQ ID NO: 322009 - DNA, 1503 bp, Artificial Sequence
  derived and/or modified sequence
atgcgccttccaaaacttctcaccttcctcctctggtacctcgcatggctggacttggagtttatctgcaccgtcctgggggcacccgatctcggtcagcgaccccaaggaacgaggcctggtcttgcaaaggcagaagccaaggaaaggcctccgctggcacggaatgttttccgtcccggaggtcattcctacggtggaggagccaccaacgcgaacgcacgagctaaaggaggaacgggccaaacggggggccttactcaaccaaagaaggatgaacctaagaagctgcctcctcgccccggcggaccagaacctaaacctggtcatccgcctcaaaccagacaagcgactgcacgtactgtgactcccaagggccagcttcctggtggtaaggcacctccaaaggccggttcggtccctagctccttcctgctgaaaaaagcgcgtgaacctgggcccccaagagaacctaaggaaccatttagaccccctcccattactccacatgaatacatgctgtccctttacagaactctctcagacgcggatagaaaagggggtaattcgtccgtgaaacttgaagcgggacttgcaaataccattacctctttcattgataaagggcaagatgatcgaggacctgtggtgcgaaagcaaaggtacgtgtttgacatttccgcactcgagaaggatggacttttgggggccgagcttcgtatcctcagaaagaaaccttccgatactgcaaagcccgcggcgcctggcggaggaagagcagcacaactgaagttgtcctcgtgtccatcggggaggcaaccagcgtcgctcctcgacgtgcgctccgtgccgggactggacggctcgggatgggaagtgtttgatatctggaagctctttcggaacttcaaaaactcagcacagctttgtcttgagcttgaggcatgggaacgcgggcgagcagtggatcttcgtgggctgggatttgatagggcagcccgccaagtgcatgaaaaagcactgtttcttgtctttggtagaacgaaaaagagagatctgtttttcaacgaaatcaaggcgagaagcgggcaggacgacaagaccgtgtacgaatacctctttagccaacgtagaaagcgcagggcccctctcgccacgcgccagggcaagcgacccagcaaaaatctgaaggcacgatgtagccgcaaggccctgcatgttaactttaaagatatggggtgggatgactggatcatagcacctctggagtacgaggcctttcactgcgaggggttgtgtgagtttccactgaggtcccacctcgaacctactaaccacgcagtgatccagaccctgatgaacagcatggatcctgaatccacgccacctacttgttgtgtgccaacccgcctctcacctataagcattctgtttatcgacagcgccaacaacgtggtgtataaacaatacgaagatatggtggtggagtcatgtggttgcaga

SEQ ID NO: 322010 - DNA, 1503 bp, Artificial Sequence
  derived and/or modified sequence
atgcgactgccgaagctgctcactttcctcctgtggtacctcgcatggctcgacctggagttcatctgcactgtgttgggtgctccggacctgggacagcggccccaagggacccgccccggtttggccaaggccgaagcaaaggaacgcccgccgctggcccgcaatgtgtttcgccccggcggtcactcgtacggcggaggggcgaccaacgcaaacgcgcgggccaaaggaggtactggacagaccggaggcctcacccagcctaagaaagacgagcctaagaagctgcccccacggccgggcggtcctgaaccgaagcctggacacccgcctcagactaggcaggccactgcgcggaccgtgactccaaagggccagcttcctggtggcaaggcacctccaaaggcgggatcagtcccgtcatctttcctgctgaagaaagcccgagagcccggaccacctcgggaaccgaaagagccgtttcgccctccaccgatcaccccacacgaatacatgcttagcctttatcggactctgtcggacgctgaccgaaaagggggaaattcttccgtcaagctggaagcaggactggccaacaccatcacctcgttcatcgacaagggccaagatgaccgtggaccggtggtgagaaaacagagatacgtgtttgacatcagcgctctggagaaagatggactgctgggcgcggagctgcgcattttgcgcaagaagccgtccgatactgcaaagcctgcggcgcccggcggaggcagggcggcccagttgaagctctcgtcgtgcccgtcaggaaggcagccagcatccctgctcgacgtgcggtccgtgccggggctcgacgggtcgggctgggaggtgtttgatatatggaaattgttccgaaatttcaagaacagcgcccaactttgtctggagctcgaggcttgggagagaggcagagccgtcgatctgaggggcctgggtttcgacagagctgctcggcaggtgcatgagaaggccctttttctcgtgttcggtcggaccaagaagcgagacttgttcttcaacgaaatcaaggcaaggtccggccaagatgataagactgtgtacgaatacctcttttcgcagaggaggaagcgccgggccccgctggcgacgaggcaggggaaacggccgtcaaagaacctgaaggctcggtgctcgcggaaggcgttgcacgtcaacttcaaggatatgggctgggacgattggattatcgccccactggagtatgaggccttccactgcgagggcttgtgcgaattcccgcttcggagccatctggagcctacgaatcacgcagtgattcagaccctgatgaactccatggacccagagtccactccacccacctgctgtgtgccgactcggctgagcccgatcagtatcctgttcatcgatagcgcaaacaatgtggtgtacaaacagtacgaagatatggtggtggaatcctgcggatgcagg

SEQ ID NO: 322011 - DNA, 1503 bp, Artificial Sequence
  derived and/or modified sequence
atgaggctgcctaagttgctgacattcctcctgtggtatcttgcatggctcgatctggaattcatctgtaccgtcttgggcgcacccgacctgggtcagagaccccaaggtacacgccctggtctcgcaaaggcagaagctaaggaacgtccccctttggccagaaatgtgttccgcccaggtggccactcctacggaggcggagccaccaacgctaacgcaagggcaaaaggtggcaccggtcagactggtggactcactcaacctaaaaaagatgaaccaaagaaactcccccctaggcccggtggtccagaacccaagcccggtcaccctccacaaactagacaagccaccgccaggaccgtcacaccaaagggtcagttgcctggcggtaaggctcctcccaaagctggcagtgtcccttcttcttttttgctgaagaaggcccgcgagcctggccccccacgtgagcctaaggaaccctttagaccaccccctattacaccccatgaatacatgctttccctgtacagaactctctccgacgcagaccgcaagggtggcaactccagcgtcaaactcgaagccggcctcgcaaatactattaccagcttcatcgacaaaggccaagacgatcgtggccctgtcgtcagaaaacagaggtacgtctttgacatctctgccctggagaaagacggactcctgggtgccgagcttcgtatcctgcgtaagaaacctagtgataccgccaaacctgctgcacctggtggcggacgtgcagcacaactcaaactctcctcttgtccctcaggcagacagcctgcctccttgctcgatgtgagatccgtacccggactcgacggttccggttgggaggtctttgatatctggaagttgttcaggaacttcaagaactctgcccagctctgcctcgagctcgaggcatgggagagaggaagggctgtggacctgcgtggtcttggcttcgacagggcagcaaggcaggtgcatgaaaaggcactgttcctggtcttcggcagaactaagaagagagatctctttttcaacgagatcaaggccaggtccggacaggacgacaagaccgtatacgagtacctgttttctcagagaaggaagcgtagggcccctctggccacacgtcagggcaagcgcccatctaagaacctcaaggcccgttgctctcgcaaggccttgcatgtcaacttcaaagatatgggttgggacgactggatcatcgccccattggaatacgaagctttccactgcgagggcctgtgcgagttcccactgcgtagtcacctggagcctactaaccacgccgtcattcagaccttgatgaactctatggatcctgagtccacacctcctacctgttgtgtcccaactcgcctgtcacccatctccatactgttcatcgactccgccaataacgtggtgtacaagcagtatgaggacatggtggtagaatcctgcggctgcagg

SEQ ID NO: 322012 - DNA, 1503 bp, Artificial Sequence
  derived and/or modified sequence
atgcgactgcctaagttgctgacctttctgctgtggtaccttgcctggctggacctcgaatttatctgcactgtactgggagccccagatttagggcagaggccacagggaactcgacctggcctggcaaaggccgaagccaaagaacgacctcccctcgctcgcaatgtgtttcgacctggcggccattcgtatgggggcggtgctacgaacgcaaatgctcgagcaaaaggcggaaccgggcagaccggtggcctaacccagccaaaaaaggatgaacccaagaaattgcctcctagacccggtggcccagaacctaagcccggccacccacctcagaccaggcaggccacagcacgaaccgtgaccccaaagggtcagctcccaggcgggaaagcgcctcccaaggctggctccgtgccctcctctttcctcctgaagaaagcccgagaaccgggaccaccaagagaaccgaaggagccctttcggcctcctcccatcaccccccacgaatacatgctctctctgtatcgtacgctctcagacgccgacaggaaggggggcaacagctcggttaaactggaagccggcctcgccaatactatcacttcattcattgacaaaggacaagatgatcgaggcccagttgtgaggaagcaaagatatgtgttcgacatcagtgcgctcgagaaagatggcttattgggagcggaactgcggattctgaggaaaaagccctcagacacagctaagcctgcagccccgggagggggccgggccgcccagcttaaactgagcagttgtccctccgggcgacagccagcgagcttacttgatgtccggtctgtgcccggcctcgatggcagcgggtgggaagtcttcgacatatggaaattgttccgtaattttaaaaattctgcgcaattgtgtttggagctggaggcatgggaaagaggccgtgcagttgacctgagagggctgggctttgaccgagccgctagacaggttcacgaaaaggcgctctttctggtgttcggccggaccaaaaaacgcgacttgtttttcaacgagattaaggctagaagcggacaggatgacaaaacagtgtatgagtatctgtttagccagcgcagaaagaggcgagctcccctagccaccagacagggaaagaggccttccaagaacctgaaggctcgatgttcacgcaaggcgctccatgtcaatttcaaagatatgggctgggatgactggataattgcacctttggaatacgaagcctttcattgcgaaggcctatgtgaattccccttgcgtagtcacttagaacccaccaatcacgccgtgattcagacgctaatgaattcgatggacccagaaagcaccccaccgacgtgctgtgtcccaacgaggctctctcccatctctatcctgtttattgactctgccaacaatgtcgtctacaagcagtatgaagatatggttgttgagtcatgtggctgtcga

SEQ ID NO: 322013 - DNA, 1503 bp, Artificial Sequence
  derived and/or modified sequence
atgagattgcccaaacttctaacatttctcctttggtacctcgcctggctagatcttgaattcatatgtacggttctgggcgcacccgatctgggtcagcggccccagggcacacggcccggtctggcaaaagcagaagcaaaagaacggccccccctcgcacggaatgtgtttaggcccgggggccactcatatgggggcggcgctaccaatgctaacgccagagccaaggggggtactgggcagacgggtggtctcacccagccaaagaaagacgaaccgaagaaactgccaccgagacccggcggtcctgagccaaagccaggacatcccccgcagactcgccaggctacggccaggacggtgaccccgaaagggcagctgcccggcgggaaagcaccacctaaggcaggctctgtgccgagctcatttctcctcaaaaaggccagagagcctggtcctcctcgggagcctaaggagcctttcagaccgccacctattacccctcacgaatatatgctgtcgctctacaggaccctgtctgatgctgacaggaagggcggcaacagtagcgttaagctggaggcaggactggctaacaccattacctctttcattgataaggggcaagacgacagagggccagtcgtacgaaaacagcgttacgtgtttgacatcagcgccttggagaaagatgggctgttgggggccgagcttcgtatcttaaggaagaagccctccgataccgcaaaacctgctgcacctgggggaggcagggcagcccaactgaagcttagttcatgcccttcagggagacagccagcaagccttttggacgtgcgcagtgttccaggcctggacggatccggatgggaggtttttgatatctggaagttattccgaaacttcaaaaactccgcgcagctgtgtctagaattagaagcatgggaaagggggagggccgtcgacctccgcgggttgggcttcgacagggccgcgaggcaggtacatgaaaaggccctcttcctggtatttggtcgaacaaagaaaagagatttgttttttaatgaaataaaagcccgctcgggacaggatgataagactgtgtacgaatacctgttttcacagcgccgtaaacggcgagcccctctggccacacgacaaggcaaacggccgagcaagaacctcaaggcccggtgttcaagaaaggctttgcacgtgaacttcaaggacatgggctgggacgattggattatagcgcctctggaatacgaagcattccattgtgagggactctgtgaattcccactgaggagtcacctcgagccgacgaaccacgctgtgatacagaccctgatgaacagcatggatcctgagtccaccccacctacttgttgtgtcccaaccagactctctccgatctcaatcttattcattgattctgccaacaatgtagtttataagcaatacgaagacatggtggtagagtcctgtggctgtcgc

SEQ ID NO: 322014 - DNA, 1503 bp, Artificial Sequence
  derived and/or modified sequence
atgcgactgcctaagctcttgaccttccttctctggtatctcgcctggttggacctggagtttatatgcactgtgctgggagcacctgacctcgggcagaggcctcagggaacaaggcccggcctggccaaggctgaagctaaggagaggccccctctcgcacggaatgtatttcgacctgggggccacagctatgggggtggcgccaccaacgcgaatgccagggccaaagggggcaccggacagacagggggcctgacccaaccaaagaaggacgaacctaagaagctgccgcccagaccggggggacccgagcctaagccaggacatccccctcagactagacaggctaccgcgagaactgtcactccaaaaggacagttgccaggaggcaaggccccaccaaaggccggctccgtgcccagtagctttctgctgaagaaggctcgagagcctggcccgccacgggaacccaaagaaccatttagaccgccacccatcactccacatgaatatatgttgagcctgtatcgaacactgtctgacgccgaccggaaaggcggtaacagctctgtgaaactcgaggcaggcctggctaataccatcacgagtttcattgacaaagggcaggatgatcgggggccagtggtgagaaagcaacgctacgtctttgatatctcagcattggaaaaagacggactgttgggcgccgagctcaggatcctcagaaagaaaccttccgatacagccaagcccgctgcgcctggtgggggccgggctgcccagcttaagctgagtagttgtcctagcggtcggcagccggcatctctgttggatgttcgctccgtaccagggctggacgggagcggctgggaggtgttcgatatttggaaactgttcaggaactttaaaaactctgcccaactgtgcctcgaattggaggcctgggaaaggggtcgggcagtggacctccggggactgggttttgatagagccgcccgccaggtgcacgaaaaagctttgtttttggtctttggtcggacaaaaaaaagagatctcttttttaacgaaattaaagcccgcagcggtcaggacgacaaaaccgtgtatgagtatctgtttagccaacgccggaagcggcgagcaccattggccactcggcagggaaaaagaccctctaagaacctcaaagctagatgttctcgcaaggccctccatgtgaattttaaggacatggggtgggacgactggatcatcgccccattggagtatgaggctttccactgcgaagggctgtgtgagtttcctctcaggagtcatttggaacctaccaaccacgccgtgatccaaaccctgatgaacagtatggatccggaatccacacctccaacttgttgtgtgccaacaaggctgagccctatctccatccttttcattgactcagccaacaatgtggtatacaaacagtacgaggatatggtggtggaatcctgtggctgccgg

SEQ ID NO: 322015 - DNA, 1503 bp, Artificial Sequence
  derived and/or modified sequence
atgcgcctgccgaagctgctcacgttcctgctctggtatctggcctggctggatctggagttcatttgtacggttctgggtgctccggacttgggccagcgccctcaaggaacgcgaccgggtctagcaaaggcggaggctaaggaacggccgccgctcgcgcgaaatgttttccgccccggtggccacagctacggtggcggcgccactaacgcgaatgcccgtgcaaaggggggtaccggtcaaacgggaggtttgacccaaccaaaaaaggatgagcctaagaaattgccaccacgtcctggcggtccagagcctaaaccagggcatccgccacagacccgccaagccacggcgcgaactgtcacccctaaaggtcagctgccgggtgggaaggcaccaccgaaagccggctccgtgccttcatcatttttgctgaagaaagcgcgcgagccagggccgccacgcgagcctaaggagccgttcagaccgccaccaatcactccgcacgaatatatgctgagcctgtaccgcacactgtcagacgccgatcgcaaaggtgggaatagctcagttaagctggaggccggcctggccaacacgatcaccagcttcattgacaagggccaggacgataggggtccggtggttagaaaacaacgttacgtgtttgacatctccgctttagagaaagacggattactgggagcggaactccgaattttgaggaagaagcctagcgacaccgccaagcccgccgctccaggcgggggccgtgctgcacaactgaagctgagcagctgcccgtccggcagacagccggcgtctctgctggatgtccgctccgtcccagggctggatggaagcgggtgggaggtatttgatatctggaagctgtttagaaacttcaaaaattctgcccaactgtgcctggagctggaggcctgggaacgcggtcgcgctgtcgatttgcgcggcttgggtttcgaccgtgcggcacgccaggtgcacgagaaggcgctgttcctcgtgtttgggcgaacaaaaaagcgcgacctgttcttcaacgagattaaagcccgcagcggccaagatgataagacggtgtacgaatatctgtttagccagcgtcggaagcgacgagcgccgctggcgacccgccagggaaagagaccatccaaaaacctcaaagcccgctgcagccggaaagccctgcacgttaacttcaaagacatgggctgggatgattggatcattgctccactagaatacgaggctttccactgcgagggcttgtgcgaattcccattaaggtcccacctggagcctacaaatcatgcggtgatccagacacttatgaacagcatggacccggagagcacgcctccaacctgttgtgtgccaacccggctgagcccaatcagcattctgttcatcgactcagctaacaacgttgtctataaacaatacgaagacatggtggtggaaagctgcggttgtcgc

SEQ ID NO: 322016 - DNA, 1503 bp, Artificial Sequence
  derived and/or modified sequence
atgcgactgccgaagctgctcacgtttctcctgtggtaccttgcctggctggatctcgagtttatctgtaccgtgcttggtgcaccagatctgggacaacgcccccagggtactcggcccggtctggccaaggccgaagcaaaagagcgcccgccccttgccagaaacgtctttaggcctggaggtcattcgtatggcggtggcgccacgaatgctaacgcaagagcaaagggcggaaccggacagactggtggacttactcaaccaaagaaagatgaacccaagaagttgccccctagacctggaggtcccgagccaaaacctggtcatcctccccagactcgccaagcgactgcaaggactgtgactcctaagggacaacttcccggcggcaaggcacctccaaaggcaggttcggtgcccagctcattccttcttaagaaagcgagggaaccaggaccaccaagggaacccaaggaaccattccggcctcccccaataaccccccatgaatacatgctcagcctgtaccgtactctgagcgatgccgatagaaagggtggaaactcctcggtgaaactggaagctggcctggcgaacaccattacgtcgttcattgacaaaggacaggatgacagagggccggtggtccgcaagcagcgatatgtctttgatatttcggcactcgagaaggatgggctcctgggtgcagaactgcggatccttcgaaaaaagccatcggacaccgcaaagcctgccgcccctggagggggccgggcagcgcaactgaaactttcgtcgtgtccttcgggccggcaacccgcttccctgcttgatgtgcggtccgtcccaggtcttgatggatccggatgggaggtgtttgatatctggaagctgtttagaaacttcaagaacagcgctcagctttgtcttgaacttgaagcatgggagcgcggtcgtgccgtggacctgcgcgggctgggtttcgatagagccgcaagacaagtgcatgagaaggccctgttcctggtgtttggaaggaccaagaagagagatctgtttttcaacgagattaaagcacgctcgggacaagatgataagactgtgtacgaatatctgtttagccagcgccgaaagcggcgagcccctcttgcaacgagacaggggaagaggccttctaagaatttgaaagcacgctgttcaaggaaggcgctccatgtcaactttaaagatatggggtgggacgattggataatcgcgcccctcgaatacgaggccttccactgtgaagggctctgtgagtttccgcttcgatcgcatcttgagcctacgaatcatgccgtgatccagaccctcatgaattcgatggatcctgaaagcacccctccaacgtgttgtgtccctactcgcttgtcaccaatctctatcctgttcattgattcagcaaacaatgtggtgtacaagcagtacgaggacatggtcgttgaatcgtgcggatgtcgg

SEQ ID NO: 322017 - DNA, 1503 bp, Artificial Sequence
  derived and/or modified sequence
atgagactgcctaagctgctaacattccttctatggtacctagcgtggctggacctggagtttatctgcactgtcctgggagctccagatctcgggcaacgccctcagggaacccggcccggcttggctaaggccgaagccaaggagcgtcctccactggcgcgaaacgtgttccggcctggcgggcacagctacgggggcggagccacgaacgccaacgcccgagctaaaggcggtaccggtcagaccgggggactaacacagcctaaaaaggatgagcccaagaagctgcctcctcgacccggagggccagaaccgaaaccaggccatccccctcagaccagacaggctactgcaaggaccgtcaccccaaagggccagctgccgggcggaaaagcccctcctaaagccgggtccgtgccgagttcctttctcctgaagaaggctagggagcctgggccaccccgagaaccaaaagaaccctttcgccctcctccgattactcctcacgaatacatgttaagcctctatcgaaccttgagcgacgcagacagaaaaggtgggaattcaagcgtaaagctcgaggcgggtctggctaatacaattacttcgtttatcgataagggacaggacgaccggggtcccgtcgtgcgtaagcagcgctatgtgtttgatatttcagccctggagaaagacgggttgttgggcgccgagctgcggattctcaggaagaagccaagtgacacggcaaagcctgccgcaccaggcggtgggagagccgctcagctgaagctttccagctgccctagtgggcggcagcccgcaagcttgttagacgtaagaagcgttcccggcctagacggtagcgggtgggaagtgtttgatatttggaaactgtttaggaactttaaaaatagtgcacagttgtgtttagagctggaggcatgggaaagaggcagggccgtggatctgcgtggtctgggctttgaccgggccgccaggcaggttcatgaaaaggcgctgtttcttgtcttcgggcggactaagaaaagagacctgtttttcaacgaaattaaagcgcgatccgggcaggacgataagactgtgtatgagtatcttttcagccaaagacggaagcggcgcgcccccctggccaccagacagggaaagcgaccatcaaaaaacctcaaagcacgctgttctaggaaggctttacatgtaaacttcaaagatatgggctgggacgattggatcatcgccccacttgagtacgaggccttccattgcgagggtttatgtgagttccctctccggagccacctggagccgaccaatcatgcggtgattcagaccttgatgaacagcatggatccggaatccacacccccgacgtgttgtgtccctacccggctatccccgatttctatacttttcattgacagcgccaacaacgtagtgtataagcagtacgaagatatggtggtcgagtcatgcggatgtcgc

SEQ ID NO: 322018 - DNA, 1503 bp, Artificial Sequence
  derived and/or modified sequence
atgaggcttcccaagctgctcacctttttgctgtggtacctcgcctggctggatctggaattcatttgtactgtgctgggtgcgccagatcttgggcaacgcccgcaggggacccggcctggactggcgaaagcagaggcaaaggaacgacccccattggcccggaacgttttcagacctggaggtcatagctacggaggaggtgccaccaacgctaacgctagggcaaaaggtggtaccggacaaactggaggcctgacccaacctaaaaaggatgaaccaaaaaagttgccgccacgtccaggaggccctgagcctaagcctggtcatccccctcagactagacaagcaactgcaagaactgtgactcctaagggacagctgcctggagggaaagccccgcctaaagcaggatcggtgccttcctcgtttttgctcaagaaggcacgtgagcctgggccgcctcgtgagcctaaggaaccttttcgacctcctcctattaccccgcatgaatacatgctctcactctacagaactttgtcggatgcggatagaaagggaggcaattcatcagtcaagctcgaggctggccttgcaaataccatcacctcattcattgacaaaggacaagatgatagaggtccagtggtgaggaagcagcggtacgtgtttgatatcagtgctcttgagaaggacggtctgctcggtgcagagcttcggattctccgcaagaagcctagcgacactgccaagcctgccgcgccaggaggaggacgggcggcgcagcttaagttgtcctcatgtccctccggacgccaacctgcgagcctgctggatgtccggtccgttcctggacttgatggctccggttgggaggtgttcgacatttggaagctgttcagaaactttaagaactcagcccaactctgtttggaactcgaggcgtgggaacgtgggcgggcagtggatctgcgcggtcttggctttgaccgtgcagcacgccaggtccatgagaaggcacttttccttgtgtttggcagaaccaaaaaacgagatcttttctttaatgaaatcaaggcaaggtcgggacaggatgataaaaccgtctacgagtatttgttttcccagaggagaaagaggcgtgcccctctcgccaccagacaaggaaagcgtccgtcgaagaaccttaaggcaagatgctcgcgaaaggccctccacgtcaatttcaaagatatgggatgggatgactggattatcgctccgctcgaatacgaggcgttccattgtgagggactgtgtgaattccctctgaggagccaccttgagccaaccaatcacgcagttatccagactttgatgaactctatggaccctgaatcgacgccccccacctgttgcgtcccaacgagactttctccaatatcgatccttttcattgactcggccaacaatgtggtgtacaaacaatacgaagatatggtggtggagtcctgcggatgtagg

SEQ ID NO: 322019 - DNA, 1503 bp, Artificial Sequence
  derived and/or modified sequence
atgagacttcctaagctgctcacctttttgttgtggtaccttgcctggcttgatcttgagtttatctgcacggtgctgggagcaccagatttgggtcagcggccacagggcactcgccctggtctggcaaaagcagaagcaaaggaaagaccccctctcgcaagaaacgtctttcgaccgggaggacactcatacggtggaggtgccaccaacgccaatgcaagggcaaaagggggaactggacaaaccggggggctgactcaaccgaaaaaggacgagccaaagaaactcccacccaggcccggcggtccagaacctaagccaggtcatcctcctcaaactagacaggctactgcaagaaccgtcactcccaagggacaactgcctggcggaaaggcaccccctaaagctggatccgtgccgtcctcatttcttttgaagaaggcaagagaacccggccctccacgcgaacctaaggaacctttcagacctccaccaattacgccccatgaatacatgctgagcctttatcgaactctgtccgatgcggaccgcaaagggggaaactcaagcgtgaagttggaagcggggcttgcgaacaccattacctcctttatcgataaggggcaggatgatagaggtcccgtcgtccgcaagcaacgatacgtgtttgacattagcgcactcgaaaaggatggacttctcggagctgaactccgtattctgagaaaaaagccgagcgacactgcaaagccagcagccccaggtggaggtcgggcggcacagctgaaactttcctcctgtccatcgggccgacaaccggcctctcttctcgatgtgcgtagcgttccgggccttgacggaagcggttgggaagtgtttgatatttggaagttgttccgaaacttcaagaattctgcacaactttgtctggagctggaggcatgggaaaggggcagggctgtggacttgcgtggcctgggttttgaccgtgcagcaagacaggtgcacgagaaagcactgttcctggtgtttggtcggactaagaaacgcgatctcttcttcaacgagattaaagcccgctccggacaggacgataagactgtctacgagtacctgttctcacagaggagaaagcgaagggctcctctggcaactcgtcagggaaagcgcccatccaagaaccttaaggcccgctgctcaaggaaggcgcttcacgtcaactttaaggatatgggttgggatgactggataatcgcacccttggagtacgaggcattccattgcgaaggactgtgcgaatttcctctgcggtcgcatctggaaccaactaaccatgccgtgatccaaactcttatgaacagcatggatccggaatccacccctcctacttgctgtgtccctaccagactttcaccaattagcattctgtttatagatagcgccaacaatgttgtgtacaagcagtacgaggacatggtggtggaatcctgcggctgtcgc

SEQ ID NO: 322020 - DNA, 1503 bp, Artificial Sequence
  derived and/or modified sequence
atgcgcctgccaaagctcctcactttcctgctgtggtacctcgcatggctcgacctcgaattcatttgtactgtgctcggtgctcccgatctgggacagcggccgcaaggaaccagaccgggtctggcaaaagctgaagcaaaggaacggccgcctctggcccggaacgtgttcaggcccggcggacattcatacggagggggcgcgaccaatgccaacgcacgggccaagggcggcaccggtcagaccggtggtctgactcagccgaagaaggatgagccaaagaaacttccgccccgccccggcggacccgagccaaagccgggccacccgcctcaaactagacaggctaccgcgcgcactgtcactccgaagggccagctgccgggcgggaaggctcccccgaaagcgggatcggtcccttcatcatttctgctcaagaaagcgcgagaacccggcccaccaagggaacctaaagaaccgttccggccgccgccaatcaccccacacgaatacatgctctcactgtacagaactctgagcgatgcggaccgaaaaggaggaaattcgagcgtgaagctggaagcgggactggccaacaccatcacctcgttcattgacaaggggcaagatgatcggggtccagtggttcggaagcagcggtacgtgttcgatatttccgcactggaaaaagacgggctcctgggagccgagctgcggattttgcggaagaagccttcggacactgccaagcctgcggccccgggaggcggccgcgcggctcagttgaaactgtcctcgtgcccgtcaggtcgccaaccagcctcactcctggacgtgaggtcagtgccaggcctggatggatcgggatgggaagttttcgatatttggaaacttttccggaactttaagaatagcgctcagctctgccttgagctcgaggcctgggaacgcggcagagccgtggatctgcgcggactgggcttcgaccgggccgccagacaagtccatgagaaggcgctgttcctcgttttcggacgcaccaagaaacgcgaccttttcttcaacgagatcaaggctagatctggccaggatgataagactgtctatgaatacctttttagccagcggaggaagcgcagagcgccgctggccactcggcaaggaaagcgcccttcgaagaacctcaaggcccgctgctcacgcaaagccctccacgtgaacttcaaagacatggggtgggacgactggatcatcgcgcctctggaatacgaagccttccattgcgaggggctgtgtgagtttcccctccggtcccatctcgagcctaccaatcatgcagtcatccaaaccctgatgaactccatggacccagagtcaaccccgcccacttgctgcgtgccgacccggctgagccccatctccatcttgtttatcgactcagctaacaacgtggtgtacaagcaatacgaggatatggtggtggagtcctgcggctgtcgc

SEQ ID NO: 322021 - DNA, 1503 bp, Artificial Sequence
  derived and/or modified sequence
atgagactccccaagctactgactttcctattatggtatctagcttggctggatttagaatttatatgcactgtcttaggagcccctgacctcgggcagagaccccaggggactaggcccggattagccaaagccgaagctaaagaaaggcctcctcttgctcggaatgtttttcggcctggaggacattcgtatggggggggagcaactaacgctaacgcccgagccaagggggggacaggacagactgggggactgacacagcccaaaaaagatgagccaaaaaaattacctccaaggcctggagggcccgaacccaagccagggcacccccctcagacaaggcaggctactgctaggacggtaactcccaaagggcagctacccggagggaaagcaccacccaaagccgggtctgttccctcttctttcctccttaaaaaagctagagaaccaggaccacctcgggaaccgaaagagccctttagaccccctccaataacacctcacgaatatatgctaagtctttatagaacactatctgatgccgatcgcaaaggaggaaattcatctgtcaaattagaagccgggttagcaaatactatcacttcttttatagataaagggcaggacgaccgagggcctgtggttcgcaaacagagatatgtcttcgacatctctgcattggaaaaagatggactactaggagcagaacttcgaatccttaggaaaaagccatctgatacggctaaacctgccgctccaggaggagggcgcgccgcgcagcttaaactctcatcatgccccagtggaagacagcccgcctctcttctggatgtccgatctgtcccaggactagatggaagtggatgggaggtgttcgatatttggaaactatttcggaatttcaagaactctgcacagctttgtctcgaattggaagcctgggaaaggggacgcgccgtagatttacgcgggctggggttcgaccgggccgctcgccaggtgcatgagaaggccttattcctcgtctttggacgcactaaaaaaagggatttgttcttcaatgaaataaaggctcgatcggggcaggatgataaaacagtatacgagtatctgttttctcagaggcggaaaaggcgggctccactggccactcggcagggaaaaaggccatctaaaaacctcaaagctcgatgttctcggaaggccttacatgtaaatttcaaagatatggggtgggatgattggatcattgcccctctcgaatacgaagcctttcattgtgaaggactgtgtgaattcccactgcgctctcaccttgagccaacaaaccacgccgtgattcagacactgatgaattccatggatcccgaatccacacctcctacatgttgcgtgccaacacggctttccccaatatcgatccttttcattgatagtgccaataatgtagtgtataaacagtatgaagatatggtggtggaatcttgtggatgcagg

SEQ ID NO: 322022 - DNA, 1503 bp, Artificial Sequence
  derived and/or modified sequence
atgcggttacccaaacttctgacttttttattgtggtatttggcctggctcgatttggaattcatttgtacggttctcggagccccggatttaggacagcgtccacaaggaacgaggcctggtcttgctaaggctgaagctaaagaaaggccaccattggcccgtaacgtctttaggccgggtggacattcatatggtgggggggctactaatgccaatgctcgggcaaaggggggtacaggtcagacgggcggtcttactcagccaaaaaaggacgagcccaagaaattgcctccaagacccggaggccccgagcccaagcccggacatccgcctcagacacgacaagctactgcgcgaacagttactcctaaaggtcaattgccaggcggcaaagctcccccaaaggctggatccgtcccaagttcatttttgcttaagaaagctcgggaacccggtcctcctagggagccgaaggagccattcagaccaccacccatcactcctcatgaatatatgctctccctctataggacattgtccgatgctgatcgcaagggtgggaattcaagtgtaaaacttgaagctggacttgctaacactattaccagctttatagataagggccaagatgaccgcggtccagttgttcgaaaacaaagatatgttttcgatatctcagctctcgagaaagacggtcttcttggtgccgagcttagaatccttaggaagaagccatctgatacagccaagcctgccgccccaggtggtggaagggcggctcagttaaagctctcgtcatgcccctccggtaggcagcctgctagtctcctcgatgtccgatcagtacccggacttgatggttcagggtgggaggtgttcgacatctggaaactctttagaaatttcaagaatagtgctcaactttgcctggaactcgaagcctgggagcgaggacgtgcagtagatttgcgtggtcttggcttcgatagggctgcgcgccaggtgcacgagaaggcactgttcttagttttcggtagaactaaaaagcgtgatcttttctttaacgagataaaggctcgttccggacaagatgataagaccgtttatgaatatcttttctcacaaaggaggaagcggcgagcaccattggctacacgccaaggaaaacgtccatctaagaaccttaaagcacgttgctcgaggaaggccttgcatgtaaatttcaaagatatgggatgggacgactggataatcgccccgttagaatatgaggcatttcattgtgagggtttgtgcgagtttcctctccggtcccaccttgaaccaactaaccacgctgttattcagactcttatgaactctatggatccagagtcaacaccgccaacgtgctgtgtacctactaggctgtctcctatctccatcctatttattgacagtgctaacaacgttgtatacaaacaatatgaggacatggttgttgagtcttgcggttgccgt

SEQ ID NO: 322023 - DNA, 1503 bp, Artificial Sequence
  derived and/or modified sequence
atgcgcctcccaaagctgcttaccttcctgctgtggtacctcgcgtggttagatctcgaattcatctgcacagtgctgggagccccagacttaggtcagaggccccaaggtacaagacctggactagcgaaggcggaggccaaggagcggccccccctcgccagaaacgtctttcgacccggtggacactcatacggcggaggggctaccaacgcaaacgcaagggctaaaggcggaacaggtcagactgggggccttactcaacctaaaaaggacgagcccaagaagctccctcccaggcctggcggccccgagcccaaacctgggcacccccctcagacacgtcaggccacagcaagaacagtgacgcccaaaggccagctgccagggggaaaggcaccccctaaggccggctcagttccatcctcttttctcctgaaaaaggcccgtgaaccaggccctcctcgagagcctaaggaacccttccgcccccctccaatcactcctcacgagtacatgctttctctgtatcggaccttgagcgacgccgaccgtaaaggcgggaattctagcgtcaaattggaagcaggcctggctaacactattacctcctttattgacaagggtcaggatgaccgaggcccggtagtcagaaaacaaaggtacgtgttcgatatcagtgctctcgagaaggacggtttactgggagccgagctcaggattctgcgcaaaaagccctccgacactgccaagcccgccgcccccggcggagggagggcagctcagttgaagctgagttcttgcccatctggccgtcagcccgcgtccttgctggacgttaggtcagtgcctggtctcgacggatctgggtgggaggtattcgatatctggaaactatttcggaactttaagaattccgcgcagttgtgcctggaactggaagcctgggaacggggcagagctgttgacctgcgggggttgggattcgacagagccgcccgccaggttcacgagaaagcactctttctggtgtttggacgcactaaaaaaagagatctcttttttaatgagatcaaggcccgatctggacaggacgacaagactgtctatgaatatctgttttcacagcggcgaaagagacgggcgccgctcgcaacacggcagggcaagagacctagcaagaatcttaaagcccgttgctctcggaaggccctgcatgtgaactttaaagatatgggctgggatgactggattatagctcctctggagtacgaggcgttccactgcgagggcttgtgtgaatttccactaaggagccatctggaacccactaaccatgccgtgatacagacgctaatgaacagcatggatcctgagtctacaccccccacttgctgtgttcccactcgcttaagtcccatctccatactcttcatagattctgccaataacgtcgtctataaacaatacgaggacatggtggtcgaaagctgtggctgtcgt

SEQ ID NO: 322024 - DNA, 1503 bp, Artificial Sequence
  derived and/or modified sequence
atgcgcctcccaaaattgttgacttttctgctctggtacctggcgtggttggacctggaatttatctgcaccgttcttggagctccagatttaggccaaagaccacagggaaccaggcctggcctcgccaaggccgaggccaaggagcgtccgcctctggcgagaaacgtgtttaggcccggcggtcattcctacggcggcggcgctaccaatgctaacgcccgcgcaaaaggcggaacagggcagacaggcgggctaactcagcccaagaaagatgagcctaaaaagcttccccccagacctggagggcctgagccaaagcccggacatccaccccaaactcgccaggccaccgccaggaccgttacgcctaaaggacagttaccgggtggaaaggccccgcccaaagccggttctgttccatcgtcctttctactgaagaaggcccgagaacctgggccccccagagaacccaaagagccattcagaccccctcctattactcctcacgaatatatgttatcactgtatcgcacactctccgatgccgacagaaagggggggaacagttcagtcaaactggaggcaggactggcaaatactataacttcttttattgataaaggccaggacgatcgcggccccgtggtaagaaagcagagatatgtttttgacatcagcgccctggagaaagacggcctcctcggggccgaattaaggatccttaggaagaaaccctccgataccgccaagccggcagctcccgggggtggccgagctgctcagttgaagctcagtagctgtccttctggacgtcagcccgcgtccttgttggacgtccgatctgtgcccggactggacgggtcaggctgggaagtttttgatatctggaaactgtttaggaatttcaaaaactcagcccagctgtgcctggagctcgaagcctgggagcgggggagagccgtggatctgcgaggcctgggatttgatcgggctgcgcgacaagtgcatgaaaaagccctgtttctcgtctttggtcgaacgaaaaagcgagatctgtttttcaacgaaatcaaagcgcgttccggccaggacgataagaccgtctacgagtacctgttctctcagcgccgcaaaaggcgagctcctctggccactcgtcagggcaaaaggccttctaaaaatcttaaggcccggtgttcaagaaaggccctccacgtgaactttaaagatatggggtgggacgattggattattgcccccctggaatatgaggccttccactgtgaaggcttgtgtgaattcccccttcggagccacttggagccaacaaatcacgccgtgattcagacactgatgaactcgatggaccccgaatcaacaccaccaacctgctgtgtgcccacacgtctgagccctatttctatactgtttatcgactctgcaaataatgtggtctacaaacagtatgaagacatggttgttgaatcctgcggatgccga

SEQ ID NO: 322025 - DNA, 1503 bp, Artificial Sequence
  derived and/or modified sequence
atgcggctgccaaagctcctgacctttctcctctggtacctggcctggctcgatttggaattcatttgcactgtgttgggcgctccagacctcggccaaagaccgcagggcacgcgcccgggcctggccaaggccgaggctaaggagcgccctccgctggcgcggaacgtctttcgcccaggcggacactcatacggtggcggagccactaatgccaacgccagagccaagggaggcactgggcaaaccggaggtctgacccagcccaagaaggacgagccaaagaagctgcccccacgcccgggcggtccagaacctaaaccaggacacccaccgcagactcgccaggctaccgctagaactgtgaccccgaaaggacagctgcccggtggtaaggccccaccgaaggctgggtccgtccctagctccttcctcctcaagaaggcgcgggagcccggtccgcccagggagccgaaggaacctttccgcccacccccaatcaccccgcatgaatacatgctgtcactttaccgaactctgtcggatgctgaccgcaagggagggaactccagcgtcaagctggaagctgggctcgcgaacaccatcacttcattcatcgacaaagggcaggatgatagaggccccgtggtccggaagcaacgctatgtgtttgacatcagcgctctggagaaggatggactgctgggagccgagctgaggattctccggaagaagccgtccgatacggcaaaaccggctgcaccaggtggaggacgcgcagcccaactgaaactctcctcatgcccttcgggacggcaaccagcatccctgctggacgtgagaagcgtgccgggcctggacggctcgggatgggaggtgttcgatatttggaaactgttccgcaactttaagaattccgcgcagctctgcctcgaactggaggcgtgggagcgcggcagagcagtggacttgcgcggactggggtttgatcgggccgcccgtcaggtgcatgaaaaggcgcttttccttgtattcgggcggaccaagaaacgggatctcttcttcaacgaaatcaaagcccgctccggtcaggacgacaagactgtctacgagtatctcttctcccaacgccgcaaaagacgcgcgccgctggccacccggcagggaaagcggccgtcgaaaaaccttaaagcccgctgctcacggaaggcgctgcatgttaacttcaaggacatgggctgggacgactggatcatcgctcctctggaatacgaagcgtttcattgtgagggcctctgcgaattcccgctgcgaagtcacctcgagcctaccaaccatgccgtgatccagacgctcatgaattccatggatcctgagtcaactccaccgacctgttgcgtaccgacgcgcctgagccctatatcgatcctgttcatcgattcggccaataatgtggtgtacaagcaatacgaagatatggtggtggaaagctgtggctgcaga

SEQ ID NO: 322026 - DNA, 1503 bp, Artificial Sequence
  derived and/or modified sequence
atgcggctgcccaaactcttaacgttcctcctgtggtaccttgcctggctggaccttgagtttatctgtacagtcttgggcgccccagacctcggccagcggccacagggcactagacccggcctggccaaggccgaggctaaagaaagacctcccctcgctcggaatgtattccgccccggcggacacagttatggcgggggtgctacaaacgctaatgcgcgtgcaaaggggggtacgggacagaccggtgggctgacccagccaaagaaggacgagcccaagaaactgcctcctcgcccgggcggccccgaacccaagccaggccatccaccccagacgcgtcaggcgacggcccgtactgttacacccaaaggtcagctgcccggagggaaagcgcctcccaaggcaggttcggtgcccagttcattcctcttgaaaaaggccagagaacctgggccacccagagagcctaaggagccttttaggccgccacccatcacaccacacgaatacatgttgtcactataccggaccttgagtgacgccgaccgaaagggcggcaattctagcgtgaagcttgaagctgggttggcaaataccatcaccagctttattgataaaggacaagatgaccgaggtccagtagtgcggaagcagagatatgtgttcgacatatctgccctggaaaaggatggcctgcttggggctgaactgcgaattctcaggaaaaagccttcagacaccgctaagcctgctgcgccgggaggaggccgggcggcacagctcaaactcagctcttgtccaagtggcagacagcccgcttctctgttggatgtgcgatctgtccccgggctggacggcagcggctgggaagtcttcgacatctggaagctttttaggaattttaagaattctgctcaactttgtctggaactggaagcctgggagaggggcagggcggtcgacctgaggggactgggcttcgatagagcagctaggcaagtccacgaaaaagcactgtttctggtctttggtcgcactaagaagagagacctgttctttaacgagatcaaggccaggagcggccaggatgacaaaacagtctacgagtacctgttctcccagcggagaaagaggcgggccccactggcaacacgacagggaaaaagacccagtaagaatcttaaggccagatgcagtcggaaagcccttcatgtgaatttcaaggacatgggctgggacgattggatcatagcccctttggaatacgaggcgttccactgcgagggcttatgcgaattcccgctccggagtcatctggaacccaccaatcacgctgtcatacagaccttaatgaattccatggaccccgaatcaacacccccgacatgctgtgtgcctacaagactgtcacctatatctatactttttattgactccgcaaacaacgtcgtgtacaagcaatatgaggatatggtcgttgagagctgcggatgtaga

SEQ ID NO: 322027 - DNA, 1503 bp, Artificial Sequence
  derived and/or modified sequence
atgcgcctccccaaactcctcacctttcttctctggtacctggcatggttagatctggagtttatctgcacggtcctcggtgcgcctgacctcgggcagcggcctcaaggtacacgacccggtctggcgaaagctgaggcgaaagagcgacctcctttggctcgcaacgtgtttcgcccgggcggccatagctacgggggtggggcaacgaacgctaatgcccgggctaagggcggtacgggacagacaggcggcttaacacagcctaaaaaagacgagcccaagaagttgcctccaagacccggggggccagaacccaaaccaggacatcctccccaaactcgtcaggctacagctaggaccgtcactcccaaagggcagctgccaggtggaaaggctccccccaaggccgggtctgtcccgtcatcgttcctgctaaaaaaggccagggaacctggcccgcccagggagcccaaagaacccttccggccacccccaattacaccgcacgaatatatgttatccctctatcggaccctgtccgatgcggacaggaagggtgggaactcatccgtcaagttagaggccggcctcgccaatactattacatcctttattgacaaaggccaggatgaccgcggccctgtcgtacgaaagcagcgttacgtgttcgatatcagcgccctggaaaaggatgggctcctcggggccgagctacggatcctgagaaaaaaaccaagcgataccgctaaacccgcagctcctggcgggggcagagccgcgcaactgaaactaagctcctgcccatcaggtcggcaacccgcctctttgctggacgtgcgctccgtgcctggccttgatggctcggggtgggaagtgtttgacatttggaaactgttcagaaatttcaagaatagcgcacaactctgccttgagctggaggcatgggaaagaggaagggcagtggaccttcgcggccttggcttcgacagggctgcccggcaggtgcatgagaaagccctgttcctggtatttgggcgcaccaaaaagagggatctgttctttaatgaaattaaggcccggtctggtcaggatgacaaaacagtatacgagtacttgttctcacagaggaggaagagacgggcccctctcgccacgcggcaggggaagaggccatcaaagaacctcaaggccagatgcagccgcaaggctctacatgtgaattttaaagacatggggtgggacgactggataatcgctcccttagagtatgaagctttccattgcgaagggctatgtgaattccccttacggtcacacctcgaaccaacaaatcacgctgtaatccagacactgatgaatagtatggacccagaatccacgcccccgacctgttgtgtccctacaaggctcagcccaatcagcatcctgttcattgatagcgctaataatgtagtatataaacagtatgaggacatggtagtagaaagttgcggatgcagg

SEQ ID NO: 322028 - DNA, 1503 bp, Artificial Sequence
  derived and/or modified sequence
atgaggctgccaaagctgttgacttttctcctgtggtacctcgcctggctggatctggaatttatttgtacagttctgggcgctcctgatcttgggcagaggccccagggcacacgaccagggcttgccaaagctgaggcgaaagaacggccaccactcgcgaggaatgtgttcagacccggcggacactcttatggcggcggcgccacaaacgctaatgcacgggctaaagggggtactgggcaaacaggcggcctcactcagcccaagaaggacgagccaaagaagcttccccctcgcccaggcgggcccgaaccaaagcctggacacccaccacagaccagacaggccactgctcggacagtgacacccaagggccaactgccgggcgggaaggcaccgccaaaggcagggtcagtaccctccagcttccttctgaaaaaggcccgggaacctggtccaccccgggagcccaaggaaccattcaggccccctccgattaccccccatgagtacatgctctctctgtacaggactttgtccgacgccgacagaaaaggtgggaattcttccgttaaactcgaggccggcttggccaacacgatcaccagtttcattgacaaggggcaggatgaccggggacccgtggtcagaaaacaaagatatgtgttcgacatttctgccctcgagaaggatgggctgcttggcgcagaactcagaattctccgcaagaagcccagcgatacggcaaaaccagctgcacccgggggcggtcgggccgctcagttgaagctgagttcttgcccctccggacgccagccagcttctctccttgacgtgagatctgtgccaggcctcgacggaagcggatgggaggtcttcgacatctggaaactgtttaggaactttaagaattccgcccaactgtgtctcgagcttgaggcttgggaaaggggcagggcggtggacttgcgagggctcgggtttgatagggccgctagacaggtgcacgagaaagctctctttttggtgtttggacggaccaagaaaagggatttgttcttcaatgagatcaaggcacgatctggccaggatgacaagacggtctacgagtaccttttttctcagcggcgcaagcgccgggctcctttggctacccggcagggtaagcgcccttccaagaatctgaaggctagatgtagcagaaaagctctgcatgtgaatttcaaggacatgggttgggacgactggatcatagctcccctggaatatgaggccttccactgtgaggggttgtgtgaattccccctgagaagtcaccttgaaccaacaaatcatgctgtaatacagaccttgatgaattccatggaccccgagagtacgccacctacttgctgcgtgcctactcggctgagtccaatctccatcctctttatcgattccgctaacaatgtggtgtacaaacagtacgaggacatggtggtggagtcctgtggttgtaga

SEQ ID NO: 322029 - DNA, 1503 bp, Artificial Sequence
  derived and/or modified sequence
atgcgcctgccgaaacttctgactttcttgctgtggtatctcgcgtggctcgacctcgaattcatctgtactgtcctgggcgcaccggacctgggccaacggccgcagggtaccagacccggtctggcaaaggcggaggcaaaagaaaggcctccgctggcgcggaacgtgtttcgcccaggagggcattcgtacgggggaggagcaaccaatgctaacgcgagagcaaagggagggaccggacaaacgggagggctcacccagcctaagaaggacgagccgaagaagctgccacctcgccccggcggaccggagccgaagccggggcacccaccacagacccgccaggccaccgcccgcactgtgaccccgaagggacaacttccgggcggaaaggcgcctccgaaggccggctcggtgccgagctcattcctgctgaaaaaagcccgggagccagggcctcctcgagaaccgaaggaaccatttcggccgccgcctatcactccccacgagtacatgctctccctctaccgcactctgtcggacgcagaccggaagggcggtaattcaagcgtcaagttggaggcagggctcgccaataccatcacttccttcatcgataaagggcaagacgaccgggggcctgtggtgagaaagcagcgctacgttttcgatatctcggccttggagaaggatggtctgcttggagccgaattgaggatacttcggaagaaaccctcggataccgccaaaccggctgcgcccggcggcggccgggccgcacagctgaagctgagctcctgcccgagcgggagacaaccggcctcgctcctggacgtccgttccgtgccgggcctggacgggtcaggatgggaggtgtttgacatctggaaactgttccgcaatttcaaaaactcagctcagctttgcctggagctggaagcatgggaacgcggccgagcagtggatctgcggggactcggattcgaccgcgctgctcggcaggtgcacgagaaggccctgttccttgttttcggacgaactaagaagagggatttgttctttaacgagatcaaggcccgcagcgggcaggatgataagaccgtctacgaatacttgttttcacaacggagaaaacggcgggcaccactcgcaacgcgccagggcaagcgcccgtcaaaaaacttgaaggcgaggtgctcccgcaaagcattgcatgtgaacttcaaggacatgggatgggatgattggattatcgcccctctcgaatacgaggcgttccactgcgaaggtctgtgtgaattcccgctgcgctcacatctcgaaccaactaaccacgctgtgattcagacgctgatgaattcgatggacccagaatcgacgccgcctacctgctgcgtcccgacccggctgtcgccaatctcaatcctgttcatcgacagcgcaaacaacgtggtgtacaagcaatacgaagatatggtggtcgagtcctgtggctgccgc

SEQ ID NO: 322030 - DNA, 1503 bp, Artificial Sequence
  derived and/or modified sequence
atgaggctgccaaaactccttacatttctcttgtggtacctcgcttggctggacttggagttcatctgcacagtgctgggagccccggacctgggccagagaccgcaaggcacaaggcccggtctggctaaggccgaagctaaagaaaggccacctctcgccaggaacgtcttccgcccagggggtcactcttatgggggcggggctacaaatgccaacgctcgggccaaaggaggaaccggtcaaactggcggactcacacagccgaagaaggacgagccaaagaagctgcctccgcgaccaggaggccctgaacctaaacctggccaccctcctcagacccgccaggccacagcccgcactgtgaccccgaaggggcagctgccgggcggtaaggcgcccccaaaggcaggctcagtgccttcttcgttcctgcttaaaaaggccagagagcctggcccaccaagggagccgaaggagccattcagaccccccccaatcacacctcacgagtatatgctgtccttgtacaggacactgtcagatgccgaccggaagggggggaatagctcagtgaaattagaggcaggcctggcaaacactatcacgagtttcatcgacaagggtcaggacgatcgaggaccagtggtgcgcaagcagaggtatgtcttcgacatcagcgctctggagaaggatggccttctgggtgccgaattgagaattctgagaaaaaagccctccgacacggccaaaccggccgcacccggaggggggcgggcagcacagctgaaactctcttcatgtccctccggacgtcagcctgcaagcctcctggacgtcaggagcgtaccagggcttgacggctccggctgggaggttttcgatatttggaaactatttagaaacttcaaaaattcagcgcagctttgcctagagttggaggcatgggagagaggacgagccgttgacctccgcggacttggcttcgatcgggcagctcgccaggtgcacgaaaaagccctctttctggtcttcggcagaacaaagaaacgtgatctgttctttaatgagatcaaagcgcgaagcggacaagacgataaaactgtctacgagtatttgtttagccaacgccgaaagcggcgtgctccactggccacccgacagggcaaacgacctagtaagaaccttaaagcccgctgtagccgcaaggcgctgcatgtaaactttaaggacatggggtgggatgattggattattgcacccctcgaatacgaagccttccactgcgagggtctgtgcgagttccctctgagatcacatttagagccaacaaatcacgccgttattcaaacgctgatgaattctatggacccggaatctaccccccccacatgctgcgttcccacacggctatccccaattagtattctattcatcgattcagctaacaacgtggtttataaacaatacgaggacatggtggtggaatcttgtgggtgtagg

SEQ ID NO: 322031 - DNA, 1503 bp, Artificial Sequence
  derived and/or modified sequence
atgagattgccaaagctgctgacattcctgttatggtatctagcttggctggaccttgagttcatctgcaccgtcctgggcgcccccgacttagggcagcgtccccagggaacccgtcccgggctggcgaaggccgaggcaaaggagcgccctcccctggcgcgcaacgtatttaggccagggggacactcatacggtggcggtgcgactaacgcaaatgcaagagcaaagggtgggacaggtcagacgggaggactaacccagcccaaaaaggacgagccaaaaaaacttcctccacgcccaggggggccggagccaaaacccggtcatccgccacagactcggcaagctactgcgaggacagtcacccccaaaggacagcttccgggcggaaaagccccccctaaggctgggtcggttccttcatctttcctgctgaagaaagctcgagagcctggtccacctagggagcccaaagaaccctttcggcctccccccatcacaccccatgagtacatgctgtctctctaccgcacgttgtcagatgctgaccgcaaggggggcaacagttcagttaaactcgaagccggtctggccaatacgatcacttccttcatagataaagggcaggacgaccgcgggcccgtggtgagaaaacagcggtatgtgttcgacattagcgctctcgaaaaagatggtcttttgggtgccgagcttcggattttaagaaaaaaaccatcggacaccgccaagcccgctgctcccgggggcgggagagccgcgcagctgaagctaagcagctgccccagcggcaggcagcccgccagtctgctcgatgtgagaagcgttcctgggctggacgggtccggatgggaagtgtttgatatctggaaactgtttagaaattttaagaactcagctcagctctgcttggagctcgaagcctgggagagagggcgggcagtggatctgcgaggcctcggcttcgatcgggctgcccggcaagtgcacgagaaagccctgtttctagtgtttggtagaaccaagaagcgggacttattttttaatgaaatcaaagcccggtcaggccaggacgacaaaacggtttatgagtatctcttctcgcagagacgcaagcgaagggcgccactggctacaagacaggggaagcggccttccaaaaacctgaaggcccggtgttcgaggaaagccctgcacgttaattttaaagatatgggatgggacgactggatcatcgctcctttggagtatgaggcttttcattgcgaaggcttgtgtgaatttccactccgcagccacctggagcctaccaaccatgcagtgatccagacattgatgaacagtatggaccctgagagcacgccacctacgtgctgcgtgcctaccaggttgtccccaattagcatattgttcatcgattcagccaataacgttgtttataagcagtacgaagatatggtggtggagtcctgtggctgtcgg

SEQ ID NO: 322032 - DNA, 1503 bp, Artificial Sequence
  derived and/or modified sequence
atgcgtctccctaaactgctcaccttcctcctgtggtacttggcttggctggatctggagttcatatgtacggtgctcggcgccccggatctgggccagagacctcaggggacacgccctggactcgcgaaggcggaagccaaggaacgaccaccgctggcgcgcaatgtcttccggcccggaggccattcgtacggaggcggagccaccaacgcaaacgcccgagcaaaaggtggcactggtcaaacgggagggctgacccagcctaagaaagacgagcctaagaaactcccgccgaggcctggtggccccgagccaaagcccggccatccgcctcaaactcgacaggccacggcccgtacagtgactcccaaaggacagctgcctggaggcaaggccccacccaaagctggttccgtgccctcctccttcttgctcaagaaggcgcgtgaacccggcccaccccgtgagcctaaagagccatttcgtccgccacctattaccccccacgagtatatgctgtcattgtatagaaccctgtccgatgccgaccgcaagggcggcaactcgagcgtgaagctggaggccggtctggccaatacaatcacctccttcattgacaagggccaagatgaccgcggcccagtcgtacgaaagcagcgttacgtcttcgatatctccgccctggaaaaagacggtttattgggtgctgaacttagaatactacgaaaaaagccatccgacacggcgaaaccggccgcccccggtggcggacgcgccgcccagctcaagctatcgtcctgtccgtcgggccgccagccggcctcactcttggatgttcgcagtgtgcccggccttgacggaagcggatgggaggtctttgatatttggaagttgtttagaaattttaagaactccgcgcagctctgtctggagctggaggcctgggagcgtggacgcgctgtagatctgcgcggactgggcttcgaccgcgctgcccgccaggtacacgagaaagccttgttcctagtcttcggacgcaccaagaagagggacctgttcttcaacgaaattaaggccagatccggacaggacgataagacagtttacgagtacctgttcagtcagcgacgcaaacgtcgagctcccctcgccacgcggcaaggcaaacgaccaagtaagaatttgaaggcacgatgtagcaggaaggcccttcacgtgaacttcaaagacatgggttgggacgactggatcattgccccgctggagtacgaagccttccactgcgagggcctttgcgaatttccactgcgaagccacctcgagccgaccaatcacgccgtgattcagacgttaatgaacagcatggatccagaaagcacgccacctacgtgctgtgtgccgacgcgcctttcacccataagcatcttgttcatagatagtgcgaacaacgtcgtctacaagcagtatgaggatatggtggtcgaaagctgcggatgccga

SEQ ID NO: 322033 - DNA, 1503 bp, Artificial Sequence
  derived and/or modified sequence
atgcgcctgccaaaactgctgacttttctgctgtggtatctggcttggctggaccttgagttcatctgtaccgtcctgggcgctccggacctcgggcagcggccgcagggcaccaggccaggtttagccaaggcagaggccaaagaaagaccgccactggctcgaaacgtatttaggccaggagggcacagctacggcggcggcgctaccaacgccaacgccagggccaaagggggcactggacagacagggggcctgacccagcctaagaaggacgagcccaagaagctgccaccccggccaggtggcccagagcctaaaccgggccaccctccccagacccgtcaggcaacggctcggacggtaacccccaaaggccagctcccaggcgggaaggcaccccccaaggcaggttccgtgcccagttcgttcctgttgaagaaggctcgcgagcctgggcctccgcgtgaaccaaaagaacccttcaggccaccccctatcacccctcacgaatatatgttgagcttatataggaccctctccgatgctgaccgcaaggggggcaactccagtgtgaaactcgaggcgggcctagccaataccataacctcattcatcgataaggggcaggacgacaggggtcccgtggtccgaaagcagaggtacgtgttcgacataagcgccctggaaaaagacggtctgttgggtgccgaacttaggatcctccggaagaaaccatcggacaccgccaaacccgccgcacccggcgggggtagggcagcgcagttgaagctgagctcatgcccctcaggacggcagccggctagcctgctggacgtgcgatctgtgcctggcctggacgggagcggatgggaggtttttgatatctggaaactcttccgcaacttcaagaattccgcgcagttgtgcctcgaactagaggcgtgggagcgcggtagagccgtcgacctgagaggccttggctttgatagggcagcccgccaggtgcacgaaaaggctctttttctggtttttgggagaactaaaaaacgggatctgtttttcaatgaaatcaaggcgcgcagtggtcaggatgataaaacggtctacgagtatttgttctcccagaggagaaaacgtcgagcaccccttgccacccgccagggtaagaggcccagtaaaaatctgaaggccagatgttcacgcaaagcgcttcatgtcaatttcaaggacatgggatgggatgattggatcatcgctcctctggaatacgaggccttccattgcgaggggttgtgtgagtttccattaaggagccacttagagcccacgaaccacgcagtgatacaaaccctgatgaactctatggatcccgagtcaacgccacccacatgctgcgttcctactaggttgtccccaataagcatcctctttattgatagcgctaataatgtggtgtacaagcagtacgaagacatggtagtcgagtcatgtggctgcagg

SEQ ID NO: 322034 - DNA, 1503 bp, Artificial Sequence
  derived and/or modified sequence
atgcgtctcccgaaactcctgactttcctgctgtggtatctggcctggctggacctggagttcatctgcacagtcctgggggcaccggatctcggacagagacctcagggaaccagacctgggttggcaaaagcggaagcaaaggagcggcctccgttggcccgaaacgtctttaggcctggcggccacagttacggggggggcgccacaaacgccaacgcgagagccaaaggagggactggtcagactggcggtcttacccagccaaaaaaggacgagcctaagaaactcccgccccgtcctggcggacccgagcctaagcctgggcacccacctcagacccgacaggctaccgctcggaccgttacaccaaaagggcagttgccaggcggcaaagcacctccaaaggcaggcagcgttccaagttcgtttctcctgaagaaagctcgcgaacccggacctccccgtgagcccaaggaaccgtttagaccgcctccaataacaccccatgagtacatgctctcactgtatcggaccctgtcagatgcagaccgcaagggcggaaactccagcgtgaaattagaggcgggcctggctaacactattaccagctttatagataaggggcaggatgacaggggcccagttgtccgcaagcagcgatacgtcttcgacatctccgcattggaaaaggatggcctactgggagcagagttacgcattttgcgaaagaagccatcagacacagccaagccggcggcgccaggcggtggccgcgctgcacaactgaagctctcatcttgtccatccggacgccagcccgcctcactgttggacgtgcggtccgtacctggcctggatggatctggctgggaggtcttcgacatctggaaattattccgaaacttcaagaactctgctcagctgtgtcttgagctggaagcatgggagagaggaagggccgtggacctccgaggactgggattcgaccgcgcagcacgacaagtccacgaaaaggctctcttccttgtgtttggccgtactaaaaagagagacttgttctttaatgagataaaggccagatcaggccaggatgataagactgtgtatgaatatctcttttctcagaggcggaaaagacgagctccgctggcaactcggcagggcaagcggccctccaagaatctcaaggctcggtgctcgcggaaggcactccacgtgaacttcaaggatatgggctgggatgattggatcattgcacccttagaatacgaggcatttcattgtgaaggactctgtgagttcccactacgcagccaccttgaacccacaaatcatgcggtcatccagactctgatgaatagtatggacccggagagcaccccccctacatgctgtgtccctactaggctgtcaccaatatccatactcttcatcgattcggccaacaatgtagtgtacaagcaatacgaggacatggtcgtggaaagctgcggatgtcgc

SEQ ID NO: 322035 - DNA, 1503 bp, Artificial Sequence
  derived and/or modified sequence
atgcggctccctaaactgttaacttttctgttatggtatctggcctggttggacctggaattcatctgcacggtccttggcgcccctgatctgggacagaggccacaaggcacgaggcctggcctggccaaagctgaggcaaaggaacgaccgcccttggcccgaaatgtgtttcgcccaggtggacattcgtatggggggggtgctacaaacgcaaacgcacgcgcaaaaggggggacaggccagaccggtggcttgactcagcccaaaaaggatgagcccaaaaagctgccacctagacctggagggccagaacctaagcccgggcaccctccccagacccgccaggctactgcgaggaccgtgacacccaaggggcagttgccggggggcaaggcccccccaaaggctgggtccgtgccctctagcttccttctgaaaaaagcacgggagcctggccctcctagagagcccaaggagccgttccgccccccgcccatcactcctcacgagtacatgctctctctataccgcacactgtccgatgcagaccgcaagggaggcaatagctctgtaaagttagaggctggactcgccaacactatcacttcttttattgacaaaggccaagacgatcgtggtcctgtggtgcggaagcagaggtatgtgtttgatattagcgcgcttgaaaaagacggactcctgggtgctgaacttcggatcttgagaaagaagccttcggacacagctaaacccgccgccccaggagggggtcgtgcagcccagcttaaactgtcaagctgcccgtccgggcggcagcctgcctcactgttagatgtgagatccgttccaggactcgacggatccgggtgggaggtcttcgacatttggaaacttttccgcaattttaagaactctgcccagctctgtctggagctggaggcgtgggagcgcgggagggctgtggatctgaggggcctgggttttgacagggccgcccggcaggtccacgagaaagccttgttcctggtctttgggagaaccaagaaaagagacctcttcttcaatgagattaaagcaagaagcggtcaggacgacaaaaccgtgtacgagtacttgttctctcagagacgcaaacgtcgggcacctctggctacgcgtcagggtaagagaccgtccaaaaacttgaaagcaaggtgtagcaggaaagcccttcatgtgaactttaaggatatggggtgggatgattggatcatcgcgccactcgagtacgaggctttccactgtgaaggactgtgcgaattcccactgagatcccaccttgaacccacaaaccacgccgtgatccagacattgatgaactctatggatccagagtccactccaccaacttgctgtgtgcccacccggctttcacccatttcaatcctgttcatcgatagtgccaataacgtcgtatataagcaatacgaagatatggtggtggaatcatgtggctgcaga

SEQ ID NO: 322036 - DNA, 1503 bp, Artificial Sequence
  derived and/or modified sequence
atgcgtctcccaaagctgctcactttcctgctttggtacctggcgtggctggatcttgagttcatctgtactgtgctcggagcaccggatctcggacaacggccacagggaactcgccctggacttgcaaaggcagaagccaaggagcgccctccgttggctagaaacgtctttcggccgggagggcattcatacggaggcggcgccaccaatgccaatgcgagagccaagggtggcactggccagaccggaggcctcactcaaccgaagaaagatgaacccaagaagctgccacccaggccagggggtcctgaaccaaaacccggacatccgccgcaaacccggcaagcgaccgccagaaccgtgactccgaagggccagctgccaggaggcaaagccccaccgaaagccggctcagtgccatcatcattccttctcaagaaagcgcgtgaaccggggcccccgagggagccaaaggaaccgtttaggcctccgccaatcaccccgcacgaatacatgctcagcctctaccgcacgctctcagacgcagatcgcaagggcggtaacagctccgttaaactggaagcgggactggctaacactatcacctccttcatcgacaagggccaggatgatcgcggtccggtggtgcgcaagcagcgatacgtgtttgacatctcggccttggagaaagacggcctcctcggtgcggaactgaggatactgcggaaaaaaccttcagacactgccaagcctgctgctccggggggaggtcgcgcggcgcagttgaaattgagcagctgcccttcgggcagacagcctgcgtcgcttctcgacgtgcggagcgtgccgggactcgacggctcgggttgggaagtgttcgacatctggaagctgttcaggaacttcaagaattccgctcagctttgtctggagctggaggcatgggagaggggccgggcagtggacctgcgcggcctcggattcgatagagccgccaggcaggttcacgaaaaggcattgttcctcgtgttcggccggaccaaaaaacgcgacctgtttttcaatgagattaaagccaggtcgggacaggacgacaagacggtctatgagtacttgttctcgcaacgccgcaagcgacgcgctccgctggccacgcgacaaggaaagcggccgtcaaagaatctgaaggcccggtgcagccggaaggccctgcacgtgaatttcaaggacatgggctgggacgattggatcattgccccattggagtacgaggcgtttcactgcgagggtctgtgtgaatttccattgcgctcacacctcgaaccgaccaaccatgcagtgatccagaccctcatgaactctatggacccagaatcgactccgcctacgtgctgcgtgccgacccgcttgtcccctatcagcattttgttcatcgattccgcaaacaacgtcgtctacaaacagtacgaagatatggtcgtcgaaagctgcggatgcaga

SEQ ID NO: 322037 - DNA, 1503 bp, Artificial Sequence
  derived and/or modified sequence
atgaggctcccgaagctgctaacatttctgctttggtacttggcttggctagacctggaattcatatgcaccgtactaggggcgccagatcttggacagcggccgcaggggactcgacctggactagcaaaggccgaggctaaggagagacccccactggcccggaatgtgttccgccccggtggccactcttatggggggggggccacaaacgcaaatgcccgcgcgaagggcgggacaggccagacaggaggtctgacgcaaccaaagaaagacgagcccaagaagctgccaccccgtccaggagggcctgagccgaagccaggccatccaccgcagaccaggcaggctacagccaggaccgtgacacccaagggccagctaccgggcggtaaagctccaccaaaggctggcagcgtgccatcttccttccttttgaagaaagccagagagccaggccccccccgcgagcctaaagagcccttcagaccccctccaatcactcctcatgaatacatgttatccctttatcggacactgtccgacgcggatcggaagggggggaactcatcagttaaactcgaagccgggctagccaataccatcacctcttttatagacaaagggcaggatgacaggggcccagtcgtcaggaaacagaggtatgtgtttgacataagcgcattggagaaagatggcctgcttggcgccgagttacgtatcctgagaaagaagccgtctgacactgccaagccagccgcccccggaggggggcgcgcagctcagctgaaactgtcttcttgcccatcaggacgccaaccggccagtctcctcgatgtcagaagcgttccgggcctggacggctccggctgggaggtgttcgacatatggaaactgttcaggaactttaagaattcagctcagctgtgcctggaactcgaggcctgggagaggggcagggccgtggatctccgaggccttggcttcgacagggcagcgcgacaagtacacgaaaaagcgctctttctcgtttttggccgaaccaagaagcgggacctgttttttaacgagatcaaagccaggtctggtcaagatgacaagactgtttatgagtacttatttagccagagaagaaagcgaagagcacctttggccacacggcagggcaagcggccctctaaaaacctcaaagccagatgttcaagaaaggctctccacgtcaacttcaaggacatggggtgggatgactggatcatagcacccctggagtacgaggctttccattgtgagggactttgcgaattccctctcagaagccacctcgagcccacaaaccacgccgtcatccagaccctcatgaacagcatggatccggaatccacaccccccacatgctgcgtgccgacacgactgagtccaatttcaattctgtttatcgattctgccaacaacgttgtgtacaagcaatacgaagacatggtggttgagtcttgcggatgccgg

SEQ ID NO: 322038 - DNA, 1503 bp, Artificial Sequence
  derived and/or modified sequence
atgcgtctgccaaaattgctcaccttcctactctggtacctggcgtggttggaccttgagttcatttgtaccgttcttggggctcccgatttgggccagcggccccagggcacccgcccagggctcgcaaaggcggaggccaaagaaagaccgccactggcccgaaatgtttttcgacccggcggacattcctatggcgggggagccactaatgctaatgcccgggctaaagggggcacgggccagaccggtggcttgacccagccaaagaaagatgagcctaaaaagctgccgccgaggcctggggggcctgaacctaaacctggccacccgccccagacacgccaagctaccgcccgcacagtgacacctaaaggacaacttcccggcgggaaagccccccccaaagctggtagcgtgccgtctagcttcctgctcaaaaaagcaagggaaccagggcccccaagggagccaaaggagcctttccggcctcccccaatcacacctcatgagtacatgctgagcctgtatagaaccctctccgatgcagaccgtaagggtgggaatagttctgttaaattggaagctggcctagcgaacacgatcacctctttcatcgataaaggccaggatgatcgggggcccgtggtcagaaaacagcgatatgtttttgacatttccgctctggaaaaggatgggttgttgggcgctgaactcagaattctccggaaaaagccatccgatacagcaaagccggcggcccctggggggggtagggctgcccaattgaaactcagctcttgtcctagtggaaggcaacccgcatctctgcttgacgttcgcagcgtacctgggttagacgggtccgggtgggaagtttttgacatctggaaacttttccgaaattttaaaaactctgctcagctttgcctggaactggaagcctgggagcgtggtagagccgtggatttaagggggctgggtttcgatcgcgcggcaagacaggtgcatgaaaaggctcttttcctcgtgtttggtcgcaccaagaaaagggatctgttttttaatgaaatcaaagcgcgctccggacaagacgacaagactgtgtacgagtacctcttctcccagcgcaggaagcgccgagcccctttagccacgagacaggggaaacgcccctctaagaacctaaaggcccggtgcagccggaaggcgctccacgtaaacttcaaggacatgggttgggacgactggatcattgcaccactggagtacgaggccttccattgcgaaggattgtgtgagtttccactccggagtcacctggagcccaccaaccacgccgtcatccagaccttgatgaactcaatggatcccgagagtaccccccctacatgttgcgttccgactcgcttgtccccgatctcaatcttgtttattgatagtgctaacaacgtggtgtacaagcagtacgaggacatggtggtggagtcatgcggctgtcga

SEQ ID NO: 322039 - DNA, 1503 bp, Artificial Sequence
  derived and/or modified sequence
atgagattacctaagctgctgacattccttctgtggtacctggcttggctggacttggaatttatttgcactgtcttaggagccccagaccttggtcagagacctcaagggactagacccggcctcgccaaggcagaggcgaaggagagaccacctctcgcaaggaacgtgttcagacctgggggccactcctatgggggcggtgccactaacgccaacgctcgggctaaggggggaacgggtcagactgggggactcacccagcctaagaaggatgagcccaagaagctcccccctcgaccaggggggccagagcctaaacctggtcatccccctcagacaagacaggccacggctagaacggtgacccccaaggggcagttacccggtggaaaggcccccccaaaagcgggctcagtgccaagtagcttcctgctgaagaaagctcgcgagcccggcccaccacgggaaccaaaagagccatttcggcctccacctattacacctcatgagtacatgctcagcctgtaccgtactctgagtgatgctgacaggaagggaggaaactcttcagtcaagctagaggccggccttgcaaacacaataacaagcttcatcgataaaggacaggatgatagagggcccgttgttagaaaacaacgatacgtgtttgacatatccgcactggagaaggatgggctgctgggcgctgagttgaggatacttcggaagaagcctagcgataccgccaaacctgctgccccaggaggaggacgagccgcacagctgaagctgtcctcttgtccaagcggacgccaacccgcttctcttctggacgtccggtctgtacccggccttgatggatctggctgggaggtgtttgatatatggaaactattcagaaattttaaaaactcagcacagttgtgccttgagttggaagcctgggagcgcgggagggctgtggatctccggggattggggtttgatcgggccgcgcgccaggttcacgagaaggcattattcttagttttcggaagaactaagaagcgcgacttgtttttcaacgaaataaaggcgaggtccggacaggacgataaaactgtatacgaatacttattcagccaacggaggaagcggcgcgcccccctcgccacacgacagggaaaacgcccctcaaagaatttgaaggccagatgtagccgaaaagctttgcacgtcaatttcaaggatatggggtgggacgattggattatcgctcccctggaatacgaggccttccattgcgaaggcctttgtgaattcccattgcgatctcatctcgaacccaccaatcacgccgtgattcagaccctcatgaattctatggatccggagagcacccctcctacatgctgcgtacctacacggttgtcacccatatcaattctcttcatcgattctgctaataatgtggtctataagcagtatgaagacatggtggtggaatcttgcggttgccgg

SEQ ID NO: 322040 - DNA, 1503 bp, Artificial Sequence
  derived and/or modified sequence
atgaggttgccaaagctgttgacctttctgctttggtatctcgcgtggctggatctggagttcatatgcactgtgctgggtgcaccagatctcggtcagcggccccagggtactaggccaggtctggcaaaagcagaagccaaggagcgcccccctctggcacgaaatgtttttcgtccaggaggtcattcgtacggaggaggcgccaccaatgcaaatgccagagcaaaaggaggaaccggtcagaccggaggactcacccagcctaagaaggatgaacccaagaagctcccacccagaccaggagggccagaacccaagcccggacatcctcctcagacccggcaggcaaccgctcgaactgtcactcctaagggccagcttcctggaggaaaggcacccccaaaggcaggatccgtcccttcgtcatttctcttgaaaaaggccagagagcctggtcctcctcgagagccaaaggaaccgtttagaccaccacctattacgcctcatgaatacatgctctcactttaccggactctgagcgacgcagatcgaaagggtggaaacagctcagtcaagctggaagcggggctcgcaaataccattaccagcttcattgacaagggtcaggacgaccgaggccctgtggtgaggaagcagcggtacgtctttgacatctcggcccttgaaaaggatggacttctcggggccgagctgcggattcttcggaaaaagccgtcggacactgcaaagccagccgcaccaggtgggggccgcgcagcccaactcaagctgtcaagttgcccgtccggtcgtcaaccagcgtccttgcttgacgtgagatccgtcccagggcttgacgggtcgggttgggaagtatttgacatctggaagctgtttcgcaactttaagaattccgctcagctgtgtctcgaactggaggcatgggagcggggccgcgccgttgatcttaggggcctcgggtttgaccgggcagcacgtcaggtgcatgaaaaagcattgttccttgtgtttggcagaaccaagaagcgtgaccttttcttcaacgaaatcaaggcaagaagcggacaggatgataaaaccgtgtacgagtaccttttctcccaaaggcgtaaacgcagagcgccacttgcaactaggcaagggaaacgcccctcaaagaatctcaaggcgcgctgttcaagaaaggcgctccacgttaactttaaggatatgggttgggatgattggatcattgcccctctggaatacgaggcctttcattgtgaaggattgtgtgaatttcctttgcggtcgcatctggaacctaccaaccatgcagtgatacaaacccttatgaacagcatggaccccgaaagcacccctcctacctgttgcgtgccgactagactgtcaccaatctcgatcctctttattgattcggcgaataacgtcgtctacaaacaatacgaggacatggtcgtcgagtcctgcggttgtaga

SEQ ID NO: 322041 - DNA, 1503 bp, Artificial Sequence
  derived and/or modified sequence
atgcgtctcccaaagctgcttacctttttgctctggtaccttgcctggctggatcttgagttcatttgtactgtgctcggagctccagatcttggccaacgacctcagggtacgaggccaggtttggccaaggccgaggccaaggagcggcctcccctcgcaaggaacgtgttcaggcccggaggccactcatacggtggaggcgccactaacgcaaacgcaagggctaaaggtggcaccggtcagacgggcggtttgacccagcctaagaaggacgagccgaagaaactgccaccccgaccaggcgggcccgaaccaaaacctggacatccccctcagactcgacaggcaaccgcgagaactgtgactccaaagggccagctgcccggtgggaaagccccaccaaaagccggaagcgtgccatccagctttttgctcaagaaggcacgagagccaggaccaccgcgggaacctaaggaaccttttcgcccgcctccaattactccacatgaatacatgctttcgctgtaccgaaccctgtcagacgccgatagaaaaggaggtaattcgtcggtgaagctggaagcgggtcttgcaaataccatcaccagcttcatcgacaagggccaagatgatcggggaccagtcgtccgaaaacaacggtacgtgttcgatatttcagcactggaaaaagatggactccttggagccgagcttcggattctccggaagaagccatcggacactgcaaaacctgccgcccccggcggaggcagagcagcccaactgaaactgtcctcgtgccctagcggtcgccagccggcgagcttgctggatgtgagatcggtgccgggactcgacggaagcggctgggaggtgtttgatatttggaagctcttcagaaacttcaaaaactcggcgcaactttgtctggaactcgaagcatgggaaagaggtcgagcagtagatctgagaggactgggttttgacagagccgccagacaggtccacgaaaaggcactctttctggtgtttgggcgcacgaagaagagggatctgtttttcaatgagataaaagcgagaagcggacaagatgacaaaactgtgtatgaataccttttctcccaaagacggaagcgccgagcccctctggcgactcgccaaggaaagcggccttccaagaatctcaaagctaggtgttcccgaaaggcacttcatgtcaatttcaaggacatgggttgggatgattggattattgccccacttgaatacgaagcgtttcattgcgaggggctctgtgaatttccccttagaagccatctcgagcctaccaaccatgccgtgatccaaacgctgatgaacagcatggacccagaaagcaccccgcctacttgttgtgtgccaaccaggctctctcctattagcattcttttcatcgactcagctaacaacgtcgtgtacaagcaatacgaagatatggtggttgaatcatgtggctgccgc

SEQ ID NO: 322042 - DNA, 1503 bp, Artificial Sequence
  derived and/or modified sequence
atgcggctgcctaagcttttgacgttcttgctttggtatctggcctggctggacctcgaattcatctgtaccgtcctcggagccccggacttgggacagcgcccacagggaactcggcccggacttgcaaaggccgaggcgaaagaacggccacctctcgcccgcaatgtttttcgaccaggtgggcactcatacgggggcggagccaccaatgccaatgccagggcaaagggcggtactggccagacgggagggcttacacaacctaagaaggatgagccaaaaaaattgcctcccaggcccggcggccctgaacccaagcccggacaccccccccaaaccagacaggctacggcccggactgtcacacccaagggacagctgcccggaggtaaagctccacctaaggccggcagtgtcccctctagttttctgcttaagaaggctcgagaacctgggcctcccagggaacccaaggaaccctttcggccaccccctatcactccccatgaatatatgctgtctctctatcggaccctgtccgacgctgataggaagggtgggaactccagtgtcaagctcgaggcgggccttgcaaacaccattacctccttcatagataagggccaggacgatagagggcccgtggtgaggaagcagagatatgtgttcgacataagtgcactggaaaaagacggtctgctgggcgcggagctgcggatcttgcgcaaaaaaccatctgacaccgccaagcctgcagctcctggtgggggaagagctgcccagctgaagctgtcaagctgccctagtggtcgacaacccgccagccttcttgatgttcgatcagtgccaggactggacgggtccggatgggaggtgtttgatatctggaagctttttaggaactttaaaaacagcgcacagttgtgccttgaactggaggcatgggaaagagggagggcggtggatctcaggggtctgggcttcgacagggcggctcggcaggtgcatgaaaaggctttgttcctcgtcttcggcaggaccaagaaacgcgatctgttttttaacgaaataaaggccaggtctggccaggatgacaagacggtctacgagtacctttttagtcagcggaggaaacggagagcaccactggccacacgccaggggaagaggccctcaaagaatctcaaggctcggtgcagcaggaaggctctccatgttaactttaaagacatgggttgggacgattggattatagctcctcttgagtatgaggcatttcactgcgaaggactctgcgagtttcccctgagatcccatttggagcctactaaccacgctgttatacagactcttatgaactccatggaccccgagagtactcctccgacttgttgcgttccgaccagactgtcacccatttcaatcctgtttatagatagcgccaacaatgtggtgtacaagcagtacgaagacatggtggtggagagctgtgggtgtcgc

SEQ ID NO: 322043 - DNA, 1503 bp, Artificial Sequence
  derived and/or modified sequence
atgaggctccctaagctgctaaccttcctcctctggtatttggcttggctggacctggagtttatctgcaccgtgctaggcgcgccggaccttggccaacgacctcagggtacaaggcccgggctggccaaggcggaagccaaggagaggccgcctttagcaaggaacgtttttagaccaggaggtcactcctacggcggcggggcgacgaatgccaatgcgagggccaaggggggcacagggcagacgggcggactgacccagccgaagaaggacgagcccaaaaaacttccacctaggcctggaggcccagaacctaagcctgggcaccctccacagacgagacaggcaacggcccgtaccgtgacccctaaaggccagctcccgggaggaaaggcccctcctaaggccggctcagtgccttctagctttctgctgaaaaaggcacgagagcctgggccaccccgggaacccaaagaacctttcagaccgccacctatcaccccgcacgagtacatgctgtcactgtatagaacactttctgatgcagaccgcaaggggggcaattcatcagtgaagctggaggccgggctggccaatacaatcacgtctttcatagataagggtcaagatgaccggggccccgtggtccgaaagcagaggtatgtgttcgatattagtgccttggaaaaagatggcctgctcggagccgagttacgtatcctgagaaaaaaacctagcgatactgctaaaccggccgccccaggaggtggccgtgccgcccagctcaagctgagcagctgtcctagcggtagacaacccgcctcattgcttgatgtaaggagcgtccctggcctggacggctccgggtgggaagtgttcgatatttggaagctctttcgaaattttaaaaactcggcgcaactgtgcttggagctcgaggcatgggagcgtggcagagccgttgacctgagaggacttggctttgatcgggcagcaagacaggtgcacgaaaaggctcttttcctagtgttcggcagaactaagaagcgcgatctctttttcaacgaaatcaaagcccgtagcggacaggatgataagaccgtctatgagtacctgttctcacaacgcaggaaacggagggcccctttggcaactagacaggggaaaagacctagcaagaatctgaaggctcggtgctctcgcaaagccctgcacgttaactttaaggatatgggttgggatgactggatcatcgcgccactagagtatgaggcatttcactgtgaggggctgtgcgaatttcctctgcgtagccatcttgaaccaaccaaccacgccgtaatacagactttgatgaactctatggatcctgaatccactcccccaacttgctgcgttcccacccggctcagccctatctctatcctctttatcgatagtgctaataacgtcgtgtataaacagtatgaagacatggtggtcgaatcatgcggctgccgc

SEQ ID NO: 322044 - DNA, 1503 bp, Artificial Sequence
  derived and/or modified sequence
atgaggcttcctaagctcctcacctttctgctttggtaccttgcatggcttgacctggagtttatctgtacggtcctgggcgcgccggacctgggacagcggccacaaggtactcggccagggttggctaaggcagaggccaaggaacgaccacccctcgcgaggaatgtgtttaggccaggagggcactcctacggaggcggcgctaccaatgcaaacgccagggcaaaaggaggaactggtcagacgggtggactcactcaaccgaaaaaggatgaacccaaaaagctgccaccacggcccgggggaccagaacctaagcctggtcatccaccccaaacccgccaagcgactgcaaggactgtgacgccgaaggggcaactccctggtggaaaggcaccccctaaagcaggaagcgtccctagctccttcctgctgaagaaggcgcgagaaccgggacccccacgcgaacctaaggagccattcaggcctccacctattactcctcatgagtacatgttgtcactttacagaacgctttcagacgcagatcgaaagggaggtaattcgtcagtcaagctggaagccggtctggcaaacactattacttccttcatcgataaaggtcaagacgatagaggcccagtggtgcggaaacagagatacgtctttgacatttccgctcttgaaaaggacggattgcttggagcagaactgagaatactgcggaaaaaaccgtcggatactgcaaagcctgccgcacctggtggaggacgggcagcccaactgaagctctcctcctgtcctagcggaaggcagcctgcctcgctcctggacgttaggtctgtgcccggtctggatggatcgggatgggaagtgttcgacatttggaaactgttccgaaactttaagaactccgctcaactctgcctcgagctggaggcatgggaaagagggagagctgtggatcttaggggccttggttttgatagagccgcacggcaggtccatgagaaagcactgtttttggtgttcggaagaaccaagaaacgggatcttttcttcaacgaaatcaaggcacggtcaggtcaggatgataagaccgtgtacgaataccttttctctcagagaagaaagaggcgagctccactggcaacccgccaaggcaagcgaccttccaagaacctcaaagccagatgtagccgaaaggcactgcacgtgaactttaaggatatgggttgggatgattggattatcgccccactggagtatgaggctttccattgtgaagggctctgtgaatttcctcttcggtcccatctggaacctaccaaccacgcggtgatccaaacccttatgaattcgatggaccctgagtcgactccccctacttgttgtgtcccgacccgcctgtcaccaatttctattctgtttatagactcggccaacaatgtggtgtataagcagtacgaagatatggtcgtggagtcctgcggttgtaga

SEQ ID NO: 322045 - DNA, 1503 bp, Artificial Sequence
  derived and/or modified sequence
atgcggctgccaaagctgctcactttcctcctgtggtacttggcttggctcgacctggagttcatctgcaccgtgcttggagctccagatcttggccagcgccctcaaggaactagaccaggcctcgcaaaagccgaagccaaagaacggcccccacttgcgcggaacgtgtttcggcctggaggacatagctacggaggcggtgctaccaacgccaacgctagagccaaaggaggaaccgggcaaactggaggactgacccaacctaagaaggacgagccgaagaagttgcctccgaggccaggagggccggaaccgaagccgggccatccgccacagacccgccaagccactgcaagaaccgtgactccgaagggtcaactccccggaggcaaagctcctccgaaggccgggtcagtcccgtcatccttcctgctgaagaaggcccgcgagccaggacctccacgggaaccgaaggagccgttccgcccaccgccaatcactccgcacgagtacatgctctcactctaccgcaccctctcggacgcagatcggaaaggaggcaacagctctgtgaagctcgaggcgggactcgcaaataccatcacctcgtttatcgacaaaggtcaagatgatcgcggcccggtggtcagaaagcagagatacgtgttcgatatcagcgccctggaaaaagacggtctgctgggggccgaactgaggatcttgcggaagaagccttccgacaccgctaagcctgctgccccaggaggaggacgggctgcccagctgaagctgtcctcgtgcccgtcaggacggcagccggcatcccttctcgatgtgcgctcggtgccgggactggacggctccggatgggaagtgttcgacatctggaaactcttccggaactttaagaactcagcacagctctgcctggaacttgaagcgtgggagagaggccgggcggtggacctccgcgggctgggttttgacagagcagcccgccaagtgcacgaaaaagcactgtttctggtgtttggacgtactaaaaagagggatctgttcttcaacgaaatcaaagcccggtctggacaagatgacaagaccgtctacgaatacctcttctctcagaggagaaaacggcgggctccccttgcgacccgccaaggaaagaggccttcgaaaaatctgaaagcaagatgcagcaggaaggccctgcatgtgaactttaaggacatgggatgggatgactggatcatcgcaccgctcgagtacgaagccttccactgtgagggactgtgcgaattcccgcttcgctcacatcttgaacccactaaccacgcggtcattcagaccctgatgaatagcatggaccctgagtcgaccccgccgacctgctgtgtgccaacccgcctgtctccaatctcgatcctcttcatcgactccgctaacaatgtcgtctacaagcagtacgaggacatggtcgtggagtcctgcggctgtagg

SEQ ID NO: 322046 - DNA, 1503 bp, Artificial Sequence
  derived and/or modified sequence
atgcgcctgccgaagctgctcacctttctgctctggtacctggcatggctggatctggaattcatctgcaccgtgctgggagctccagacctgggtcaaagacctcagggaactcgcccgggactcgcaaaggctgaggcgaaagagcgcccgccgctggcgagaaacgtctttcgcccggggggccacagttacggaggcggtgccaccaacgcaaacgcccgagccaagggagggactggccagactgggggacttactcagccgaagaaagacgaaccaaagaaactgccaccgcgcccagggggcccggaaccaaagccaggacatccgccgcagacccgccaggccaccgcgcggactgtgaccccaaaaggccagctgccggggggaaaggccccaccaaaggccgggtcggtgccttcctcctttctgctgaagaaggcccgcgagccggggccgccgcgcgaaccgaaggaaccgttccggcctcctccaatcaccccgcatgagtacatgctctcactgtatcgcactctgtctgacgcagaccggaaaggcggaaactcgtccgtgaagctggaagcgggcctggccaacaccatcactagctttatcgataagggccaggacgaccggggccctgtggtgagaaaacagcgctacgtctttgatatcagcgccttggaaaaggacggtctgctcggtgcagagctgcgtatactcagaaaaaagccaagcgacaccgccaagcctgccgcgccgggtggaggaagagctgctcaactcaagctctcgtcctgtccttcgggacgccagccggcttccctgctcgacgtgagatcggttccgggactggacggctcggggtgggaagtctttgacatctggaaattgtttaggaactttaagaattcagcccagctgtgcctcgagctggaggcttgggaaaggggacgcgccgtggacttgcgggggttgggatttgatcgcgctgcgcgccaagtccacgagaaggcgctgttcctcgttttcggtcggacgaaaaaacgggacctgttcttcaacgagatcaaggcgcggagcggacaagatgacaaaacggtgtacgaatacctcttctcccaacgccggaagcgcagagcccccttggcaacgcgccagggaaaacggccgtcgaagaatcttaaggcacgatgcagccgcaaggcattgcatgtgaacttcaaggacatgggctgggacgactggattatcgccccgctggaatacgaggcttttcactgcgagggactctgtgagtttcccctccgctcgcacctggagccgaccaaccatgcagtcatccaaactctgatgaattcaatggacccggaatcgaccccgccgacctgctgcgtgccaactcggctgtccccgatctcgatccttttcatcgactcagcgaacaacgtggtgtacaagcagtacgaagatatggtggtcgaatcttgcggatgtcgc

SEQ ID NO: 322047 - DNA, 1503 bp, Artificial Sequence
  derived and/or modified sequence
atgcgcctgcccaagctcctcactttcctgctgtggtacctcgcttggctggacttggagttcatctgcacggtgctcggcgcacccgacctgggtcagcggccacagggaaccagacccggacttgcaaaagccgaggccaaggaaagaccgcccctggccagaaatgtctttcgtccgggaggacacagctacggtggcggcgctactaacgcgaacgcccgggctaagggagggaccggacagaccggcggcttgactcagcctaagaaggacgagccaaagaaacttccgccgcggcccggaggacccgagcctaagccaggacaccctccgcaaacccgccaagcaactgccagaactgtcaccccaaaaggacagctcccgggaggaaaggctccacccaaggccggttccgtgccatcgtcctttttgctgaagaaggcccgggaacccggcccgccacgagaacccaaagaacctttcaggccacccccaatcaccccccacgagtacatgctgtcactgtaccgcaccctgtccgacgccgacaggaagggaggtaacagctcggttaagttggaggctggcctggctaatacgatcacctccttcatcgacaaaggacaagacgataggggacctgtggtgcgtaagcagcgctacgtgttcgatatttcggcccttgaaaaggacggactcctgggggcggaactgcggatcctgagaaagaagccttcggataccgcgaaacctgcggcgccaggaggcggtagagccgcccaactgaaactttcgagctgcccgtcgggacgccagccggcgtccctgctcgacgtccgctcggtgccgggactcgatggttccggctgggaggtgttcgacatctggaagctgttccgcaatttcaaaaactcggcccagctctgtttggaacttgaggcttgggagcggggacgcgccgtagatctcaggggcctgggattcgaccgggcggcccggcaagtccacgagaaagctctgttcctggtgttcggccggactaagaagcgcgacctctttttcaacgaaatcaaagcccggtccggacaagatgataagacggtgtacgaatacctcttttcacagcgccgaaagagaagggcgccgctggccacccggcagggaaaacggccgtcaaagaacctcaaggcccggtgctcgaggaaggccctccacgttaacttcaaggacatgggctgggatgattggatcatcgccccccttgaatacgaggccttccactgcgaggggctgtgcgaattcccgctgcggtcccacctggaaccaaccaaccacgcggtgattcagactctcatgaactcaatggacccggaatcgactcctcctacctgttgcgtgccaactcggctgtcgcctatttcgattctctttattgactctgcgaacaacgtggtgtacaagcagtacgaggacatggtcgtcgaaagctgtgggtgccgg

SEQ ID NO: 322048 - DNA, 1503 bp, Artificial Sequence
  derived and/or modified sequence
atgcgcttgcccaagcttctgaccttccttctgtggtatctcgcatggcttgatcttgagttcatttgcactgttctgggtgcacccgatttaggccagaggccccagggcactaggcccgggttggcgaaggctgaggcaaaagagcgcccacccttagctagaaatgtgttccggcctggcgggcatagctatggtggcggtgctactaatgccaatgccagagctaaggggggcactgggcagaccggtgggttaacacagcccaagaaagacgaacctaagaagcttcccccacgtcccggagggccagagccaaagccaggacacccaccgcagacccggcaggcaaccgcccggactgtaactcctaaaggacaattgcctggggggaaagcccctcccaaggccgggtccgtgccctcttcctttttgctcaagaaggcccgtgagcccgggccaccacgcgagccaaaggagcccttcagacccccccccatcaccccacatgagtatatgctttcactgtaccggactttatccgacgccgacagaaaaggaggcaacagctccgtgaagttggaggcagggctcgccaacaccattactagtttcatcgataaaggccaggacgatagaggcccggtagtccggaagcagagatatgtgttcgacatctccgccctcgaaaaggatgggctgctcggagcagaactccgcatacttaggaagaaaccaagcgacacagctaagcccgctgccccggggggaggtagggcggctcagctgaagctttcttcatgtccaagcggaagacaacccgcgtccctgctggatgtgcgcagcgtgcccggccttgatgggtctggctgggaggtgtttgacatctggaagctgttccgaaatttcaagaactccgcacagctgtgcctcgagctggaggcgtgggaacgaggacgcgccgtagatctgagggggttgggtttcgatcgagcagctagacaggtgcacgagaaggccctttttcttgtgtttggaaggacaaagaagcgtgaccttttctttaatgagatcaaagctcgaagcggccaagacgacaagactgtttacgaatacctgttcagccagcggagaaagcggcgagctcctctcgcaactcggcagggtaaaaggccaagcaaaaatctgaaggctcggtgttcacggaaggcgttgcatgtgaatttcaaagatatgggttgggacgactggatcattgcacccctggagtatgaggcttttcattgtgagggcctgtgtgaatttccactccgatcccacttggagccaaccaaccatgcagtgatccagacactgatgaattcaatggatccagagtccactcctcctacatgttgtgtcccgaccaggttgagtccaatttccatcctgtttatcgatagtgccaacaacgtggtgtataaacagtacgaagacatggtagttgaaagttgtggctgcagg

SEQ ID NO: 322049 - DNA, 1503 bp, Artificial Sequence
  derived and/or modified sequence
atgcgtctcccaaagttgctgactttcctgctttggtacctcgcctggctggacctggagttcatttgtactgtactcggcgctccagacctgggccagagaccccaaggcacccgacccggtctcgctaaggcggaggctaaagaaagacctcctctcgcacggaatgtgtttcgtcccggtggccattcctatggcggaggcgccacaaatgcgaatgcccgtgccaagggggggaccggccagaccggcggcctcacacagcccaaaaaagatgaacctaaaaagctgcccccaagaccggggggtcccgagcccaagcccgggcatccaccccagactcgccaggccaccgcccgaacagtcaccccgaagggacagctccccggtgggaaggctccacccaaggccggatcggtccccagcagctttcttctgaagaaagcccgggaaccaggcccccccagggagccaaaagaaccattccgcccccctcccatcacacctcacgagtatatgctctcactgtatcgaaccctgagcgacgccgaccgtaagggcgggaacagctccgttaagttggaagctgggctggccaacaccattacctcattcatcgacaaaggacaggatgaccggggccccgttgtccgcaagcagcgatacgtgttcgatatcagtgcacttgagaaagacggcttgctcggtgccgaactgcgcatactgagaaagaagccaagcgacacagctaaacctgcagcaccaggcggcgggcgggctgcccagctgaaactctctagctgtccctccggaaggcagcccgcatccctcctggatgtgcgctctgttccagggctggacggaagcggatgggaggtctttgacatttggaagctgttccgcaacttcaagaacagtgcgcagctttgccttgagctcgaggcttgggagcggggcagagcagtcgacctgcgcgggctgggctttgaccgagctgccagacaggtgcatgagaaagcgctcttcctggtgttcggacggacaaagaagcgggacctgtttttcaatgagataaaagcccgctcagggcaggatgataagacggtgtacgagtacctcttctcccagagacgaaaaagacgtgctcccctggccacccgccaaggaaagagaccgtcaaagaacctgaaggccaggtgtagtagaaaggcactccacgtcaatttcaaggacatgggctgggatgattggatcatcgcccctttggaatacgaagcctttcactgcgagggattatgcgaattcccgcttaggagtcacctggagcctactaatcatgccgtaatccagaccctgatgaactccatggaccccgagtccacgccacccacatgttgcgttcctactcggctgtcaccaatatctatcctcttcatcgactccgccaataatgtcgtttacaagcagtacgaggacatggtggtcgagtcgtgcggctgccga

SEQ ID NO: 322050 - DNA, 1503 bp, Artificial Sequence
  derived and/or modified sequence
atgcggctgccgaaactgttgaccttcctgctgtggtatctcgcctggcttgatctggagttcatctgtactgtgctcggcgccccagacttgggacagcgaccacaaggcactcgcccgggactggcaaaggcggaggcaaaagaacggcctcccctcgcaaggaatgtgttccgtcccgggggtcattcatacggaggaggcgcaaccaatgcaaacgcccgggccaagggcggaaccggtcagaccggtggactgacgcagccgaagaaggacgaaccaaaaaagctgccaccgcgcccgggaggaccagagccaaagccaggacatccgccccagacccggcaagctacggcgcggactgtcacgccgaagggacagctgccgggtgggaaggctccgccaaaagctggcagtgtgccttccagctttctcctcaagaaagcgagagagccgggaccgccccgcgaaccgaaagaaccattccgccctccgcctatcactccgcacgagtacatgctttcgctttatcgcactctctccgacgccgatcggaagggcgggaactcttctgttaagctcgaagccggtctggcaaacaccattacttccttcattgataagggacaagatgaccgcgggccggtcgtgcggaagcagcgctacgtgtttgacatctccgcgctggagaaggacggcctgctgggagctgaactgcgcatcctgcgcaagaagccttcggacaccgcaaagccggctgcaccgggaggcggacgggctgcccagctcaaactgtcgtcgtgtccatccggtcggcagcctgccagcctcctcgacgttagatcggtgcctgggctcgacggttcaggctgggaagtgttcgatatctggaaacttttcagaaacttcaagaattccgctcagctctgcttggaactcgaggcctgggaaagaggccgagccgtcgatctgaggggactgggatttgacagggcggcgcgccaagtacacgagaaggcattgtttctggtgttcggacggaccaaaaagcgcgatctctttttcaatgagatcaaggccaggagcggacaggacgacaaaaccgtgtacgagtacctcttctcgcagcgccgtaagaggagagccccgttggctactcgtcaaggaaagcggccttccaagaatttgaaggcgcgttgttcacggaaggccctgcatgttaacttcaaggatatggggtgggacgattggattatcgcaccgctggaatatgaagcgttccactgcgaagggctgtgcgagtttccacttcgctcgcacctcgaacccactaaccatgccgtaatacagacgcttatgaacagcatggacccagagtcaacccctccgacctgctgcgtgcccaccaggttgtccccaatcagcatcctgttcatcgattccgccaacaacgtggtgtacaaacaatacgaggacatggtcgtggaaagctgcggctgccgg

SEQ ID NO: 322051 - DNA, 1503 bp, Artificial Sequence
  derived and/or modified sequence
atgaggctccccaagctgctgaccttcctgttgtggtacctggcgtggttggacctggagttcatctgcaccgtgctgggtgcgccggacctgggacaacgccctcaaggaacccgcccaggactggccaaggccgaggccaaggaacgccctccactggcacggaacgtattcagaccgggcggacactcctacggcggaggcgccactaatgctaacgccagggcgaaaggcgggactggacagacgggaggcctgacccagccgaagaaggacgagccaaagaagctgcctccacgcccaggcggaccggaaccaaagccaggccatccaccccaaacccgccaagcaactgcccgcacggtgactccgaagggccagctgccaggtggaaaagccccgccaaaggccggctcagtgccctcatcattcctcctgaagaaagcccgcgagccgggcccgccgcgcgaaccgaaagaaccgtttcgccctccaccaatcactccacatgaatacatgttgtcgctctaccgcaccctctccgacgccgaccgcaagggagggaattcctccgtgaagctggaagctggacttgctaacaccatcactagcttcatcgacaagggccaggatgatagaggcccggtggtgaggaagcagagatacgttttcgatatctcagcgttggaaaaggatggacttctgggggccgagctccgcattctccgcaagaagccgtcggacaccgcaaagccagcggcccccggcggagggcgcgccgcccagctcaagctctcgtcatgcccatcagggcggcagcctgcctccctcctggacgtccgatcggtgcccggattggacggctccggatgggaagtgtttgacatctggaaattgttcagaaacttcaagaattcagcacaactgtgtctggaactggaggcttgggaaaggggacgcgcggtcgacctccggggactgggcttcgatcgggcagcccggcaggtccacgaaaaggccctttttctggtgtttggacggaccaagaaacgggacctcttcttcaacgagatcaaggcacggtcaggacaggatgacaagactgtgtacgagtacctgttttcgcagcggaggaaacgcagagcgccgctggcgactcgccagggcaagaggccgtcaaagaatctgaaggcacgctgtagccggaaggcgttgcacgtcaatttcaaggacatgggctgggatgactggattattgctccgctggaatacgaagcgttccactgtgaaggcttgtgcgaattcccgctgcgctcccacttggagccgactaaccatgctgtcatccagaccctcatgaattcgatggatccagaatcgactccgcccacttgctgcgtgcctacccggctgagcccgatttcgatcctcttcatcgactccgcgaataacgtggtgtataaacaatacgaagatatggttgtggaatcctgcggatgcaga

SEQ ID NO: 322052 - DNA, 1503 bp, Artificial Sequence
  derived and/or modified sequence
atgagacttccgaaattgctgacctttttgctttggtaccttgcttggcttgatctggagttcatctgcaccgtccttggggcccccgacttgggtcaaaggcctcagggaacccggcccggacttgcaaaagcagaagcaaaggaaagacccccactggcacgaaatgtgtttcggcctggtggtcattcctacggcggcggggcgactaacgccaacgccagagccaagggagggaccggccagactggtgggctgacccagccaaagaaggacgaacccaagaagttgccacccagacccggaggtccagaaccaaagccaggacatccccctcagacccgacaggcaaccgcaagaaccgtcactcctaagggccaactcccaggagggaaggcacctccaaaggctgggtcggtcccttcctccttcctcctgaagaaagccagagaaccaggacctccacgggagcccaaggaacctttccgccccccacctattactccacacgagtacatgctgagcctgtaccgcaccctgtccgatgcagatagaaaaggtggtaattcgtcggtgaaactggaagctggtctggcaaacactatcacttcgttcattgacaagggacaagatgataggggacctgtggtcagaaagcagagatacgtgttcgatataagcgcgctggagaaggatgggctgctgggagctgagctgcggatcctgagaaagaaaccatccgatacggccaagcctgctgcaccaggcggagggagagcggcacaacttaaactgtcctcctgtccttccgggcggcagccagcgtcgctcctcgatgtgagaagcgtgcctggacttgacgggtccggatgggaagtgtttgatatatggaaactttttcgcaacttcaagaattcggcacaactgtgcctggaactggaggcgtgggagagagggcgcgctgtcgatcttagaggactgggctttgatcgtgcagcaagacaagtccatgaaaaggccctctttctggtgtttggtcgtactaagaaaagagatctgtttttcaacgaaatcaaagcacgttcaggccaggacgataagacggtgtatgaataccttttttcgcaaagaaggaaacgtagggcaccccttgcaacccggcaaggcaagcgcccatctaagaacctgaaggcacggtgttcaagaaaagcgctgcacgtgaactttaaggacatgggttgggatgactggatcattgcacctctcgaatacgaagcatttcattgtgaaggtttgtgtgaattccctttgagatcgcatctcgaacccaccaaccatgcagtgatccagaccctgatgaactcgatggatcctgagtcgaccccgccgacctgttgcgtgcctactcgactgagccctatttcaattcttttcatcgattcggcgaataatgtggtgtacaagcagtacgaagatatggtggtcgagtcgtgcgggtgtagg

SEQ ID NO: 322053 - DNA, 1503 bp, Artificial Sequence
  derived and/or modified sequence
atgcgactacccaaactactgactttccttctctggtaccttgcttggttagatctcgagttcatctgtaccgtccttggtgctccagacctgggccaacgacctcaagggacgaggcctggtttggcgaaggccgaggccaaggaacggccgccgctcgcgcgcaatgtatttcgccccggtggtcacagttacgggggcggcgcaaccaacgcgaatgcaagagcaaagggcggaacaggtcaaactggcggacttactcagcccaagaaagacgagcccaagaagctacccccgagacccggaggtcccgagccgaagccgggccatcctcctcaaactcgccaagcgaccgcccgcacggttacacctaagggacaactccccggcgggaaggctccccccaaagcaggtagcgtgccttcttcgttcctcctgaagaaagcacgcgaaccaggcccgccgcgcgaacccaaggagccctttcggccgcccccgattactccccacgaatatatgctaagcctctatcgtacgctctccgatgcggacaggaagggaggcaactcttctgttaaacttgaggcaggacttgccaataccatcacgagtttcatcgacaagggccaagatgatcgaggccctgtcgtccggaagcagcgctatgtttttgacatatcagctttggagaaggacggtctcctcggcgccgaactcagaatattacgcaaaaagccatcggataccgcgaaacccgctgcacctggagggggccgtgctgcacaactcaagctaagttcttgcccgtcggggcggcagcctgcatcgcttctagatgtcagatctgttccggggctagatgggagcggttgggaagttttcgacatctggaagttgttccgtaattttaagaattctgctcaactttgcctggaattggaagcgtgggagagggggagggccgtcgatctcagaggtctgggattcgatcgagcggcgcgacaggttcatgagaaggctctttttctggtattcggtcggactaagaaaagggacctcttctttaacgagataaaggcccgctctggtcaggatgataagactgtgtatgagtatctgttctcccagcggagaaagagacgagcaccactcgcaacacgtcagggtaaaagaccgagtaagaatctaaaagctcggtgctctcgaaaagccttgcacgttaacttcaaggatatgggatgggacgactggataatcgcaccgctcgaatacgaggctttccactgtgaaggcctttgtgaattccccttgcgttctcacctagaaccgaccaatcacgcagttatccagacactaatgaactccatggacccggagagcactccgccaacatgttgtgtccctacaaggttatctccaatatccatactcttcattgattctgccaataacgtggtctacaaacaatacgaggacatggtcgtcgaatcatgcggctgccga

SEQ ID NO: 322054 - DNA, 1503 bp, Artificial Sequence
  derived and/or modified sequence
atgcgattaccgaaattattaacgtttttattatggtatttagcgtggttagatctagaatttatatgtacggttttaggtgcgccggatctaggtcaacgtccgcaaggtacgcgaccgggtctagcgaaagcggaagcgaaagaacgtccgccgctagcgcgtaatgtttttcgtccgggtggtcattcgtatggtggtggtgcgacgaatgcgaatgcgcgtgcgaaaggtggtacgggtcaaacgggtggtttaacgcaaccgaaaaaagatgaaccgaaaaaattaccgccgcgtccgggtggtccggaaccgaaaccgggtcatccgccgcaaacgcgtcaagcgacggcgcgtacggtaacgccgaaaggtcaactaccgggtggtaaagcgccgccgaaagcgggttcggttccgtcgtcgtttctactaaaaaaagcgcgagaaccgggtccgccgcgagaaccgaaagaaccgtttcgaccgccgccgataacgccgcatgaatatatgttatcgttatatcgtacgttatcggatgcggatcgaaaaggtggtaattcgtcggtaaaattagaagcgggtttagcgaatacgataacgtcgtttatagataaaggtcaagatgatcgaggtccggtagtacgaaaacaacgttatgtatttgatatatcggcgctagaaaaagatggtttactaggtgcggaactacgtatattacgaaaaaaaccgtcggatacggcgaaaccggcggcgccgggtggtggtcgtgcggcgcaactaaaactatcgtcgtgtccgtcgggtcgacaaccggcgtcgttattagatgttcgttcggttccgggtttagatggttcgggttgggaagtatttgatatatggaaattatttcgaaattttaaaaattcggcgcaactatgtttagaattagaagcgtgggaacgaggtcgagcggttgatttacgtggtctaggttttgatcgtgcggcgcgtcaagttcatgaaaaagcgttatttttagtatttggtcgtacgaaaaaacgtgatctattttttaatgaaataaaagcgcgttcgggtcaagatgataaaacggtatatgaatatttattttcgcaacgtcgtaaacgacgagcgccgctagcgacgcgtcaaggtaaacgtccgtcgaaaaatctaaaagcgcgatgttcgcgaaaagcgctacatgtaaattttaaagatatgggttgggatgattggataatagcgccgctagaatatgaagcgtttcattgtgaaggtctatgtgaatttccgttacgttcgcatttagaaccgacgaatcatgcggtaatacaaacgttaatgaattcgatggatccggaatcgacgccgccgacgtgttgtgttccgacgcgtttatcgccgatatcgatactatttatagattcggcgaataatgtagtttataaacaatatgaagatatggttgtagaatcgtgtggttgtcgt

SEQ ID NO: 322055 - DNA, 1503 bp, Artificial Sequence
  derived and/or modified sequence
atgcggctgccaaagctcctcacttttcttctgtggtacctggcttggctcgatttggaatttatatgcaccgtgctgggagctccagatctgggacagcggccccagggcacgagacctggactcgccaaagcagaggcaaaggagaggcctccactggctcgcaacgtgtttaggccgggggggcactcctacggcggtggcgcgaccaatgctaatgcacgcgctaaggggggaactggccagaccggtggactgacacagccaaagaaggacgagcccaagaagctccccccaaggccaggtggacccgagccaaagcccggccaccctccccagacaaggcaggccactgctcggacagtgacaccaaagggacaactccccggcggaaaagctccccctaaggctggaagcgtaccctctagcttcttgctgaaaaaagcccgagagcccggcccccctcgcgaacccaaggaaccctttcgtcctcctcctattaccccccatgaatacatgctctcgctgtatcgcacactatccgatgccgatcggaaaggggggaattccagtgtgaaactggaagcaggcctcgctaacaccatcaccagttttatcgacaaaggccaggacgatcggggccccgtggtgcgaaaacaacgctacgtgttcgacatctctgctctggagaaggatggcttactgggagcagagttgagaatcctcagaaagaaaccttctgatactgcaaagcccgccgccccaggcggggggcgtgctgcacaactgaaattatcatcttgccctagcggccgacagcccgcctcactattagatgtgcggagcgtgcctggacttgacgggagtggctgggaggtcttcgacatctggaaactttttagaaactttaagaacagcgcgcagctgtgtttggagctagaggcttgggaacgaggaagagctgtcgacttacgcggactgggtttcgatagagccgcacgccaagtgcacgaaaaagccctgttcttggtgtttggccggacgaagaaaagagacctcttctttaacgagattaaagctagaagcggacaagatgataagaccgtgtatgagtatctattctcacagagacggaagagacgggcacctctggccacaaggcagggaaaacgtccgagtaagaatctgaaagctcgctgtagcaggaaagctctgcacgtaaattttaaggacatgggatgggacgactggatcatcgctccgctggaatacgaggccttccattgtgagggcctatgtgagttcccactccggtcgcacctagagccaacaaaccatgccgtgattcagactcttatgaattccatggatcccgagtccacacctcctacttgttgtgttcctaccagattgtcccccatttccatcttgtttatcgactccgctaataacgttgtttacaagcagtacgaagatatggtggtcgagtcttgtggctgcaga

SEQ ID NO: 322056 - DNA, 1503 bp, Artificial Sequence
  derived and/or modified sequence
atgcggctgccgaagctcctgactttccttctgtggtacctcgcctggctggatctggagtttatctgcacggtgcttggtgcgcccgaccttggccagaggccacagggtacccgcccgggccttgccaaggctgaagctaaggagaggccgccgctggcccgcaatgtgttcagaccaggaggacactcctacggaggaggtgcgactaacgccaatgcccgcgctaaggggggaactgggcaaaccggaggactcactcaaccaaagaaggacgaaccaaagaagctgccgccccgccccgggggaccggaaccgaagccgggacaccctccgcagactaggcaggccaccgcccgcaccgtgacccctaagggtcaactcccggggggaaaagctcctcctaaggcggggtcggtgccttcctcattccttctgaaaaaggcccgcgaaccgggacctccccgcgaaccaaaagaacccttcagacccccaccgattactccgcacgaatacatgctgtcgttgtatcgcactctgtccgatgcagatagaaaaggcggaaattctagcgtgaaactggaagcgggactcgctaataccataacttcctttattgataagggacaagacgataggggtcccgtggtccggaaacaacgctacgtgttcgacatctcggccctcgaaaaggacggcctgctgggagcggaattgcggatcctgagaaaaaagccgtctgataccgccaagccggcggcaccaggaggtggtcgggccgcccagttgaagctctcgtcgtgtccgtcgggcaggcagccagcgtcgctgctcgatgtgcgcagcgtcccggggctggacggctcaggttgggaagtgttcgatatctggaaactgtttaggaatttcaagaactcagctcagctgtgcctcgagctcgaagcatgggaaaggggacgcgccgtggacctgcggggattggggttcgacagagccgcgcgacaggtgcacgaaaaagctctcttcctcgtattcgggcggaccaaaaagcgggatttgttcttcaacgagatcaaagcgcgctcaggtcaggacgacaagaccgtgtacgaatacctgtttagccaaagacgcaagaggagagctccgctggctactaggcagggcaagcggccttcgaaaaatcttaaggcccggtgcagccggaaggccctgcacgtcaatttcaaggacatgggctgggacgattggatcatcgccccacttgagtacgaggccttccactgcgagggactgtgcgaattcccgctgcgatcacacctggagccaaccaatcatgcggttatccagactctgatgaactccatggaccctgaatcaactccaccgacctgctgcgtgccgacccggctgagcccgatctccattctgttcatcgacagtgccaacaatgtggtctacaagcagtacgaggacatggtggtggagtcgtgcggttgccgg

SEQ ID NO: 322057 - DNA, 1503 bp, Artificial Sequence
  derived and/or modified sequence
atgcgcctgcctaagctgctcactttcctgttgtggtacttggcttggttggaccttgagttcatctgcaccgtgctcggcgcccccgacctcggacagcgcccgcaaggaaccagaccgggactggcaaaggcagaggcaaaggagcggccgccgctggctcggaacgtgtttcggccgggaggacacagctacggcggaggggctactaatgctaacgcgagagcgaagggcggcaccggccaaactggcggactcacccaaccgaagaaggacgaaccaaagaaactgccaccccggccgggaggtccggagccgaagccgggacaccccccacagacgcggcaggcaactgctaggactgtcaccccgaagggccagctccctggcggcaaggctccaccgaaggctggctccgtgccatcgtctttcttgttgaaaaaggccagggaacctggacctccacgggagcctaaagagccgttccgaccgcctccgattactccacacgagtatatgctgtccttgtacagaactctctcggacgcggacaggaagggaggaaattcaagcgtgaagctcgaagccgggctggccaacacgattacgtccttcatcgataagggccaggatgaccggggaccagtggttcggaagcagaggtacgtgtttgacatctcggcgctcgaaaaggatggactgctgggagccgagctgcgcatcttgcggaagaagccgagcgacactgcgaaacccgccgcacctggaggcggaagggccgcgcagctcaaactgagcagctgcccatcgggacgccaaccagcctcgctgctcgatgtgcgctccgtcccgggcttggacggttctggctgggaagtgttcgacatctggaagctcttcagaaatttcaaaaactcggcacagctctgcctcgaactggaagcatgggagcgaggacgggcggttgatctgagaggactgggcttcgaccgggcagcgcggcaggtccacgaaaaggccctgtttctcgtgtttgggcggactaagaaacgcgacctcttcttcaacgagatcaaagctagatccggtcaagatgataagaccgtctacgagtacctttttagccagcggcgcaaacgacgagctcctcttgctactcgccaaggaaagcgaccctccaagaatctgaaggcccggtgtagccgcaaggccctgcatgtcaactttaaggatatgggatgggatgactggatcattgcacccctggaatacgaggcattccactgcgaaggactgtgcgaatttcctctgcgctcgcaccttgaacctacgaatcatgccgtcatccaaacgctgatgaatagcatggatccggagagcaccccaccgacttgctgcgtgccgacccggctcagcccgatcagcatcctgttcatcgactccgcgaataacgtggtgtacaagcagtacgaggacatggtggtcgaatcgtgcgggtgccgc

SEQ ID NO: 322058 - DNA, 1503 bp, Artificial Sequence
  derived and/or modified sequence
atgcgtttgccgaagctgctgacttttctgctttggtacctcgcgtggctcgacctcgagttcatctgcactgtgctcggggcgccggacctgggacaacgcccgcagggcacgcggccagggctcgccaaggcagaagccaaagagcggccgccactggcacgcaacgtgttccgtccaggagggcattcgtacgggggaggcgcgactaacgcaaatgcgcgggccaagggagggaccggacaaacgggcggactcactcagcccaagaaggacgaacctaaaaagttgcccccgcggccgggcggtccggaaccgaaaccaggtcacccgccccaaactcggcaagccactgcacgaactgtgactccgaagggtcagttgccgggcggcaaggccccgcccaaggccggaagcgtcccgagctcatttctgctcaagaaggcacgggagccaggccctcctcgcgagcctaaggagccattcagaccgcccccaataaccccccacgaatacatgctctcgctgtaccggaccctgtcagacgctgacagaaagggaggtaattcatccgtcaaactggaagccggtttggccaataccatcacctccttcatcgacaaaggccaggatgacagagggcccgtagtcaggaagcaaagatacgtgttcgatatcagcgcgctggagaaggacggactcttgggtgctgaactgaggatcctgcgcaaaaaaccgtcggacaccgcaaagcctgccgcacctggaggcggaagggccgcccagcttaagctctcctcgtgcccgtcgggacgacaaccggcgtcattgctcgacgtgcgatcggtgccaggtctggacggatctggatgggaggtgttcgatatttggaagctgtttaggaacttcaagaacagtgcgcagctgtgtctcgaattggaagcctgggagcgggggcgggcggtggatcttcgcggtctgggattcgatcgcgcagcccgccaggtgcacgagaaggccttgttccttgtgtttggacgcacgaagaaacgagatctctttttcaatgaaatcaaagcacggagcggacaagacgacaaaaccgtgtacgaatatctcttctcccagcgccgcaagaggcgcgccccgctggcgacccgccagggaaaacgaccttccaaaaacctgaaagcgagatgcagccggaaggctcttcatgttaactttaaggatatgggatgggacgactggatcatcgcacctctggagtacgaggcgttccactgcgaaggcctctgcgaattcccactgcgcagtcacctcgaaccgaccaaccatgccgtgatccagaccctgatgaattcaatggatcctgaatcgactccgcctacctgctgcgtgccgacccggctgtcccccattagcatcctcttcattgattccgccaacaacgtcgtatacaagcagtacgaggatatggtcgtggaatcatgtggttgtagg

SEQ ID NO: 322059 - DNA, 1503 bp, Artificial Sequence
  derived and/or modified sequence
atgcgacttccaaaactcttaacttttctgttatggtatttggcgtggttagatctggagtttatctgcacggtgttaggggcaccagatttgggacagcggccacaaggcacaagaccgggcctggctaaagctgaagcgaaagaacggccgcctctggctaggaatgtcttccggccaggtggtcacagttatggaggtggggcgaccaatgcgaacgctcgcgctaaaggcggcacagggcagacaggcggtctcacacaaccaaaaaaagacgaacctaagaaacttcctccacggcctggcggaccagagccgaaacccggacaccctccgcaaacacgacaagcaacagcacgaactgttaccccgaaggggcaacttcctggggggaaagcaccgccgaaggcggggagcgttccaagctcgttcttattaaaaaaagctagagagccggggccgccgagagaacctaaagaaccatttaggccgccccctatcacaccgcatgaatatatgttgagcctttatcggacattgtcagacgccgatcggaaaggcggcaactcttctgtgaaattagaagcgggactagctaacacgattacatcatttattgataaggggcaagatgatcggggcccggtcgtgcgcaaacaacggtatgtcttcgatatttccgcactggaaaaagacgggttattgggagcggaacttcgaatcctgcgtaaaaaaccgagcgacacagccaagcctgcagcgcctggcggtggacgggctgcacagttaaaattgtcaagctgcccgagcgggcgtcaaccggcgtccctgcttgatgttaggtccgtgccgggcttggacggatctgggtgggaagtctttgacatttggaaattattccgaaattttaaaaactctgctcagctgtgcttagaacttgaggcttgggagcgcggtcgagcggtggacctacggggattagggtttgatcgcgccgccagacaagtacatgagaaggccctgttcttagtctttggacgtacgaaaaaaagagacctgttttttaatgaaattaaagcgcgatcaggccaggacgacaaaacagtgtatgaatatttgttttcacagcgaagaaagcgtagggccccgctggcgacgcgccaaggaaagagaccgagcaagaatttgaaagcaagatgttcacggaaagccttgcacgtgaacttcaaagatatgggctgggatgactggattatcgctccgttagaatatgaagctttccattgtgaaggcttatgtgagtttccgctgcgctcacatcttgaaccgacaaaccatgcggtaatccagacactaatgaattcaatggatcctgaaagtacgcctcctacttgttgcgttccaacaagattgtcgccgatttctatcctgtttattgactccgcgaataatgttgtttataaacagtacgaagatatggttgtagagagctgtggatgtaga

SEQ ID NO: 322060 - DNA, 1503 bp, Artificial Sequence
  derived and/or modified sequence
atgcgtttaccaaaattacttacatttctattgtggtatttagcctggcttgatttagaatttatttgtacagtattgggtgcacctgaccttgggcaaagaccacaaggaactaggcctggattagcaaaagcagaagctaaggaaagaccaccattagcaagaaatgtgttcagaccaggtggacatagttatggaggaggagctacaaatgcaaatgcacgtgctaagggaggaacaggacaaactggtggtttaacacaaccaaaaaaagatgaaccaaaaaaacttcctcctagaccaggagggccagaacctaaaccaggacacccaccacaaactagacaagcaacagcacgaacagtaactccaaaaggtcaacttcctggaggaaaagctccacctaaggctggatccgtaccatcatcatttttgttaaagaaagcaagagaaccaggaccacctagagaaccaaaagagccatttagaccaccacctattacaccacacgagtatatgttaagtttatatcgtacattaagtgatgcagatagaaaaggaggtaactcttctgttaaattagaagctggacttgctaatacaattactagttttattgataaaggacaagatgatcgtggtccagttgttagaaaacagcgttacgtttttgatattagtgcacttgagaaggatggattacttggagctgagcttagaattcttagaaaaaaaccatctgacactgcaaaaccagctgcaccaggtggaggaagagcagcacaacttaaacttagttcttgtccatcaggaagacaaccagcttcacttcttgatgtccgatcagttccaggacttgatggtagtggatgggaagtttttgatatttggaaacttttccgtaactttaaaaatagtgctcaattatgtttagaattagaagcatgggaaagaggaagagcagttgacttaagaggacttggttttgatagagcagcacgtcaagttcatgaaaaggccctttttttagtattcggaagaacaaagaaaagagacttattcttcaatgaaattaaagccagatctggacaagatgataaaacagtttatgaatatcttttttcccaaagaagaaaaagaagagcaccacttgcaactcgtcaaggtaaaaggccatcaaaaaatttaaaggctagatgttctaggaaggctttacatgttaattttaaagatatgggatgggatgactggattattgctccacttgaatatgaagcttttcattgtgaaggactttgtgaattcccactaagatcacatttagaaccaactaaccacgcagttattcaaactttaatgaattcaatggatccagaaagtactccaccaacttgctgtgttccaactcgtttgtctcctatttcaattttatttattgattcagctaataacgtagtttacaaacaatatgaagatatggtcgtagaatcatgtggttgtaga

SEQ ID NO: 322061 - DNA, 1503 bp, Artificial Sequence
  derived and/or modified sequence
atgcggcttccgaaattgttgacgtttctgctttggtatttggcctggcttgacctcgaattcatttgcacggtcctgggcgcacctgatctgggtcaaagaccccaaggtacccgacctggtctggcaaaagcggaggcgaaagaaagacctccacttgcaaggaacgtttttagaccaggaggacactcatacggtggaggggcaacgaatgccaatgcacgagcaaaaggaggaaccggccaaactggtggtctgactcagccaaagaaggacgaacctaagaaacttccgcctagacccggaggtcccgaacctaagcccggacatccaccccagaccaggcaggccactgcaaggaccgtgaccccgaaaggacaattgcccgggggaaaggcgcctcctaaggcggggtcagtcccttcatcctttttgctgaagaaggcacgcgaacctgggccacctcgggaaccaaaagagccgttcagacctccccctatcaccccacatgaatacatgttgtcattgtaccggaccctcagcgacgcagataggaagggtggtaacagctcggtgaagctggaagctggcctcgcaaacaccattacttccttcatagataagggtcaagatgatcgcgggcctgtcgttcgcaaacaacggtacgtgtttgacatttcggcactcgaaaaggatggacttctcggagccgaactgagaatccttcgaaagaagcctagcgatactgcaaagccagccgcacctggtggcggccgcgctgcacaactcaagctgtcgtcatgcccgtcgggcagacaacccgcctccctgctcgatgtcagatccgtgccaggacttgacggcagcggttgggaagtatttgatatttggaagctctttcgtaacttcaagaattcggcacaactgtgccttgaattggaagcgtgggaacgcggacgggccgtcgacctgcgcgggctgggttttgatagggcagccaggcaagtgcatgagaaagcactgtttctggtctttggcagaaccaagaagagagatctcttctttaatgagatcaaggcccggtcaggacaagatgacaagaccgtctacgagtaccttttcagccagcgccgtaaaaggcgagccccacttgcgaccagacagggtaagcgtccgtccaaaaacctgaaagcacgctgtagcagaaaggccctgcatgtgaacttcaaagacatgggatgggatgactggatcattgctcctcttgagtacgaggcatttcactgtgaaggactttgcgaattccccctgaggtcacatctcgagccaacgaaccacgcagtgatccagactcttatgaactccatggatccagaatccactccaccgacttgttgtgtccctacgaggctttcaccaattagcatcttgtttattgactcagcaaataacgtcgtctacaagcagtacgaggacatggtcgtggaatcgtgcggatgccgc

SEQ ID NO: 322062 - DNA, 1503 bp, Artificial Sequence
  derived and/or modified sequence
atgcggctgcccaaactgctcacctttcttctttggtatctggcgtggcttgacctggagttcatatgtaccgttcttggagctcctgatcttggccaaagacctcaggggacgcgccccgggctggcaaaggcggaggccaaagaaagaccaccattggccaggaacgtgttccgtcctggcggccattcctacggtgggggtgccactaacgcgaatgcaagggcaaagggtggtacgggtcagactgggggacttacccaaccaaagaaggacgaaccgaagaaactgccacctagacctggagggcccgaacctaagcccggacatccacctcaaactcgtcaggccactgcacggaccgtcactcccaaggggcagttgccgggaggaaaagcgcctcccaaggccggttccgtcccgtcctcatttctgcttaagaaggcaagggaaccaggacctccacgggaacctaaggaacctttccgccctccacccattacccctcacgagtacatgttgtccctttacaggactctgagcgacgcagatcgcaagggaggcaactcgtccgtaaaacttgaagcagggcttgctaacaccatcacgagctttatagataagggacaggatgatagggggcctgttgtcagaaaacaacgatacgtttttgacattagcgcattggaaaaggatggtctgcttggtgcagagttgcggattctccgcaaaaagccctcggacactgcaaaaccggcagccccaggagggggtcgagcagcacaacttaagctctcatcgtgtccttcagggcggcaacctgcttcgctgctggatgtgcggtccgtcccaggtctggacggctcgggatgggaagtgtttgatatctggaaacttttccgcaactttaagaattcggctcagctgtgccttgagctcgaagcatgggaaagagggagagcagtggacctcaggggtcttggattcgatcgggccgcaagacaggtccacgaaaaggcattgtttctcgtgtttggtagaaccaagaagagggacctgtttttcaacgagattaaggcgcgctccggccaagatgacaaaactgtttatgaatacctgttttcgcaaagacgcaagaggagggctcctctcgccacgagacaggggaagcgtccatcgaagaaccttaaagcgagatgctcgaggaaggcgcttcatgtgaactttaaggacatgggatgggacgattggattatcgcacctcttgaatatgaagcatttcattgcgaaggtctttgtgagtttcctctcagatctcatctggagcctactaatcacgcagtgattcaaacccttatgaactccatggatcccgaatcgacgcccccaacctgctgtgtgcctacccgtctctcgcctattagcattctgtttattgactcggccaataacgtggtgtacaaacaatacgaggacatggtggtcgagtcatgcggatgtcgc

SEQ ID NO: 322063 - DNA, 1503 bp, Artificial Sequence
  derived and/or modified sequence
atgcggctgccaaaactccttacctttctcctgtggtacttggcctggctggatctggaattcatttgtactgttctcggagcacctgatctcggacagcgtccacaaggaactcggcctgggctcgccaaggccgaagcaaaggaacggccaccacttgcccggaatgtgtttcggccaggaggtcattcgtatggcggcggagccacgaacgccaatgccagagcaaaggggggaacgggacaaactgggggccttacccaacctaagaaagatgagcctaagaagctcccgcctcgacctggtggtccagagccaaaacctggtcaccctccccaaacccgacaggctacggctagaaccgttacccccaaagggcagcttcctggtggtaaggcacccccgaaagcggggtcggttccaagctcttttcttctgaagaaggctcgggaaccaggacctccacgtgagcctaaggaaccgtttcgcccacctccaataactcctcacgagtacatgctgtccttgtaccgaacccttagcgatgccgataggaagggtggtaactcgtcggtgaagctggaagcaggcctggcgaacacgatcactagctttatagataagggccaagatgatcgcggtccggtggtacgtaaacaaagatatgtttttgacatcagcgcgcttgagaaggacggccttctgggagcggagcttagaattttgagaaagaagccctccgatacggccaaacctgcagcacccgggggcgggcgggcggcacagctgaaactttcatcatgcccttcaggaaggcagccagcaagcctgcttgacgtgcggtcagtgcctgggctggatggaagcggttgggaagtctttgatatatggaagctgtttcgcaatttcaagaactccgcccagctttgtcttgaactggaagcgtgggagcgtggcagggccgtggatcttagaggactcggattcgaccgagcagcaagacaagtccatgaaaaagcactctttctggtgtttggaagaacgaaaaagagagacttgttctttaacgagataaaggcacggtccggccaagacgacaagaccgtgtacgagtacctgttttcacaaagaagaaaaagacgtgcaccgcttgcaacccggcagggaaagcggccatcaaagaacctgaaggctcggtgcagccgaaaggccctccacgtcaacttcaaagacatgggatgggatgactggattattgcacctctggaatacgaggcatttcattgcgaaggactgtgtgaatttccactcagaagccatcttgaaccaactaaccatgcagtcatacagaccttgatgaactctatggatccagagtcgaccccacctacctgttgcgtccccaccagactctcacctatttcaatcctgttcattgattccgccaataatgtggtctacaaacagtacgaagatatggtggtggaatcgtgtggttgtcgc

SEQ ID NO: 322064 - DNA, 1503 bp, Artificial Sequence
  derived and/or modified sequence
atgcgcctgcctaagctcctcacgttcctgctgtggtacttggcatggctcgacctcgaatttatctgtaccgtactcggcgcccccgacctgggacagcgcccccaaggaaccaggcccggacttgccaaagctgaggccaaggaaagacctcctttggcacgcaacgtgtttagaccaggaggccattcttacggcggtggagccactaatgcaaatgcacgcgcaaagggtggtaccggccagactggcggactcacccagcccaaaaaggacgagcccaagaagctgcctcctagacccggaggccctgaacctaaacctggacatcctccccagaccaggcaagccacagccagaacagtgaccccaaagggacagctccccggaggcaaggcacccccaaaggctggatccgtgccttctagttttcttctcaagaaggctcgcgaaccaggaccaccccgcgaaccgaaggaaccattcaggccaccaccaattaccccacatgagtacatgctctccctgtaccgcacactgtctgacgccgaccgcaagggcggaaattctagcgtcaagcttgaagccggacttgccaataccataaccagcttcatagataagggccaagacgatagaggaccggttgtaaggaaacagcgctacgtattcgacatctctgcgttggagaaggacggtctgttgggagccgagcttagaatcctcagaaaaaagcctagtgacaccgccaaaccagctgcgcctggaggtggacgcgcagcccagctcaagcttagctcctgtccttccggtaggcagccagctagcttgctcgatgttagaagcgtgccaggcctggatggatcaggttgggaagtgttcgacatttggaagctcttcagaaactttaaaaactccgcgcagttgtgtctcgagctggaagcttgggaaaggggaagagctgtggacctgaggggactcggatttgacagagccgctaggcaggtccacgagaaagccctgtttctggtattcggtagaaccaagaagagggacctgttttttaatgaaatcaaagcccgctctggccaggacgacaagactgtgtacgagtatctgtttagtcagagaaggaagcgccgcgcaccactggctacacgccagggaaagcgcccatcaaagaacctgaaggcccgctgttcacgcaaggccttgcacgtgaacttcaaggacatgggatgggacgactggatcattgctccactcgaatacgaggccttccattgtgaaggtctgtgtgagttccctctgagatcacacctcgagccaacaaatcacgccgttatccaaactctcatgaattctatggatccagaatctacgccccccacatgctgcgtgcccactcgcctctctcccatcagtattctgtttatcgattctgctaataatgtcgtgtataagcaatacgaggacatggtagtggagtcttgcggctgccgc

SEQ ID NO: 322065 - DNA, 1503 bp, Artificial Sequence
  derived and/or modified sequence
atgagactgcccaaactgcttacctttctgctctggtacctggcatggctcgacctggaattcatatgcaccgtccttggagcaccagatctggggcagcggcctcagggaaccagaccaggccttgcaaaagcagaggcaaaggaaaggccacctttggcgagaaacgtgtttcgacctgggggtcattcctacgggggcggcgcaactaacgcaaacgcacgggctaagggcggaactggacaaacgggaggtctgacgcaaccaaagaaggatgagcctaagaagctgccgcctcgacccggcggtcctgaaccgaagccaggtcaccctcctcaaaccaggcaggcaaccgcgagaactgtgaccccaaagggtcaacttcctggtggaaaagcaccccctaaggccggttccgtgccttcgtcgttccttctgaaaaaggcacgtgaacctggtcccccaagggagcctaaagagccatttagacctccacctatcactccgcacgagtatatgctgtcgttgtaccgaactctcagcgatgcagaccggaagggaggcaattcatccgtgaaacttgaagcaggcctggcgaacactattacctccttcatcgataaaggtcaggatgataggggccccgttgtgagaaagcagagatatgtgtttgacatttcggcgctggagaaggatggacttttgggagcagaactgaggattcttagaaagaagccgagcgataccgcaaaaccagcagcacctggaggggggagagcagcccagctgaaactttcgagctgtccatcgggtagacagcccgcatctctccttgacgtgcggtcagtgcccggactcgatggctcagggtgggaagtgttcgatatttggaagctgtttagaaactttaagaactccgcccagctctgtctggaacttgaggcatgggaaaggggaagggccgtggatctcagaggacttgggtttgatcgggctgccagacaagtgcacgagaaagccctgtttttggtctttggaagaaccaaaaagagggatctcttctttaatgaaatcaaagcacgatccggacaagacgataagaccgtgtacgaataccttttttcgcaacgtagaaagcgccgggcacctcttgcaacccggcaagggaagcgcccaagcaaaaaccttaaggctaggtgtagtagaaaagcactccacgtcaactttaaggatatgggttgggatgattggataatcgccccactggaatacgaagcattccattgtgaaggcctctgtgagtttcctctgcggtcgcaccttgagccgactaaccatgcagtcatccagaccctcatgaactcgatggatccagaatccacgccaccgacctgttgtgtccctaccagactgtcgccaatatcaatactgtttatcgattcggcaaacaatgtcgtgtacaagcagtacgaggatatggtggtcgagagctgtggctgcaga

SEQ ID NO: 322066 - DNA, 1503 bp, Artificial Sequence
  derived and/or modified sequence
atgcggctccccaagcttctcaccttcctgctctggtacctcgcttggctcgatttggagtttatatgtacagttttgggagccccagacctaggccagcgcccccagggcaccagacctgggctggctaaggccgaggccaaggagcggccccctcttgcccggaacgtcttccgaccgggtggacattcctatggcgggggcgctaccaatgcaaacgcgcgtgctaagggcggtaccggccaaacaggcggcttgacccagccgaagaaagatgagccaaaaaaactcccccctcgccccggggggcctgagccgaaacccggtcatccaccccagactcgacaagccaccgctcgaactgttacccccaagggtcagttgcccggcggcaaggccccgcccaaggctggatctgtcccttctagcttcctcctgaagaaggcgagagagccgggaccgccccgcgagcctaaggaacctttccgccccccccctatcaccccacacgagtatatgctttctctctaccgaaccctgtctgacgctgatcgtaaggggggcaactcatccgtcaagttggaagctggcctcgccaacacaattaccagctttatcgacaagggccaggatgaccgcgggcccgtggtccgtaaacaacgctacgtgtttgacatctcggccctggagaaggacggcctgctgggggccgagcttcgcatcttacgcaagaagcctagtgacacagccaagcctgccgcgccaggtggcggtcgagcggcccagcttaagctgagctcttgcccgtcgggtcgccagccagccagcctcttagacgtcagatctgtccctggtctcgatggctccggctgggaggtcttcgacatttggaaattgttccgcaacttcaagaattcggcacagctctgccttgaactggaggcttgggaacgagggagagctgtggacctgcgcggtcttggattcgaccgcgccgcccggcaagtgcacgagaaagctctttttctcgtattcggtcgcaccaagaagcgggaccttttcttcaatgagattaaggcacgttcaggccaggacgataagaccgtctacgaatatctcttcagccagcgtagaaagcgccgcgctcccctggcaactcgccaaggaaagcgtcccagcaagaacctgaaggcccgctgttcccgcaaggccttacatgtcaacttcaaggacatggggtgggatgattggatcatcgctccgctcgaatacgaagccttccactgcgaaggtttgtgcgagtttcctctgcgctcccaccttgagcccaccaatcacgccgttatccagacgctgatgaactcgatggatcccgaatctactccgcccacctgctgcgttcccaccaggctctccccaattagcatcctattcatagacagcgcaaacaacgtggtctataagcagtatgaggacatggttgtggagtcctgcggatgccgc

SEQ ID NO: 322067 - DNA, 1503 bp, Artificial Sequence
  derived and/or modified sequence
atgcggctgcctaaactgctgaccttcttgctctggtaccttgcatggctcgacttagaatttatctgcactgtgttgggagcaccagatctgggacagcgcccgcagggaactcgtcccgggttagcaaaggcggaagccaaggagcgccctcccctggcaagaaacgtatttcgcccgggcggccacagttacggtggtggcgctaccaacgctaatgcgcgagcaaagggtggcacagggcagacaggagggttgactcagcccaaaaaggatgagccgaaaaagctcccccctagaccaggggggcctgagccaaagcctggacaccccccgcaaacaaggcaggcaaccgcacgaacagtgactccgaagggccagctgccaggaggtaaagctccacctaaagcgggatctgtgccgtcctctttcctcctgaaaaaagccagagagcccggacctccaagggagcccaaggagccttttaggccgccccccataacgccccatgagtatatgctttctctctaccgaacactttcagatgcagaccggaaaggtggcaattcatccgtgaagctggaggcaggcctggccaacactattacctccttcatagacaaaggacaggacgataggggacccgtcgtccgaaagcagagatacgtttttgatattagcgctctggaaaaagacggattgttaggagctgagctgcgtatactgcgaaagaaaccgagcgacactgcaaagcccgctgccccaggcggagggagggcagcccagctgaaattgtcatcttgtccctcaggccgtcagcccgctagtctcctggatgtgcggtcggtgccgggcctcgacggctcaggttgggaggtgttcgacatctggaaattattccgcaacttcaagaattcggcacagctctgcctggagctcgaggcatgggagcgaggcagggcggttgatctccgggggctgggattcgacagagctgccagacaggtacacgaaaaagccctgtttttagtattcggacggacaaagaaacgggatctgttcttcaatgagattaaggcacgtagcggccaagatgacaagactgtgtatgagtacctgttctcacagcgcaggaaacgcagagcccctttagctaccagacaggggaaaaggccaagtaagaacttgaaagcaaggtgcagtagaaaagcgctgcatgtgaattttaaggacatgggatgggacgactggattatcgcacctctcgagtacgaggcattccactgtgagggcctttgcgagttcccccttcgttctcatctcgagcccacaaatcacgccgtgatccagacgctgatgaatagcatggatccagagtccacacctccaacatgctgtgtgcccacgagattgtcaccaatttcaatactttttatagactctgccaacaatgttgtgtataagcagtacgaggatatggtcgtggagtcgtgcggctgtaga

SEQ ID NO: 322068 - DNA, 1503 bp, Artificial Sequence
  derived and/or modified sequence
atgcgacttcctaaactgctgaccttcctcctgtggtacctggcttggctcgatctggagttcatatgcacggtcctcggcgcccctgatctggggcagaggccgcaaggcacgcgcccggggctcgccaaagccgaagcgaaggaacgccccccgctggcccggaatgtattccgccctggtggacactcctacggaggaggagccaccaacgctaacgcgcgggctaaaggggggaccggccagaccggaggactcacccaaccgaaaaaggatgaaccaaagaaactgccgccgcgtcctggggggccggaacctaaaccgggacatcccccgcagaccaggcaagctacggcgcgcaccgtgacgccgaaaggacaactcccggggggaaaggcgcctcctaaagccggatcggtcccgtcctcgttcctgcttaagaaggcacgggaaccgggtccgccgagagaacctaaggagccattccggcctccacctatcaccccacatgaatacatgctctcgctgtaccgcaccctgtcggacgctgatcgcaagggcggaaactcgtctgtgaagctggaggccggactggctaatactatcacgagcttcatcgacaagggccaggacgaccgaggtcccgtggtgcgcaagcagcgctacgtctttgacatctccgcactggaaaaagatggcctcttgggagcagaactgagaatcctcagaaagaaacctagtgataccgccaagccggccgcccccggagggggacgcgcggcgcagctcaagctgtccagctgcccctccggacgccaaccggcgtcattgctggatgtgcgctcagtgcccgggctggatggatcggggtgggaggtgttcgacatttggaagctgttccggaatttcaagaactcggcacaattgtgtctcgagttggaggcttgggagcgcgggcgcgctgtggaccttaggggtctgggatttgaccgggccgcgcgccaggtgcacgaaaaagctctgtttctggtgttcggtcggaccaaaaagcgggatctctttttcaatgagattaaggcccggagcggtcaggacgacaaaaccgtgtacgagtatctcttctcgcagcgcagaaaaagacgcgcgccactggccactcggcagggaaaaagacccagcaagaacttgaaggcgagatgctcaagaaaggctctgcacgtgaactttaaagacatgggatgggacgactggatcatcgccccactggagtacgaagcgtttcattgcgaggggctgtgcgaattccctcttcgatcccacctggaaccaactaaccacgcggtgattcaaactctgatgaactcaatggatcctgaaagcaccccgccgacttgttgtgtccccacccggctgtcgccaatctcgatcctcttcatcgactcggccaacaatgtcgtgtacaagcagtacgaagatatggtggtcgagtcctgcggctgcaga

SEQ ID NO: 322069 - DNA, 1503 bp, Artificial Sequence
  derived and/or modified sequence
atgagactgccaaaactgctcaccttcctcctttggtaccttgcttggttggacttggaattcatttgtactgtgttgggtgcaccggatttgggacagcgacctcaagggactagacccggactggccaaggcagaagcaaaggaaaggcctcccttggcaagaaatgtgtttcgtcctggcggtcattcgtacggaggaggcgcaaccaacgccaacgcaagagcaaaaggaggcactggacaaaccgggggtctgactcaacccaagaaagacgaacctaagaagctgccacctcggcccggtggacctgagcctaagcctggacaccctccacaaaccagacaagcgactgcccggaccgtcacccctaaaggccaactgcctggcggtaaagccccaccaaaggcagggtcggtgccaagctcttttttgcttaagaaggctagagagcccggtccacctcgagaaccaaaggagccttttcggccgcctccgatcactccccacgagtacatgcttagtctgtatcgtaccctgtcggacgcagaccgaaaaggaggaaatagctcggtgaaactggaggcaggactcgcaaatactattaccagctttattgataagggtcaggacgatcgtggacccgtggtcagaaaacaaagatacgtgtttgacatttccgctcttgagaaagatggtctgcttggcgcagaactgcgtattttgagaaaaaagcccagcgataccgcaaaacctgcagcacctggagggggtagagcggcccaacttaagctcagttcgtgcccatcagggcggcagcctgcatccctcctcgacgtgagatcagtcccaggtcttgacgggagcggatgggaagtatttgatatatggaagttgttcagaaacttcaagaatagcgcccagctttgccttgaactggaagcctgggaacggggtcgggcagtggatctcagagggcttggttttgatcgcgcagcaaggcaagtccatgaaaaggccctgttcctcgtgttcgggcgaaccaagaagagggacctgtttttcaacgagattaaggcacggtcaggacaagatgataagactgtgtatgagtacctttttagccagagacgcaagcgcagagcacccctcgcgactcgtcagggaaagcggccttcgaagaacctgaaggcacgttgttcaaggaaggcacttcacgtcaactttaaagacatgggatgggacgactggatcatcgcccctcttgaatacgaagcgtttcattgtgaaggactctgtgaattcccactgcggtcgcaccttgaacccaccaaccatgcagtgattcagacccttatgaactccatggatccagagagcactcctccaacgtgctgtgtcccaacccgtctgagccctatttccatcctgttcattgactcggccaataacgtggtgtacaaacagtacgaggacatggtcgtggaatcatgtggttgtagg

SEQ ID NO: 322070 - DNA, 1503 bp, Artificial Sequence
  derived and/or modified sequence
atgagattgccaaagctgcttacttttctcctttggtaccttgcctggctggacctggaattcatttgtaccgtcctcggcgcaccggatcttggccagcggcctcaaggtactagacctggactcgcaaaggcagaagccaaggaaagacctccccttgcgcggaacgtgtttaggcccggggggcacagctacggaggcggggcaaccaatgccaacgcaagagccaaggggggtactggccagaccggcggattgactcaacctaaaaaggacgagcccaagaaactgcctccacgacctggaggacccgagccaaagcctgggcatcctccacaaacgcggcaagcaaccgcccggacggtgacccctaagggacaactccctgggggaaaggcgccacccaaggccggttccgtgccctcctctttcctgttgaaaaaggcacgtgaacctggcccacccagagagcctaaagaaccattcagaccaccccccattaccccacatgaatacatgctgtctctctaccggactttgtcggacgctgatcggaagggtgggaattcatcggtgaaactggaagcaggtctggcaaataccatcactagctttatcgacaaaggacaggacgatcgtggacccgtcgtcagaaagcaacgctacgtctttgatatatccgcacttgaaaaggatgggttgctgggtgcagaactccgaatactgagaaagaaaccatccgacaccgcaaagccagccgccccaggaggtggcagagccgcacagcttaaactgtccagctgccctagcggtaggcaacccgcaagccttctcgatgtgcgctcggtccctgggcttgatggctctggttgggaagtctttgacatttggaaactgttcaggaatttcaagaatagcgcacaactttgccttgagctggaggcttgggagagagggcgtgccgttgatctcagaggcctgggatttgaccgggctgcccgccaagtccatgaaaaggccctttttctggtgttcggtcgtactaaaaagagggacttgtttttcaacgagattaaggcgcgctctgggcaagacgataaaaccgtgtacgagtaccttttctcgcagagaagaaagaggcgagcacccctggccactcgtcagggaaagaggccttcgaagaacctgaaggcgaggtgctcgaggaaggcgcttcatgtgaactttaaggacatgggatgggatgactggatcattgcacctctggaatacgaggcatttcactgtgaaggcctttgtgaattccccctgcggtcacacctggaacccacgaaccacgcagtgattcaaactctgatgaactcgatggaccccgaatccactccccctacctgctgcgtccctacccggctttcgccgatttccattctgttcatcgattcagcaaacaacgtggtgtacaagcaatacgaagatatggtggtggagagctgcggatgtcga

SEQ ID NO: 322071 - DNA, 1503 bp, Artificial Sequence
  derived and/or modified sequence
atgcgtctcccgaagctcttgactttcctgctatggtaccttgcttggctcgaccttgaatttatttgcacggtcctgggcgctcctgacctcgggcagaggcctcagggcacacggcccggactcgcgaaagccgaggcaaaggaacgtcccccactggcaagaaacgtattccgcccagggggccacagctatggtggtggggctacaaatgccaacgctagggctaaaggcggaaccgggcagactggaggcttgacccagcccaaaaaagacgagccgaagaaactcccacctcgaccagggggccccgagcctaaaccaggccacccgccccagacccggcaggctactgcacggactgtcactccgaagggccagctgccaggcgggaaggcaccacctaaggccggttctgtgccctcttcatttttgctgaaaaaagccagagagccgggcccaccccgcgagcctaaagagccttttagacctcccccgatcactccccatgaatatatgttgagcttatatcggaccctctcagacgctgaccgaaaaggtgggaactctagcgtcaagctggaggccggattagctaacaccataacttcgttcatcgataaaggtcaagatgaccgtggcccggtcgtaaggaaacagcggtatgtttttgatatatcggcgctggaaaaagatgggctgctgggagctgagcttcgtatactgagaaaaaaaccttcagacacagctaagccagccgcaccaggaggcggacgcgccgctcaactgaaactgagttcctgtccaagcggcaggcaaccagcaagcttgctggatgtccggtctgtaccgggtctagacgggagcggttgggaggttttcgatatctggaagctgtttcggaacttcaaaaattccgcccagctctgtttggagctggaggcttgggaacgaggccgggccgtggatctgaggggacttggatttgaccgggctgcccgccaggtgcacgagaaagccttgtttcttgtgttcggacgcactaaaaaaagagacctgttcttcaatgaaataaaagcgcgctctgggcaagacgacaagaccgtgtatgagtacctgttctcccaaagacggaagaggagggctccactggcgacccgccaaggcaaacggccaagtaaaaacctcaaagctcgttgctcccgcaaagcactccatgtgaatttcaaagacatgggatgggacgattggattatagccccactggagtatgaagcattccactgcgagggcctgtgcgaattccctctgcggtcacatctggaacccaccaatcacgctgtcatccagaccttaatgaactccatggatccagagtcaactccgcctacctgctgcgtgccgactcggctgtcccctatcagcattctgtttatcgacagcgctaacaacgtggtgtacaagcagtacgaggacatggtcgttgaatcctgcggctgtcga

SEQ ID NO: 322072 - DNA, 1503 bp, Artificial Sequence
  derived and/or modified sequence
atgaggctccctaaactgctgacttttctcttgtggtatctcgcctggttagatctggaatttatatgcacagtcctgggagcgcccgatctaggacagaggccgcagggaacacgccccggactggctaaggccgaagctaaagaaaggcctcctctagcgagaaatgtatttcgccccggaggacattcttatggggggggagccactaatgcaaacgcccgagcaaaagggggaacagggcagacagggggactaacacagccaaaaaaagatgaaccaaagaaactgccacctcgccctggggggccagagcctaagccagggcatccacctcagactagacaagctacagctaggactgtgactccaaaaggacaactccctggaggaaaagctcctcctaaagccggatccgtcccttctagtttcctgctcaaaaaagccagggagcccgggcccccccgcgaaccaaaagaaccattccggcctcctccaatcacacctcatgaatatatgctatctctctataggacactcagtgatgctgaccgcaaaggggggaatagtagtgtcaaactagaagccgggcttgctaacactatcacttccttcatagataaggggcaagatgatagagggcctgtggtccgaaaacagcggtatgtgttcgacatatctgccttggagaaagatggacttttaggggctgaactgagaatcctacggaaaaaaccctctgatactgctaaaccagccgccccgggaggggggagggcagcccagctaaaactctcaagttgcccctcaggacgccagccggctagtttgcttgatgtcagatccgttccaggactcgacggatctgggtgggaagtatttgatatctggaagctgttcaggaatttcaaaaattctgcccagctctgtctggaacttgaagcatgggaaagagggagggctgttgatcttcgcggacttggattcgatcgagccgcccgacaggtgcacgaaaaagctctattcctcgtgttcggaaggactaaaaagagagatcttttttttaatgaaatcaaagcaagaagtggacaggatgataaaactgtttatgaatatctgttttctcagcggcggaaacgcagagcgcctttagccactcggcagggaaaaaggccctctaagaatttaaaagccagatgctccaggaaagccttgcatgtgaactttaaagatatggggtgggatgattggatcatcgctccccttgaatatgaggcttttcattgcgaagggctgtgtgaatttcctcttcggagtcatcttgagcctacaaaccacgctgtcatccagacacttatgaatagtatggatccagaatctacaccaccgacatgctgtgtccccactaggctgtccccaatctcaattctcttcatagactcggccaacaatgtggtctataaacagtacgaagatatggttgtggaaagttgcggatgcagg

SEQ ID NO: 322073 - DNA, 1503 bp, Artificial Sequence
  derived and/or modified sequence
atgagattaccaaaactgctgactttcctcctgtggtacctggcttggctggacctggagttcatttgcactgtacttggtgcaccagacctgggccagcgaccacaaggcacacgcccagggctggccaaggccgaggctaaggagcgtcccccactggcaaggaacgtgtttagaccaggggggcattcctacggggggggagccacaaacgcaaatgccagggccaagggcggcaccggccagaccggaggcttgactcaaccaaaaaaagatgaacccaaaaaactccccccacgacccggcggcccagagcctaaacccggccacccaccacagacccggcaagcaactgctcgcactgtcacccctaaaggccagctgcctggtggtaaggccccaccaaaggcaggtagtgtgccctcttcttttcttctcaagaaagccagagagcctggtccacctagggagccaaaggaaccatttcgtccaccccccatcaccccccatgagtatatgctgtccctctaccgcactctctctgatgctgatcggaagggagggaacagctctgtcaaattagaagccggcttagcaaacaccatcacctccttcattgataaaggccaggacgatcgcggccccgttgtccgtaaacagaggtatgtgttcgatataagcgcactagagaaggacgggttactcggcgccgaattaaggatcttgcgcaaaaagccaagcgataccgccaagcccgccgcccctggtggcggccgcgcagcacagctcaaactgagtagctgtccatcaggccgacagcctgccagcctactcgacgttaggagcgtgcctggcttagacggttccggctgggaagttttcgatatctggaagctgttcagaaatttcaagaattctgctcaactgtgtcttgaactagaggcctgggaacgcggcagagctgtcgacctgagaggtctcggtttcgacagggctgctcgacaagtgcacgaaaaagccctgttcctggttttcggaaggacaaagaaacgagacctcttttttaacgagattaaggcaaggtctgggcaggacgataagaccgtgtatgaatacctcttttcccaaaggcgtaagagacgagccccattagctactagacaaggcaaaaggccatccaaaaacctgaaagcccgttgctccaggaaggccctgcacgtcaactttaaggacatgggttgggatgattggattattgccccactcgaatatgaagcattccactgtgaagggttatgtgaatttcctcttaggtcccaccttgagcccaccaatcatgctgtgattcagaccctgatgaacagcatggaccccgaaagcacaccccccacttgctgcgtgccaacaaggctttctcctattagtatccttttcatagactccgccaacaatgtcgtttacaagcaatatgaggacatggttgtggaatcctgcggatgtcgg

SEQ ID NO: 322074 - DNA, 1503 bp, Artificial Sequence
  derived and/or modified sequence
atgcgcctgccgaaacttctgacgttcctcctgtggtacctggcctggctggacctggagttcatctgcaccgtgctcggagcaccggacctgggacaaagacctcaaggtaccaggccgggactcgcgaaagcagaagcgaaagagcggcccccgctggcccgcaacgtgtttcgtccgggcggtcattcgtacggaggcggggccactaacgccaacgcgagagccaagggaggaactggccagactggagggttgactcagccgaagaaagatgaacccaagaaactcccgccacggcccggcgggccagagcctaagccaggacacccgccgcagacccggcaagctaccgctcgtactgttactcctaagggtcaactgcctggagggaaagcccctccaaaagctggatccgtgccttcctcattcttgctgaagaaggccagggagccgggcccccctcgcgaaccgaaagaaccattccgccctccgcccatcaccccacatgagtacatgctcagcctttaccggaccctttcggatgcggatcggaagggcggaaattcctccgtcaagctggaagccggcctggccaacactattaccagctttatcgacaagggccaggacgatcggggcccggttgtgcgcaaacaaagatatgtgttcgacatctctgctctcgagaaggacggtctgctgggagcagaactgagaatcctccggaagaagccaagcgatacggctaagcccgcagcgccgggaggaggacgcgccgcgcaactcaagctgtcatcatgtccgtcgggccgacagcccgcgtcacttttggacgtgcgcagtgtgccggggctggacggaagcggatgggaagtgtttgacatctggaagctgttccgcaactttaagaactcggcgcagttgtgcctggaactcgaagcctgggaacgcggccgggcagtggacctcagagggttgggtttcgacagggcagctcggcaggtgcatgagaaagccctgttcctggtctttggacgcaccaagaaacgcgatctgtttttcaacgaaatcaaggcccggtcaggacaggatgacaagactgtgtacgaatacctgttctcccagagaagaaagaggcgcgcccctctggcaactaggcaggggaaaagaccgagcaagaatttgaaggcacgatgctccagaaaggccctccacgtcaatttcaaggatatgggttgggatgactggattatcgcgccactcgagtacgaagccttccactgcgaaggactgtgcgagttcccactgcggtcgcaccttgagccaaccaaccacgcggtcatccagaccctcatgaattcgatggatccggaatcgacgccaccgacctgctgtgtgccaacccggctctcgccgatctccattctgttcatcgactccgctaacaatgtggtctacaagcaatacgaggacatggtggtcgagagctgcggatgtcgc

SEQ ID NO: 322075 - DNA, 1503 bp, Artificial Sequence
  derived and/or modified sequence
atgagactgccgaagttgttgactttcctcttgtggtatctggcctggctggacctcgagttcatttgtactgtgctcggcgcccccgacttgggacaaaggccacagggaaccagaccggggctcgccaaggccgaggcgaaggaacggcccccactcgcccgcaacgtgtttcgacctggtgggcattcgtacggaggaggggccaccaacgccaacgcacgcgcaaaagggggcaccggacagaccggcggacttactcagccgaagaaagacgagccgaagaagctgccccctcggccgggaggacctgagccgaaaccgggacacccgccccaaactcgccaagcaaccgcgcgcactgtgactccgaagggacagctgcctggtggcaaagccccacccaaggccggctccgtgccttcatcatttctgctcaagaaggccagagaaccgggacctcctcgggagccgaaggaacctttcaggccgcccccgattaccccacacgaatacatgctgtccctgtaccggactctctcagatgccgacaggaaaggaggaaactcgtccgtgaaacttgaggccgggctggccaacaccatcacgagcttcatcgacaaggggcaggacgatcgcggaccagtcgtgcggaaacaaagatacgtgttcgacatctcggctctggaaaaggacgggctgctcggagccgaactgcggatcttgcggaaaaagccctccgacaccgcaaagccagcggcgcctggcggaggacgggccgcacagctgaaactgagcagctgcccgtctgggcgccagccggcgagcctcctggacgtgagatccgtcccaggactggacggatcgggatgggaagtgttcgacatatggaaacttttccggaatttcaagaactcagcccagctttgcctggaattggaagcatgggagcggggcagggcagtggatctgcgcggactcggatttgaccgcgcagccagacaggtgcacgagaaggccttgttcctggtgttcggacggacgaagaaacgggacttgtttttcaacgagattaaagctcggtcaggacaagacgacaagactgtgtacgagtacctgttctcccagcggcggaaaaggcgggcgccactggccacgagacaaggcaagcgcccgtcgaagaacctgaaggccagatgctcgcgcaaggccctgcatgtgaactttaaggacatgggctgggatgactggatcatcgcgccactcgaatacgaagcattccattgcgagggattgtgcgagttccctctgcggagccaccttgagccgaccaaccatgcggtgatccaaaccctgatgaattcaatggatccagagtcgactcccccgacctgctgcgtgccgacccgcctgtcgcccatctccatcctgttcatcgattcggccaacaacgtggtgtacaagcaatacgaagacatggtcgtcgagtcctgcggctgccgg

SEQ ID NO: 322076 - DNA, 1503 bp, Artificial Sequence
  derived and/or modified sequence
atgagacttcctaagctgctcactttcctgctctggtaccttgcttggcttgatctggaattcatttgcactgtgcttggtgcacctgacctcggccaaagacctcagggaactcgccctggccttgcaaaggcagaggcaaaggaacggcctccgctggcacgcaatgtgttccggcccggcggccactcctatggtggaggagcaactaacgccaatgcacgggcaaaaggtggaactggccagaccggcggtcttactcagcctaagaaagacgaacccaagaagttgcctccaagacccggcggtcctgaacctaagcccgggcaccccccacaaactcggcaagccaccgcccggaccgtgactcctaaaggacaactgcccggggggaaggccccgcctaaggccggatcggtgccgtcctccttccttttgaaaaaggcaagagagccaggaccacctagagaacccaaggagccctttcgtccgccacccattactccacatgaatacatgctgagcctgtaccgtaccctttcggatgctgatcggaagggagggaactcctccgtgaagctggaggcaggtctggccaacacgataacttcgtttattgacaagggacaggatgatcggggtcccgtggtccgtaagcaacgctacgtgtttgatatttccgcactggagaaggacggtctgcttggtgcagaacttagaattctccgcaagaaacctagcgatactgcaaagccagcagcacctggaggcggaagagcagcgcagctgaagctgtcgtcctgcccatccggccgacaaccagcctcgctgctggatgtgcgatccgtgcccggcctggatggttcggggtgggaagtgtttgacatctggaaactttttcgaaatttcaagaatagcgctcaactttgcctcgaactggaggcctgggaacgaggacgcgccgtggatctgaggggacttgggtttgatagggcggcgaggcaggtgcatgaaaaagcattgttcctggtgttcggtcgtaccaaaaagagggacctgttctttaacgagatcaaggcccggtccggccaggacgataagaccgtctacgaatacctcttttcccagcgtcggaaaagaagagcgcctctcgcaacccgccaaggtaaacgcccctcgaagaatcttaaagccaggtgttcgcgtaaagcgcttcatgtgaactttaaagatatgggttgggacgactggatcatcgcaccacttgaatatgaggcattccactgtgaaggtctgtgcgagttcccccttcgctcgcatctcgagccaactaaccatgcagtcatccaaaccctgatgaattccatggatccggaatcgactccccctacgtgttgcgtgccaacgaggctgagccctattagcatcttgttcatcgacagcgcaaacaacgtcgtgtacaaacaatacgaagatatggtggtagaatcgtgtggctgtaga

SEQ ID NO: 322077 - DNA, 1503 bp, Artificial Sequence
  derived and/or modified sequence
atgagactccctaaattactgactttcctgctctggtatctggcgtggctggacttggagttcatctgtaccgtgctcggggctccagacctcgggcagaggcctcagggaaccaggccaggcctagcaaaggccgaagccaaagaacgcccgcctctggcacgcaacgtgttccgccctgggggacatagttatggcggtggtgccacaaatgcgaacgctagagccaagggtggcacagggcagacaggtgggctcacccagccaaaaaaagatgaacccaaaaaactcccacctaggcccggcgggcctgaaccaaagccgggccaccccccacagacaagacaggccacagcacgcactgtgactcccaagggacagctgccagggggtaaggcgcctccaaaggcgggatctgtgcccagttcttttctactgaagaaagcgagggagccagggcctcccagggaaccaaaggagcctttccgaccaccccccattactccacacgagtacatgctttccctctatcgcactttgtccgacgctgatcgaaagggcgggaactcttcagtgaagctggaagctggattggctaacaccatcacttcgttcatcgacaaaggccaagatgatcgtggtcccgtcgtgaggaaacagagatatgtcttcgacataagcgcactggaaaaagatggtctgcttggagccgagctccggatcctgcggaagaaaccaagtgacaccgctaaaccagctgcccccggaggtggcagagccgcgcaacttaagctttcaagctgcccaagcggacgccagcccgcgagtcttttggacgtgcggagtgtccctgggctggatgggtctggatgggaggtcttcgacatatggaagctctttaggaatttcaaaaatagcgctcaactttgcttagagctcgaagcctgggagcgtggacgcgccgtcgacttgagagggctaggattcgatagggccgctcggcaggtgcacgaaaaggctctgtttctcgtgttcggccggaccaaaaaacgagacctgttctttaatgagattaaggcccggagcgggcaagacgacaagaccgtatatgaatatctgttctcacagcggcgaaagagacgggccccactggccacccggcagggaaaacgaccctccaagaacctgaaagcccggtgctccaggaaggccttacacgtgaatttcaaagatatgggttgggacgactggatcatagcccccctggagtatgaggcctttcattgtgaaggactgtgtgagtttccactgaggtcacaccttgagccgaccaatcatgcagtgattcagacactaatgaactctatggatcctgaatccacccctcctacttgctgtgttccaacccgcttgagccccatttccattctgttcatagactctgccaacaacgtggtgtataaacagtatgaggatatggttgtggaatcttgtggctgtaga

SEQ ID NO: 322078 - DNA, 1503 bp, Artificial Sequence
  derived and/or modified sequence
atgcggctgccaaaactgctgaccttccttctttggtacctggcctggctcgatctggagtttatttgcaccgtgctgggcgctccagacctcggacagagaccacagggtaccaggcctgggttagcaaaggctgaggcgaaggagagaccgcccttggccagaaacgttttccgcccaggtggacacagctacggtggaggtgccaccaatgccaatgcacgggccaagggaggcaccggtcagacagggggccttacacagcctaaaaaggatgaaccaaagaaactacccccacgcccaggaggtcccgagcctaagcccggtcatccacctcaaaccaggcaagcaaccgcccggacagtgacccccaaagggcagctgccaggtggaaaggcccccccaaaagctgggtctgtgccttccagttttctgctcaagaaggcccgcgagcccggaccacctagggaaccaaaggagccttttaggccgccaccgatcactccacatgagtacatgctgagcctgtatagaacactgagtgatgcagatcggaagggagggaactcatcggtaaaactggaagccggtctcgctaacacaatcacaagcttcattgacaagggtcaagatgaccggggacccgttgtcaggaagcagcgttacgtgtttgacatctcagcccttgagaaagacggtctgctcggggctgagctcaggatcctgagaaagaagccgagcgacacggcaaaaccggccgcacccggaggaggaagggctgcacagcttaagctgagctcttgcccctccggacgccagcctgcttcattgctggacgtccgttctgtgcctggccttgacgggtctggatgggaagtgttcgatatctggaagttgttccggaatttcaagaactctgcccaactctgccttgagctggaggcctgggaacgggggcgggcggtcgacttacgcggcctggggtttgacagggccgcccggcaggtgcacgagaaggctctattcctggtgttcggcagaactaagaagagggatctctttttcaacgagatcaaggcccgctccggacaggatgacaaaaccgtttacgaatacctctttagtcagagacgcaagcgccgcgctcctctggccacccgccaaggcaaacggcctagtaagaatctgaaggccagatgtagccggaaggccctgcacgtgaatttcaaggatatgggctgggatgactggattatcgccccgctcgagtatgaagcgttccattgtgaggggctatgcgagttcccactcagaagccacctcgagccaactaatcacgcggtcatacagactctgatgaacagcatggatcctgagagtactcctccgacttgctgtgttccaactaggttgtccccaatctccatcctctttatcgattctgccaacaacgtagtctacaagcagtatgaagacatggtggtcgagtcatgcgggtgtaga

SEQ ID NO: 322079 - DNA, 1503 bp, Artificial Sequence
  derived and/or modified sequence
atgagactacccaaactcctgaccttcttgctatggtatctcgcgtggctggatctggagttcatctgcacagtcctgggcgcccccgaccttggacagcgtcctcaggggacacgcccaggcctggccaaggctgaagccaaagaaagacctccactggcaagaaatgtgtttcgtccagggggacattcctatggggggggggctacaaacgcaaatgccagagccaaaggaggtacggggcagacgggcgggctgactcaacctaaaaaagatgagcccaaaaaactgcctcctcgccctgggggacccgaacctaaacctggacacccgccacagacgcgccaggcaaccgccagaaccgtgacccctaaaggacaactacccggcggtaaggcccctcctaaagcagggtccgtgccttcctctttcctgttgaaaaaagcgcgcgaacctgggcctcccagagaacccaaggagccattccggccacctcccattaccccgcacgaatatatgctgtctctataccgaacgctgagcgatgcggaccgaaaaggcgggaattcctccgtgaagctcgaagccggattggccaataccattacatccttcattgacaaaggtcaggatgataggggccccgtcgtacggaagcagcgctatgttttcgacattagcgctctggaaaaagatgggctcctcggcgccgagctccggatcctgaggaaaaagccaagtgacacagcgaagccagccgctcccggaggcggacgggccgcccagctgaaactgtcatcctgcccgagcggacgtcaacctgcctcactgctggatgtgcgctccgtacctggcttagatgggagcgggtgggaggtgttcgatatctggaagctatttcggaactttaagaacagtgcgcagctgtgcctggagctggaggcctgggaaagagggcgggcagttgacctcagggggctaggttttgaccgggcggctaggcaagtacacgaaaaagctctgttcctcgtcttcggccggaccaagaagcgtgatcttttttttaatgagattaaggcccggtctgggcaggacgataagaccgtttatgaatacctcttttctcaacgccgaaaaaggagggccccattggcaactcggcaggggaaacggccctcgaaaaatctcaaggcacggtgttcccggaaagccctgcacgtaaacttcaaagatatgggatgggacgactggatcatcgccccactcgagtatgaagccttccactgcgagggattgtgtgaatttcctcttcgaagccacttggaacccaccaaccacgctgtcattcagacgttgatgaacagtatggatcccgagtctacaccccctacgtgctgtgtgcccactagactctccccgatttccattttgtttattgacagtgcgaataacgtcgtctataagcagtatgaggacatggtggtcgagtcatgcggatgtcga

SEQ ID NO: 322080 - DNA, 1503 bp, Artificial Sequence
  derived and/or modified sequence
atgcgactgcccaaacttctaactttcttgctgtggtatttggcatggctcgatctcgagtttatttgcaccgtactgggtgcaccagatttaggtcaacgtccacagggaactcgcccagggttggctaaggcagaggctaaagaaagaccaccattggctagaaatgtttttcgaccaggaggccattcgtacggcggaggtgcaaccaatgctaatgcaagggccaaaggaggaactggacagactggaggcttgacacaaccaaaaaaagatgaacctaagaagttgcccccacgacccggaggaccggaaccaaaacctggacatccaccgcagacaagacaggccactgcaagaacagttacaccgaagggtcaattaccaggaggcaaggctccaccaaaggcgggctctgtcccatcaagcttcttgcttaaaaaagctcgggagccaggcccgccgagagaaccaaaagaaccttttcgaccgccaccaattacaccacatgagtatatgctctcattatatcgaactctgtcagatgctgatagaaaaggtggtaactctagtgttaaactcgaagcgggtcttgctaatacaataactagtttcatcgataaaggtcaggacgatcgaggaccagttgttcgtaagcaacgttatgttttcgatatctctgccttggagaaagatggactcttgggagccgagcttaggattcttagaaaaaagccttcagacaccgctaaaccggccgctcccggtggaggtcgagcagctcaactcaaactttcaagttgcccatcaggtagacaacctgcctcgcttctcgatgtccgctcagtgccaggattggatggctcgggttgggaagtttttgatatttggaagctcttccgaaactttaagaattccgctcagctatgtctggagctggaagcttgggaacggggccgtgctgtggacctgagagggcttggattcgatcgggctgctcgtcaagtgcatgaaaaagctctttttctcgtgttcggacgtactaagaaacgtgatctgttcttcaatgaaatcaaggcacggtcaggacaggatgacaagacagtatatgaatacctcttttcgcaacgtcgtaagcgtagagctccattggctacacgtcaaggaaaacgcccaagtaagaatttgaaggcgagatgttctagaaaggctcttcacgtaaattttaaagatatgggatgggacgattggattattgctcccctagagtacgaggcattccactgcgaaggactttgcgaattcccattgagatcccatttggaacctactaatcacgctgtgattcagacactcatgaatagcatggaccctgaaagtaccccaccgacttgttgtgtaccaacacgtctttctccaatctcaattttattcatcgattccgcaaataacgtcgtgtataaacagtatgaggacatggtggtcgaaagttgcggatgtagg

SEQ ID NO: 322081 - DNA, 1503 bp, Artificial Sequence
  derived and/or modified sequence
atgcgactgccaaagctgctgacctttctcctgtggtacctggcctggctggacctggagttcatctgtactgttctcggggctccggacctgggacagcggccgcagggaaccagacccgggctcgccaaagcagaagcgaaagagaggcccccgctcgcgcggaacgtttttaggcccggaggacactcgtacggcggcggtgccaccaacgctaacgcccgcgctaagggtggaactgggcagactggtggccttacccagcctaagaaggacgagccgaagaaactgccgcctcgccccggaggcccggagccgaagccaggtcacccccctcaaactaggcaagctactgctcgaaccgtcaccccaaaaggacagttgcctggcggtaaggccccgccgaaggcaggctcggtcccatcgtcgtttttgcttaagaaagcccgagaaccgggaccgccgcgggaacccaaggaaccgttcagaccgcccccgattacccctcacgagtacatgctgtcgctgtatcgcaccctctcagacgcggatagaaagggtggtaattcgtctgtaaagctggaagccggactcgcgaacaccatcacctccttcatcgacaagggccaggatgataggggaccagtggtgagaaagcaacgatacgtgtttgacatctccgcgctggaaaaagacggactgctgggcgccgagctcaggatcctgcggaaaaagccaagcgataccgcgaaaccggcagcgccgggcgggggaagagccgcccagctgaaattgtcgtcatgtccttcgggacggcagcctgcgtcgttgctcgatgtccggtcggtccctggtctggacggatccgggtgggaagttttcgacatctggaaactctttcggaatttcaagaattcagcccagctttgtctggaactggaagcatgggaacgcggcagagccgtggatctgcgcggcctcgggtttgatcgggccgcccggcaggtgcatgaaaaggccctgttccttgtgttcggccgcactaaaaagcgggacctgttcttcaatgaaatcaaggcccgtagtggacaggatgacaaaaccgtgtacgagtacctgtttagccaaaggcggaagcgccgggctccgcttgccactcgccagggcaagcgcccgtccaagaatctgaaggcgagatgctcccgcaaagcactgcacgtcaactttaaagacatgggttgggatgattggattatcgccccgcttgagtacgaagccttccactgcgagggcctgtgcgaattcccactgcgctcgcatctggagccgactaatcacgccgtgatccagaccctcatgaactcaatggaccccgagagcacccctccgacctgctgcgtcccgacgcggttgtcgccgatttccattttgttcatcgactcggccaacaacgtggtgtacaaacaatatgaggatatggtggtggaaagctgcggctgtagg

SEQ ID NO: 322082 - DNA, 1503 bp, Artificial Sequence
  derived and/or modified sequence
atgaggttgcccaaactgctgacatttttgctttggtacctggcgtggctcgacttagagttcatatgcactgttcttggcgcccccgatctgggccaaagaccccagggtacccgtcccggactggcgaaagccgaagcaaaagaacggcctcctctggccaggaatgtctttagacctggggggcacagttacggaggtggtgccactaacgctaacgcaagagcaaaaggcggaactggacaaacgggagggctgactcaacccaaaaaggacgagcctaagaagctgcctcctcggcctggaggtcccgagcctaagcctggccacccacctcagacgcgacaggccaccgctaggacagtgactccaaaagggcagctccccgggggaaaagctccacctaaggcaggcagcgtgccgagtagctttttgcttaagaaagccagagaacctggaccaccgagggagccgaaggaaccctttcggccacctccaatcaccccccacgaatacatgttgagtctttaccgcacactctctgacgccgacagaaaaggcggcaacagcagcgttaagctggaggctgggctggcaaacactatcactagtttcatcgataaggggcaggacgatagaggtcctgtcgtgaggaagcagcggtatgtttttgacataagtgctctagagaaagatggcctgttgggcgcggaacttaggattctccgcaagaagcctagcgatacagctaaaccagcagcacccggcggggggagggcagctcagctgaagctgtcatcgtgtcccagtggccggcaaccagcatccttgctcgatgttagaagcgtgcccggactcgacggttcaggatgggaggtgttcgacatatggaagctgttcagaaattttaagaactcagcacaactgtgtctggagctcgaagcctgggagcgcggaagggcagtcgatttgcgcggacttgggtttgatagagccgccaggcaggtccacgagaaggctttgttcctggtttttggacgcacgaagaagagagatttgttttttaacgagatcaaagcacgcagcggccaagacgacaagacagtgtatgagtacctcttctctcagcgcaggaagaggagggcccctttggctacacgccaggggaaacggccatcaaaaaatctgaaagcacggtgctctaggaaggcactgcacgtgaatttcaaagatatgggatgggatgattggattattgcacccctggaatacgaagcgttccattgtgaaggcttgtgtgaatttcctcttagaagccaccttgagccaacaaaccatgcagtcattcagaccctgatgaacagcatggaccccgaaagcacaccaccaacctgctgtgttcctaccaggctcagtcccattagcatcctgttcattgattctgctaacaacgtcgtatataagcagtacgaggatatggtggtcgaaagttgcggatgcagg

SEQ ID NO: 322083 - DNA, 1503 bp, Artificial Sequence
  derived and/or modified sequence
atgaggttgcctaagctgctcactttcctcctgtggtacctggcatggttggacctggagttcatttgcaccgttcttggagctcccgatctcggacaaagaccgcaaggaactcgtccgggcctcgccaaggctgaagcgaaggaaagacctccactggctcgcaacgtctttcgccccggcgggcactcctacggtggaggagccacgaacgcaaatgctagggcaaagggcgggactggacagactggcggtcttacccagcccaagaaggatgagcctaagaagttgcctcctagacctggtggtccagaaccaaagcctggccatccaccacaaacccggcaagcaactgcacggactgtcaccccaaaaggtcagctccctggtgggaaagccccgccaaaggccggatcggtcccttcatcctttctgctgaagaaagccagagaaccaggtccacctcgtgagcccaaagaaccttttagaccaccccccattaccccgcatgaatacatgctttcgctctaccgtaccctttcggatgctgatcgcaagggcggaaattcatcagtgaagttggaggcagggcttgcaaacactattacctcctttatagataaaggccaagacgatcgaggaccagtagtccggaagcaaagatacgtattcgatatttctgcgcttgaaaaagatggcctgctgggtgccgaactgcgaattctgcgcaagaagccatccgacacggcgaagcctgccgcacccggaggcggaagagcggcccaattgaagttgtctagctgccctagcggtaggcagcccgcctctctccttgatgtgcgcagtgtgcccgggcttgatggaagcggctgggaggtgtttgacatctggaagctgttccgtaactttaagaactccgcacaactttgtctggaactcgaggcatgggaacgcggtcgcgcagtggacctcaggggactcgggttcgaccgtgcagcaagacaagtgcatgaaaaggcactttttcttgtctttggtcggactaaaaagagagatcttttctttaatgaaatcaaagcgcggtcaggacaggatgataagaccgtgtacgagtacctgtttagtcagcgtagaaagcggagggcaccacttgcgactcgtcaggggaaacgaccctccaaaaaccttaaggccagatgcagcaggaaagcgctgcacgtgaatttcaaggacatgggatgggatgactggattattgcacctttggaatatgaagcattccactgtgaaggattgtgtgagtttccattgaggtcccatttggagcctacgaatcatgcagtgatacaaaccctcatgaactcgatggaccctgaaagcacccctcctacctgttgtgtgccaaccaggctctcgccgatctcgatcctgtttatcgactccgcgaacaacgtggtgtacaaacagtacgaggatatggtcgtggaatcgtgcggatgtcgg

SEQ ID NO: 322084 - DNA, 1503 bp, Artificial Sequence
  derived and/or modified sequence
atgcgactgcccaaactgctcaccttcctgctttggtacctggcatggctggaccttgaattcatctgcactgtgttgggagcgccggacctcggacagcggccacagggtacccggcccggacttgcgaaggcagaggcaaaagaaaggccaccactggctcggaatgttttccggccgggaggacactcctacggaggcggagccaccaatgcaaatgcgagagccaagggaggaaccgggcagaccggaggtcttactcagccgaaaaaggatgaaccgaaaaaactgccgccgcgtccaggcggacctgagccgaaaccaggacatccaccgcaaacccggcaggctaccgccaggaccgtgactcctaagggacaactgccgggtggaaaggctccccctaaagccggctccgtcccttcctcctttcttctgaagaaggcgcgggaaccgggcccccctcgggagccgaaggaaccattccggcctccgccaatcactccgcacgaatacatgctgtcactctaccgtacgctgtcggacgcagatagaaaggggggcaattcatccgtcaagctcgaagccggcctcgccaacactatcacttccttcattgacaaggggcaggacgatcgaggcccggtggttcggaagcagcggtacgttttcgacatctcggctctcgagaaggacggactcctgggcgcagagctccgaattctcaggaagaagccttcggataccgcaaagcctgccgccccggggggcgggcgtgcggctcagctgaaactctcctcgtgtccatcgggtagacagcccgcgtcattgcttgatgtgcggtctgtgccgggcctggacgggtcgggatgggaggtgttcgatatctggaaactgttccgcaacttcaagaattcggctcaactctgcttggaattggaagcgtgggagcgaggtcgcgccgtggatctgagaggactcggctttgatcgcgccgctcggcaagtccacgaaaaagccctttttcttgtgttcggacgcacgaagaagcgcgatctctttttcaacgagattaaggcacgttccggccaagatgacaaaactgtgtatgagtacctgttttcccaaagaagaaagcgccgggcgcccctggcaactcgccagggcaagcggccctcgaaaaacttgaaggccagatgtagcagaaaggctctgcacgtgaatttcaaagatatgggatgggacgactggatcatcgccccgttggaatacgaggcctttcattgcgaaggactgtgtgaattccccctgcgctcccacctcgaaccgactaaccatgccgtaatccagaccctgatgaacagcatggatcccgaatcgactcctccaacgtgctgcgtcccgacccgcctgtcgccaatctcaatccttttcatcgactctgccaacaacgtggtgtacaagcaatacgaggacatggtcgtggagtcatgcggatgcagg

SEQ ID NO: 322085 - DNA, 1503 bp, Artificial Sequence
  derived and/or modified sequence
atgcggttgcccaagctgctcacgttcctgctgtggtacttggcttggcttgacctcgaattcatctgcactgttctgggagctccggacctgggacaaagaccacagggaacgcgccccggcctggcaaaggccgaagccaaagaaagaccgccactggcccgcaatgttttcaggcccgggggacactcatacggtggcggagccaccaacgcgaacgccagggcgaagggaggaaccggacagaccggaggcttgacccaaccgaagaaagacgaaccaaagaagctgccaccgcggccgggagggcccgaaccaaaaccaggacatcccccacagacccgccaagccaccgcacgcacggtcaccccaaaaggacaactgccgggcggcaaggcaccgccaaaggcgggaagcgtcccgtcgtcattcctgctgaaaaaggcccgcgaaccaggcccacctcgcgagccgaaggaaccgttccggcctcctccgatcaccccccatgagtacatgctgtcgctctacagaacgctctcggacgctgaccgaaaaggagggaacagctcggtgaaactcgaggccggccttgcgaacacgatcacctcgtttatcgataagggtcaggacgatcgcggcccagtggtccggaagcagagatacgtgttcgacatctccgccctcgagaaggatgggcttcttggagctgagctgcgtattctgcggaagaagccatcggatactgcaaagcccgccgcgcctggaggtggacgggcagcgcaactgaaactgtcctcctgcccatccggacgccagcctgcctcactgctcgacgtgcgcagcgtccctggcctggacggcagcggctgggaggtctttgacatctggaagctgttccgcaatttcaagaattcggcgcagctttgcctcgagctggaggcatgggaacggggaagggccgtggacctgcgcggcctcggattcgaccgagccgctcggcaggtgcacgagaaggccctgtttctggttttcggacgcactaaaaagcgggatcttttcttcaatgaaatcaaggctaggtcgggtcaagatgacaagaccgtttatgaatacctgttttcgcagcggcgcaagcgccgcgcgcccctggccaccagacaagggaagcggccttccaagaacctgaaagcccgttgtagcagaaaagcactgcacgtgaacttcaaagatatggggtgggatgactggataattgcgccgctggagtacgaagcatttcactgcgaaggcctgtgcgaattcccgcttcggagccatcttgagccgaccaatcacgccgttattcagactctgatgaactccatggatccggaaagcactcccccaacttgttgtgtgcccactcggctgtcgccgatcagcatcctgtttatcgacagcgccaacaacgttgtgtacaagcagtacgaggatatggtggtggaatcctgcggatgccgc

SEQ ID NO: 322086 - DNA, 1506 bp, Artificial Sequence
  derived and/or modified sequence
atgagactgcccaagctgctgaccttcctgctgtggtacctggcctggctggacctggagttcatctgcaccgtgctgggcgcccccgacctgggccagagaccccagggcaccagacccggcctggccaaggccgaggccaaggagagaccccccctggccagaaacgtgttcagacccggcggccacagctacggcggcggcgccaccaacgccaacgccagagccaagggcggcaccggccagaccggcggcctgacccagcccaagaaggacgagcccaagaagctgccccccagacccggcggccccgagcccaagcccggccaccccccccagaccagacaggccaccgccagaaccgtgacccccaagggccagctgcccggcggcaaggccccccccaaggccggcagcgtgcccagcagcttcctgctgaagaaggccagagagcccggcccccccagagagcccaaggagcccttcagacccccccccatcaccccccacgagtacatgctgagcctgtacagaaccctgagcgacgccgacagaaagggcggcaacagcagcgtgaagctggaggccggcctggccaacaccatcaccagcttcatcgacaagggccaggacgacagaggccccgtggtgagaaagcagagatacgtgttcgacatcagcgccctggagaaggacggcctgctgggcgccgagctgagaatcctgagaaagaagcccagcgacaccgccaagcccgccgcccccggcggcggcagagccgcccagctgaagctgagcagctgccccagcggcagacagcccgccagcctgctggacgtgagaagcgtgcccggcctggacggcagcggctgggaggtgttcgacatctggaagctgttcagaaacttcaagaacagcgcccagctgtgcctggagctggaggcctgggagagaggcagagccgtggacctgagaggcctgggcttcgacagagccgccagacaggtgcacgagaaggccctgttcctggtgttcggcagaaccaagaagagagacctgttcttcaacgagatcaaggccagaagcggccaggacgacaagaccgtgtacgagtacctgttcagccagagaagaaagagaagagcccccctggccaccagacagggcaagagacccagcaagaacctgaaggccagatgcagcagaaaggccctgcacgtgaacttcaaggacatgggctgggacgactggatcatcgcccccctggagtacgaggccttccactgcgagggcctgtgcgagttccccctgagaagccacctggagcccaccaaccacgccgtgatccagaccctgatgaacagcatggaccccgagagcaccccccccacctgctgcgtgcccaccagactgagccccatcagcatcctgttcatcgacagcgccaacaacgtggtgtacaagcagtacgaggacatggtggtggagagctgcggctgcagatag

SEQ ID NO: 322087 - protein, 121 aa, Artificial Sequence
  derived and/or modified sequence
MPSDRPFKQRRSFADRCKEVQQIRDQHPSKIPVIIERYKGEKQLPVLDKTKFLVPDHVNMSELVKIIRRRLQLNPTQAFFLLVNQHSMVSVSTPIADIYEQEKDEDGFLYMVYASQETFGF

SEQ ID NO: 322088 - DNA, 1823 bp, Artificial Sequence
  derived and/or modified sequence
gcaatttaagtaaaacaagatgaagcaggaaccgactctcaccatccccactcccacctccatgaattccatcggacagttgtgcgaaagcgggctggctttcgcacaaccattggtggactgtctgtcctgtaagccccccaggggctgatgccctcccagtctgcctgccctgttcttagcacagcccctggcaccccgtgtgatctcaggaaacacttgctaaacatggtatcggaggagaaacggagcccacagcttagtgcaaagacctggcggcgtggactgaggctgcagaaacgcagaaacgcgcttttcctgccagaaggggacatctgcgtggtcgggagtacctctggggcacgtgccctaattccagaaacatctaagctggagcgcagtggcactgtaatagcttactgcaaccttgaactcctggcttcaagtgatcctcccgtctgggcctcccaaagcactgggatgacaggtatgagctaccgctctcagccacaactgggttttaagagcactcctccagcccactccagtgtcttccatcattctgtgaaagcaccaaaagaggaccaagcccaggaagccgccagcaggcctctcaccagccaagatggctggaatcctaatatcaagaaatgaaactccagcaggccatggaaatgctaaggggttggcatttctgctctagagagagccaaagagaaagctctatttatatctccttgcgtttggtcgcagcctcatcaaccaaaagaaccttccgccccactcaacacatcaatcaaattggggagggggtgtgaacagcagcagcgggtgttacagaggagtctcaagggtatcttagagggtgcctctctgaacagtcgtcccctccaaatcccccccaagagaattactaggacattctccttcccccgcaagcaacggcacccccagatgattaaacgcgctggcgtcggaaagagctgggatcctggagaaactacttgtaaactgtgtgggttggtgagttatttaacttttctgagccttcgtttccttaactgtaaaatgaagacaacaccactcagctcctacagttgtccagctgaaatcacctaggtaagaacgaccagttctttggggagtaatgtcccgatggtaccattcaattgtcaagaacaccaaggcaccgtcaggcacccgggcggtatcccactctcctggaagagagcagggggttagcccttggtttcaaagtccctagggagcagtaaaccttcccctccgagagccctgagagaggaataattgccccttcccactccaacccacggcacacccgcccacatccacgtgcggctgtgcccagcatctcagaggtaggacttctcaggaatcggcgggaagaagcccccttgatggagtctggtggggttcaagatctgcaggtcccaccttccagggaacacctgcacaagtgagacctgcccgatcagccccgcgctccatccgcaaactgggcagatcccaagggtgccacgcgaggaccctgcaccttggccgctccagggcgccccccacccgcgaccccggaaatctcgcccctacctgcttcaccctcgccccacccacagcgcacttttcgggacctcccagcggcccttccccggttctctggacccccgtctccccgccctgcaacgcccccatcctggtgcccacgaaaggtcgtcccagttcccctcttctctacctcaaaggaggaggtgcaaatgaggaagcctaaataaaaacaggaaactcgatttttttaaaaagcctca

SEQ ID NO: 322089 - DNA, 1574 bp, Artificial Sequence
  derived and/or modified sequence
attccccatcacctgtctctctggtgagctgcttccgatcagcctccaggtccacgatttctcttctgttgtccttttctgccttctcacctcatcctctgagacctgaatttcgatggctctacttttcaattatattattctttttcaaacctgggcgttcatttctagcatcctgttctatcctgtgtctgactgtgcctcccgcaccttctcccttctctcgccctaagccccgtgaaggcgccgggcctttggctccggctgtttcccacggcgcccagaaccgcgtcagtcctgacacagactcggtgagggcgggaagtggtgccgtggggctgcagcctggcccgcccgctccatcggcctagggcggccccaccgccctccgggccttaccttgagttcgggctgcgggagaagctcccgcgctgcccatgacgtcacgggactgtgacgcgcccagaagccccgcccctcgcgtcccggtccgcggacccaggctctctgcgccgtgacgtcacgggtccgggcgggcgggttgtgcgtcggcccaatgggagcggcgcactggcctcccctttaaggaatgttgtgacctgacgtcaccgggcgagttacctcccgcagccgcagccgccgtgctcagcgcgagccccggagcccttgagcgcgaggcgcggagcccccggagcccccaaaccgcagacacatccccgcgccccagagccccggcctgcgcgcccagccgggcccgcgcgatgccctcagaccggcctttcaagcagcggcggagcttcgccgaccgctgtaaggaggtacagcagatccgcgaccagcaccccagcaaaatcccggtgatcatcgagcgctacaagggtgagaagcagctgcccgtcctggacaagaccaagtttttggtcccggaccatgtcaacatgagcgagttggtcaagatcatccggcgccgcctgcagctgaaccccacgcaggccttcttcctgctggtgaaccagcacagcatggtgagtgtgtccacgcccatcgcggacatctacgagcaggagaaagacgaggacggcttcctctatatggtctacgcctcccaggaaaccttcggcttctgagccagcagtaggggggctcggcctgggagtcgggcggccccggtcaggccctgcccagagagctcctggttcctgaactgagctgcctctaccgtggtgggctgggcaggcatgtgcccccctagtcagagggcaccaacccacctactctgcccctgggtggatcctgggccggtcgtgttagggttgtccctctgggtgctggctggtgggatgggggagggtggggagcagctcccagcacccctgctgtgtggttcatcttttttttaggcccctgcctgtctgcccatctgcccctcacccacccgaggctctgcccaccgcctggacctgcccacccctgaaagactggcccctggctccccgcccctcggtctccacgtggtgtatggatctgtggtcattgtccctctgcagaataaagattgctcaggcctgcctggc

SEQ ID NO: 322090 - DNA, 698 bp, Artificial Sequence
  derived and/or modified sequence
gggcgagttacctcccgcagccgcagccgccgtgctcagcgcgagccccggagcccttgagcgcgaggcgcggagcccccggagcccccaaaccgcagacacatccccgcgccccagagccccggcctgcgcgcccagccgggcccgcgcgatgccctcagaccggcctttcaagcagcggcggagcttcgccgaccgctgtaaggaggtacagcagatccgcgaccagcaccccagcaaaatcccggtgatcatcgagcgctacaagggtgagaagcagctgcccgtcctggacaagaccaagtttttggtcccggaccatgtcaacatgagcgagttggtcaagatcatccggcgccgcctgcagctgaaccccacgcaggccttcttcctgctggtgaaccagcacagcatggtgagtgtgtccacgcccatcgcggacatctacgagcaggagaaagacgaggacggcttcctctatatggtctacgcctcccaggaaaccttcggcttctgagccagcagcccctgcctgtctgcccatctgcccctcacccacccgaggctctgcccaccgcctggacctgcccacccctgaaagactggcccctggctccccgcccctcggtctccacgtggtgtatggatctgtggtcattgtccctctgcagaataaagattgctcaggcctgcctggc

SEQ ID NO: 322091 - DNA, 414 bp, Artificial Sequence
  derived and/or modified sequence
atgagcctgttcggcaccaccagcggcttcggcaccagcggcaccagcatgttcggcagcgccaccaccgacaaccacaaccccatgaaggacatcgaggtgaccagcagccccgacgacagcatcggctgcctgagcttcagcccccccaccctgcccggcaacttcctgatcgccggcagctgggccaacgacgtgagatgctgggaggtgcaggacagcggccagaccatccccaaggcccagcagatgcacaccggccccgtgctggacgtgtgctggagcgacgacggcagcaaggtgttcaccgccagctgcgacaagaccgccaagatgtgggacctgagcagcaaccaggccatccagatcgcccagcacgacgcccccgtgaagaccatccactggatcaagtag

SEQ ID NO: 322092 - DNA, 264 bp, Artificial Sequence
  derived and/or modified sequence
atgagcctgttcggcaccaccagcggcttcggcaccagcggcaccagcatgttcggcagcgccaccaccgacaaccacaaccccatgaaggacatcgaggtgaccagcagccccgacgacagcatcggctgcctgagcttcagcccccccaccctgcccggcaacttcctgatcgccggcagctgggccaacgacgtgagatgctgggaggtgcaggacagcggccagaccatccccaaggcccagcagatgcacaccggctag

SEQ ID NO: 322093 - DNA, 414 bp, Artificial Sequence
  derived and/or modified sequence
atgtctttgtttgggacaacttcgggttttggaacctcaggcaccagcatgttcgggagtgccacaaccgacaaccacaatccaatgaaagacattgaagtaactagcagtcctgacgatagcataggctgtctgtccttcagccccccaacattgccagggaattttcttatcgctggttcctgggccaatgacgttagatgctgggaggtgcaggactctggccagacaattcctaaagcccaacaaatgcatacaggtccggtcctggatgtgtgctggtccgatgatggaagtaaggtatttacggcctcctgcgataaaacagctaagatgtgggacctcagttcaaaccaggcgatacaaattgcccaacacgacgcacccgtcaaaaccatccattggatcaaatag

SEQ ID NO: 322094 - DNA, 414 bp, Artificial Sequence
  derived and/or modified sequence
atgtccctgttcgggactacatcagggtttgggactagcggcacctcaatgttcgggtcagcaacgacagacaatcataaccccatgaaagatattgaagttaccagcagccccgatgattccatcggatgtttgagctttagcccccctaccttgccagggaatttcctgatcgctggatcttgggccaacgatgttagatgctgggaagtccaagattctggacagactatccctaaggcgcagcaaatgcacaccggccccgttttggatgtctgctggagtgatgacggctctaaagtgtttaccgcaagttgcgacaagacagcaaagatgtgggatctatcctccaaccaggccattcagatcgcccagcacgacgccccagtgaagacaatccactggatcaaatag

SEQ ID NO: 322095 - DNA, 264 bp, Artificial Sequence
  derived and/or modified sequence
atgagcctgtttggtacgacttcgggattcggcaccagtgggacttccatgttcggctcagcaactacagacaatcacaatcctatgaaagacattgaggtgacaagctcccctgacgatagcattggatgcttatccttcagccctcccacactgcccggcaactttctcatagcaggctcttgggctaatgacgtgagatgctgggaggtgcaggacagtgggcagactattcccaaggcccagcagatgcacaccggttag

SEQ ID NO: 322096 - DNA, 414 bp, Artificial Sequence
  derived and/or modified sequence
atgagcctgtttggcaccaccagcggcttcggcaccagcggcacctccatgtttggcagcgccaccacagacaaccacaaccccatgaaggacatcgaggtgaccagcagcccagatgacagcatcggctgcctgtccttcagcccccccaccctgcccggcaacttcctgattgctggctcctgggccaatgatgtgcgctgctgggaggtgcaggacagcggccagaccatccccaaggcccagcagatgcacacaggccctgtgctggatgtgtgctggagcgatgatggcagcaaggtgttcaccgccagctgtgacaagacagccaagatgtgggacctgagcagcaaccaggccatccagatcgcccagcatgatgcccctgtgaagaccatccactggatcaagtag

SEQ ID NO: 322097 - DNA, 264 bp, Artificial Sequence
  derived and/or modified sequence
atgagcctgtttggcaccaccagcggcttcggcaccagcggcacctccatgtttggcagcgccaccacagacaaccacaaccccatgaaggacatcgaggtgaccagcagcccagatgacagcatcggctgcctgtccttcagcccccccaccctgcccggcaacttcctgattgctggctcctgggccaatgatgtgcgctgctgggaggtgcaggacagcggccagaccatccccaaggcccagcagatgcacactggatag

SEQ ID NO: 322098 - DNA, 414 bp, Artificial Sequence
  derived and/or modified sequence
atgagcctgttcggcaccaccagcggcttcggcaccagcggcacctcaatgttcggtagcgctacgaccgataaccataaccctatgaaggacatcgaggtaacttcttcacccgatgatagtatcggttgccttagcttcagccccccgacgctccccggcaactttctcatagccggcagctgggctaacgacgttaggtgttgggaggtccaagactctggacagaccatacctaaggctcagcagatgcacactgggcctgtattggatgtgtgttggtctgacgatggcagcaaggtcttcaccgccagctgtgataaaactgctaagatgtgggacttatcctcaaatcaggccatacagatagctcagcatgatgcccccgtgaaaacaatccattggataaagtag

SEQ ID NO: 322099 - DNA, 414 bp, Artificial Sequence
  derived and/or modified sequence
atgagcctgttcggcaccaccagcggcttcggcaccagcggcacctccatgttcggttctgctaccacggataaccataacccaatgaaggacattgaagtaacctccagccccgacgattctatcgggtgcctgagtttctctcctcctacccttcctgggaactttctcatcgcggggtcatgggctaacgacgtgagatgttgggaggtgcaggatagcgggcagacaattccaaaagcccagcagatgcataccggaccagtccttgacgtgtgttggagtgacgatggctctaaagtcttcaccgcttcctgcgataagacagccaagatgtgggacctgtcttccaaccaggcaatccaaatcgcacaacatgacgcccccgttaaaaccattcattggatcaagtag

SEQ ID NO: 322100 - DNA, 264 bp, Artificial Sequence
  derived and/or modified sequence
atgagcctgttcggcaccaccagcggcttcggcaccagcggcacctctatgttcggctccgccacaactgacaaccacaaccccatgaaggacatcgaagttaccagttcccccgacgactccataggctgcctgtcattctctcctcccactttgcctggcaattttctgattgcaggtagctgggcgaacgatgtaaggtgctgggaagttcaggattcagggcagactattcccaaggcacagcagatgcacaccgggtag

SEQ ID NO: 322101 - DNA, 414 bp, Artificial Sequence
  derived and/or modified sequence
atgagtctctttgggaccacttcaggcttcggcacttctggtacttcgatgttcggttccgcaaccacagataaccataaccctatgaaggacatagaagttactagctcccccgacgatagtattgggtgcctatcattttcacctcccactctccctggaaactttctcatcgcaggatcctgggccaatgacgtgcgctgctgggaggtgcaggacagtggacagacgatcccgaaagcccaacaaatgcataccggcccagtcttggatgtgtgttggtccgacgatgggagcaaggtgtttaccgcttcttgcgataaaaccgcaaaaatgtgggacctatctagtaaccaggcgatccagatcgcccagcacgacgcaccagtaaagaccattcactggatcaagtag

SEQ ID NO: 322102 - DNA, 414 bp, Artificial Sequence
  derived and/or modified sequence
atgagtctttttgggacaacctcaggcttcggtacatccggcacaagtatgtttggatctgccaccaccgacaatcataacccgatgaaggatattgaagtgacatcctcacctgatgacagcattggatgcctttcgttctccccaccgacgctgccaggcaattttctgattgccggaagttgggcaaatgatgtgagatgctgggaagtccaggattctgggcagacgattcctaaagctcagcagatgcacacaggccctgttcttgatgtgtgctggtctgacgacggctcaaaagtgttcaccgcctcatgcgataagaccgcaaagatgtgggatttaagcagtaaccaggctattcaaattgcacagcatgatgcaccagtcaaaaccatccactggattaagtag

SEQ ID NO: 322103 - DNA, 264 bp, Artificial Sequence
  derived and/or modified sequence
atgtcactattcggaacgacgtccgggtttggtacgtctggtacaagcatgtttggctcagccaccaccgataaccacaaccccatgaaagacattgaagtaacttcctcgccggacgattctatcgggtgtctcagcttttcaccacccacgctgccaggtaactttcttatcgcaggttcctgggccaacgatgtaaggtgctgggaggtgcaggatagcggacagactattcccaaagcacaacagatgcacaccggatag

SEQ ID NO: 322104 - DNA, 1107 bp, Artificial Sequence
  derived and/or modified sequence
atgagcctgttcggcaccaccagcggcttcggcaccagcggcaccagcatgttcggcagcgccaccaccgacaaccacaaccccatgaaggacatcgaggtgaccagcagccccgacgacagcatcggctgcctgagcttcagcccccccaccctgcccggcaacttcctgatcgccggcagctgggccaacgacgtgagatgctgggaggtgcaggacagcggccagaccatccccaaggcccagcagatgcacaccggccccgtgctggacgtgtgctggagcgacgacggcagcaaggtgttcaccgccagctgcgacaagaccgccaagatgtgggacctgagcagcaaccaggccatccagatcgcccagcacgacgcccccgtgaagaccatccactggatcaaggcccccaactacagctgcgtgatgaccggcagctgggacaagaccctgaagttctgggacaccagaagcagcaaccccatgatggtgctgcagctgcccgagagatgctactgcgccgacgtgatctaccccatggccgtggtggccaccgccgagagaggcctgatcgtgtaccagctggagaaccagcccagcgagttcagaagaatcgagagccccctgaagcaccagcacagatgcgtggccatcttcaaggacaagcagaacaagcccaccggcttcgccctgggcagcatcgagggcagagtggccatccactacatcaacccccccaaccccgccaaggacaacttcaccttcaagtgccacagaagcaacggcaccaacaccagcgccccccaggacatctacgccgtgaacggcatcgccttccaccccgtgcacggcaccctggccaccgtgggcagcgacggcagattcagcttctgggacaaggacgccagaaccaagctgaagaccagcgagcagctggaccagcccatcagcgcctgctgcttcaaccacaacggcaacatcttcgcctacgccagcagctacgactggagcaagggccacgagttctacaacccccagaagaagaactacatcttcctgagaaacgccgccgaggagctgaagcccagaaacaagaagtag

SEQ ID NO: 322105 - DNA, 1107 bp, Artificial Sequence
  derived and/or modified sequence
atgtctctatttggcaccacctcaggatttgggacgagcggaacctctatgttcggatccgcaaccaccgacaatcacaatcccatgaaggacatagaggtcacaagctctccagatgatagcatcggttgtttgtcattttctccgcctacccttcctggcaattttctgatcgccggttcatgggctaatgacgtgagatgttgggaggtacaggactccggacagaccattcccaaagcccagcagatgcataccgggcctgtccttgacgtgtgctggtccgatgacggcagtaaagtgttcacagctagctgcgataagaccgctaaaatgtgggacctatcttccaaccaggctatccaaatcgcacaacatgacgccccagtgaagacgatccattggataaaagcgcctaactacagctgtgtcatgaccgggtcctgggataagactttgaagttctgggacacccgtagcagcaatcccatgatggtgctgcagcttccggaaagatgctattgcgctgatgtcatctaccccatggctgtcgtggcaaccgcggaacgcgggctgatcgtgtaccaactcgagaaccaaccatcagaatttaggcgcattgaatctcccctcaagcatcagcaccgctgtgtggctatattcaaggacaagcagaacaaacccaccggcttcgctcttggatctatcgaaggccgggtggcgatccactatatcaacccaccaaatccagcgaaggacaacttcacattcaaatgccaccggagcaatgggacaaacacttctgcgcctcaggacatctatgcagtgaatggaattgcatttcatccagtgcacggaacactggccaccgttggatccgacggcaggttcagcttttgggataaagacgctcgcaccaagctgaaaacctcagagcagttagatcagcctatatcagcttgttgctttaaccacaatgggaatattttcgcatatgcgagcagctatgattggagcaaaggccatgagttttataatcctcagaagaagaattacatcttccttaggaatgctgccgaagagttaaaaccacggaacaagaagtag

SEQ ID NO: 322106 - DNA, 1107 bp, Artificial Sequence
  derived and/or modified sequence
atgagcttgttcggtacaacatctggcttcggcactagtggcacctctatgttcggttccgctactaccgacaaccataatcccatgaaggacatcgaggtaactagctccccagatgacagtataggctgcttgtcattcagtccgcctacgctccccgggaattttctgatcgctggctcctgggcaaatgacgtacgctgctgggaagtacaggactcggggcaaaccattcctaaagcacagcaaatgcacactggtccagtactggatgtgtgctggtccgacgatggaagcaaagtgttcacagctagctgcgataaaaccgccaagatgtgggaccttagctctaatcaggcaatccaaatcgctcagcacgacgcgccagtcaaaactattcactggattaaagctccaaactattcttgcgttatgacaggtagttgggataagacgttgaagttttgggacacgaggtctagtaacccaatgatggtcctgcaactgcccgagagatgttactgtgccgatgtcatttatcccatggccgtcgtggcgacagcagagcgtggactgattgtgtatcaactggaaaatcagcccagcgaatttcggcggatcgagtctcccctgaaacatcagcatcgatgtgtggcaatttttaaggacaaacagaataagccaaccggttttgctctcgggagcattgagggacgcgtggctattcattatattaatccacccaatcccgcgaaggataacttcacttttaagtgtcatagatcaaacggcaccaacacaagtgctccccaggacatttatgccgtcaacggcatcgcgtttcaccctgttcacgggactctggcgaccgttggtagtgacggacgcttcagtttttgggataaagatgccagaaccaaattgaaaacctctgagcaactagatcagcctatcagcgcatgctgttttaatcataacggtaatatatttgcatacgctagcagttatgattggtccaaaggccatgagttctataaccctcaaaaaaagaattatatttttctcagaaacgccgctgaggagctgaagccaaggaacaaaaagtag

SEQ ID NO: 322107 - DNA, 1107 bp, Artificial Sequence
  derived and/or modified sequence
atgtccctgtttgggaccaccagcgggttcggtacctccggcacctctatgtttggctcagctacaactgataaccacaaccctatgaaggacatcgaggtcacatcctcacccgacgacagtattggttgtctatcattcagccctcctactctgcccggtaactttttaattgccggctcttgggccaacgatgtgcgctgctgggaggtgcaggattccggccaaacgattcctaaagctcagcaaatgcacacaggtccagttcttgacgtgtgttggtctgatgacgggagcaaggtgtttaccgcttcatgtgacaagaccgccaagatgtgggatttatctagcaatcaggccatccagattgctcaacacgacgcaccggtgaaaactatccactggattaaggcacccaattactcttgtgtcatgaccggtagttgggacaaaaccttaaaattctgggatactagatcaagcaacccgatgatggtacttcagttgcctgaaagatgttattgtgccgatgttatctatccaatggctgtcgtggcaactgccgagcgcggcctgattgtgtatcagcttgagaaccagccaagtgaatttaggagaattgaatccccccttaaacaccaacaccgctgcgtggccatctttaaggacaaacaaaacaaaccgaccggcttcgccctgggctcaatagaggggagagtggctatccattacataaatccaccaaaccccgccaaggataattttacgtttaagtgccacagaagcaatgggactaatacgagtgccccccaagatatatatgccgtgaacggaatcgcttttcaccctgtgcacggcacacttgccacagtgggttctgacggacggttcagcttttgggacaaagacgcgaggaccaaattaaagacttctgaacagttagatcagcccatctctgcctgctgcttcaaccataacgggaatatctttgcatatgcctccagctatgactggagcaaggggcacgaattttacaacccacagaaaaaaaattatatctttctacgaaatgccgctgaggagctgaaacctagaaataaaaagtag

SEQ ID NO: 322108 - DNA, 2362 bp, Artificial Sequence
  derived and/or modified sequence
cgcaggaagtggctccagggcgcacgcgcgttgtttccgcggtagtcagggcagtttctaccgcaggcttaaggaggcttcgggctcctgggatttctgtccgcgctcctggccctcgtccttcgcgccagagcaggttcaaaatgagcctgtttggaacaacctcaggttttggaaccagtgggaccagcatgtttggcagtgcaactacagacaatcacaatcccatgaaggatattgaagtaacatcatctcctgatgatagcattggttgtctgtcttttagcccaccaaccttgccggggaactttcttattgcaggatcatgggctaatgatgttcgctgctgggaagttcaagacagtggacagaccattccaaaagcccagcagatgcacactgggcctgtgcttgatgtctgctggagtgacgatgggagcaaagtgtttacggcatcgtgtgataaaactgccaaaatgtgggacctcagcagtaaccaagcgatacagatcgcacagcatgatgctcctgttaaaaccatccattggatcaaagctccaaactacagctgtgtgatgactgggagctgggataagactttaaagttttgggatactcgatcgtcaaatcctatgatggttttgcaactccctgaaaggtgttactgtgctgacgtgatataccccatggctgtggtggcaactgcagagaggggcctgattgtctatcagctagagaatcaaccttctgaattcaggaggatagaatctccactgaaacatcagcatcggtgtgtggctatttttaaagacaaacagaacaagcctactggttttgccctgggaagtatcgaggggagagttgctattcactatatcaaccccccgaaccccgccaaagataacttcacctttaaatgtcatcgatctaatggaaccaacacttcagctcctcaggacatttatgcggtaaatggaatcgcgttccatcctgttcatggcacccttgcaactgtgggatctgatggtagattcagcttctgggacaaagatgccagaacaaaactaaaaacttcggaacagttagatcagcccatctcagcttgctgtttcaatcacaatggaaacatatttgcatacgcttccagctacgactggtcaaagggacatgaattttataatccccagaaaaaaaattacattttcctgcgtaatgcagccgaagagctaaagcccaggaataagaagtagtggctggagactctggctcagccagagttgtttctctccactctgcctcatctctgtacgaatttgggtcccagccttgttgggttgtcagccatggacatggatttcaacccctggagaaaacgatgtcattgttcagcagctgagagcccaggcgtccgcggcgacttgccgtctctccattccactgcctgttgcagagtttttctgtaactaagggggttgaggttattgtagacgttagattgcgggcaccgccagggattttgcagcgcttcagtgtacgtgttagagaatattggaaaagcgtctgtgagccccgtgctgtattttgtaataaagtcttttgcagattgcttcccgagcttcctttgtccttttctccccttgcccaccccgtaacctcaggaacatgcgtcctgcccagcatcagcgtggggttttgagttgagatttcagacaccctctgggaaatgcggcaaccttaggggaaagggagtccccagctgcgctcacttctgctgcgcggaacggcagcctctgtgagccctggtgggcagagtttgaatgtgtttttccttgcttccctcattcccatcttcaaaatccccagtgctttctggccttgctgctcagatttccgagtgactcaaatggggactgttacttgtgctgggtgacaggccatttgtgggtaacctcctaaggcccaagtgggtgacacttgcgtgactttcaagttagaacccaagccccctgcatgggaattgccctgaactcttacccaccccggtcccctgcatgggaattgccctgaaccctcagtagtggttgtttggctgttcttttgtattttgtgtaatttaaaattcctggttggtaagtattcaaaatgaaattcagctgggctgagaaaaagtgtgacttttgggtctgtcactgtatttctcacctgtgatctcaaatgcttcttaggcctttctgtttggactaatgtgtgaagtctgacttgctgagtgtaaaattctagtatcgatagtgttgtaagatgtgtttgcctactcataaaaaacaatgaaaataaaattttctactggaagagaccacctgca

SEQ ID NO: 322109 - DNA, 1107 bp, Artificial Sequence
  derived and/or modified sequence
atgagcctgtttggcaccaccagcggcttcggcaccagcggcacctccatgtttggcagcgccaccacagacaaccacaaccccatgaaggacatcgaggtgaccagcagcccagatgacagcatcggctgcctgtccttcagcccccccaccctgcccggcaacttcctgattgctggctcctgggccaatgatgtgcgctgctgggaggtgcaggacagcggccagaccatccccaaggcccagcagatgcacacaggccctgtgctggatgtgtgctggagcgatgatggcagcaaggtgttcaccgccagctgtgacaagacagccaagatgtgggacctgagcagcaaccaggccatccagatcgcccagcatgatgcccctgtgaagaccatccactggatcaaggcccccaactacagctgtgtgatgacaggctcctgggacaagaccctgaagttctgggacaccaggagcagcaaccccatgatggtgctgcagctgcctgagcgctgctactgtgctgatgtgatctaccccatggctgtggtggccacagctgagcggggcctgattgtgtaccagctggagaaccagcccagcgagttcagaagaattgagagccccctgaagcaccagcaccgctgtgtggccatcttcaaggacaagcagaacaagcccactggatttgccctgggcagcattgagggccgggtggccatccactacatcaacccccccaacccagccaaggacaacttcaccttcaagtgccacaggagcaatggcaccaacaccagcgccccccaggacatctatgctgtgaatggaattgccttccaccctgtgcacggcaccctggccaccgtgggcagtgatggccgcttctccttctgggacaaggatgcccggaccaagctgaagaccagcgagcagctggaccagcccatcagcgcctgctgcttcaaccacaacggcaacatctttgcctatgccagcagctatgactggagcaagggccacgagttctacaacccccagaagaagaactacatcttcctgagaaatgctgctgaggagctgaagcccaggaacaagaagtag

SEQ ID NO: 322110 - DNA, 2602 bp, Artificial Sequence
  derived and/or modified sequence
gcttcgttactgggccctggaagcgaggtcagagctggaaatggccttaggggtcacctagggcctaatccatcgtttctcttgtgggggaactgagcctctgggaagggtcacattgcgttaatgcagtgtgtgtcgcctctgtccctcccccttacacgtctggcgtctcgtcagatacatgtcagctcctgggagaagctttccctggccgctttgcagaagggcgtccccttttagcctcttccacgtcaacctgctccatttctttcgtagcagttaccagtctctgaaactaagtctgtttctgtcttagcccgccaagtatttattgtatacgtatataggtgccaccgtacaggcagtacttctccaggttcaaaatgagcctgtttggaacaacctcaggttttggaaccagtgggaccagcatgtttggcagtgcaactacagacaatcacaatcccatgaaggatattgaagtaacatcatctcctgatgatagcattggttgtctgtcttttagcccaccaaccttgccggggaactttcttattgcaggatcatgggctaatgatgttcgctgctgggaagttcaagacagtggacagaccattccaaaagcccagcagatgcacactgggcctgtgcttgatgtctgctggagtgacgatgggagcaaagtgtttacggcatcgtgtgataaaactgccaaaatgtgggacctcagcagtaaccaagcgatacagatcgcacagcatgatgctcctgttaaaaccatccattggatcaaagctccaaactacagctgtgtgatgactgggagctgggataagactttaaagttttgggatactcgatcgtcaaatcctatgatggttttgcaactccctgaaaggtgttactgtgctgacgtgatataccccatggctgtggtggcaactgcagagaggggcctgattgtctatcagctagagaatcaaccttctgaattcaggaggatagaatctccactgaaacatcagcatcggtgtgtggctatttttaaagacaaacagaacaagcctactggttttgccctgggaagtatcgaggggagagttgctattcactatatcaaccccccgaaccccgccaaagataacttcacctttaaatgtcatcgatctaatggaaccaacacttcagctcctcaggacatttatgcggtaaatggaatcgcgttccatcctgttcatggcacccttgcaactgtgggatctgatggtagattcagcttctgggacaaagatgccagaacaaaactaaaaacttcggaacagttagatcagcccatctcagcttgctgtttcaatcacaatggaaacatatttgcatacgcttccagctacgactggtcaaagggacatgaattttataatccccagaaaaaaaattacattttcctgcgtaatgcagccgaagagctaaagcccaggaataagaagtagtggctggagactctggctcagccagagttgtttctctccactctgcctcatctctgtacgaatttgggtcccagccttgttgggttgtcagccatggacatggatttcaacccctggagaaaacgatgtcattgttcagcagctgagagcccaggcgtccgcggcgacttgccgtctctccattccactgcctgttgcagagtttttctgtaactaagggggttgaggttattgtagacgttagattgcgggcaccgccagggattttgcagcgcttcagtgtacgtgttagagaatattggaaaagcgtctgtgagccccgtgctgtattttgtaataaagtcttttgcagattgcttcccgagcttcctttgtccttttctccccttgcccaccccgtaacctcaggaacatgcgtcctgcccagcatcagcgtggggttttgagttgagatttcagacaccctctgggaaatgcggcaaccttaggggaaagggagtccccagctgcgctcacttctgctgcgcggaacggcagcctctgtgagccctggtgggcagagtttgaatgtgtttttccttgcttccctcattcccatcttcaaaatccccagtgctttctggccttgctgctcagatttccgagtgactcaaatggggactgttacttgtgctgggtgacaggccatttgtgggtaacctcctaaggcccaagtgggtgacacttgcgtgactttcaagttagaacccaagccccctgcatgggaattgccctgaactcttacccaccccggtcccctgcatgggaattgccctgaaccctcagtagtggttgtttggctgttcttttgtattttgtgtaatttaaaattcctggttggtaagtattcaaaatgaaattcagctgggctgagaaaaagtgtgacttttgggtctgtcactgtatttctcacctgtgatctcaaatgcttcttaggcctttctgtttggactaatgtgtgaagtctgacttgctgagtgtaaaattctagtatcgatagtgttgtaagatgtgtttgcctactcataaaaaacaatgaaaataaaattttctactggaagagaccacctgca

SEQ ID NO: 322111 - DNA, 2639 bp, Artificial Sequence
  derived and/or modified sequence
gatcagcccgcctcggcctcccaaagtgctgggattacaggcgtgagccaccgcgcctggccagttgcggatttataaaagcagtcgcttagtaacttgcagcggctacatcaactttggaccaattcgcaaactgctggtgtaaagcgtttttgcgcatgtgctgtcgccttgcgggaaaaggagcctttttcttcgacgatttccgggcgacgcaggaagtggctccagggcgcacgcgcgttgtttccgcggtagtcagggcagtttctaccgcaggcttaaggaggcttcgggctcctgggatttctgtccgcgctcctggccctcgtccttcgcgccagagcaggttcgcaaactcctcagacccttctgctcccggccgccgctttccgccggggcgagacccccaggttcaaaatgagcctgtttggaacaacctcaggttttggaaccagtgggaccagcatgtttggcagtgcaactacagacaatcacaatcccatgaaggatattgaagtaacatcatctcctgatgatagcattggttgtctgtcttttagcccaccaaccttgccggggaactttcttattgcaggatcatgggctaatgatgttcgctgctgggaagttcaagacagtggacagaccattccaaaagcccagcagatgcacactgggcctgtgcttgatgtctgctggagtgacgatgggagcaaagtgtttacggcatcgtgtgataaaactgccaaaatgtgggacctcagcagtaaccaagcgatacagatcgcacagcatgatgctcctgttaaaaccatccattggatcaaagctccaaactacagctgtgtgatgactgggagctgggataagactttaaagttttgggatactcgatcgtcaaatcctatgatggttttgcaactccctgaaaggtgttactgtgctgacgtgatataccccatggctgtggtggcaactgcagagaggggcctgattgtctatcagctagagaatcaaccttctgaattcaggaggatagaatctccactgaaacatcagcatcggtgtgtggctatttttaaagacaaacagaacaagcctactggttttgccctgggaagtatcgaggggagagttgctattcactatatcaaccccccgaaccccgccaaagataacttcacctttaaatgtcatcgatctaatggaaccaacacttcagctcctcaggacatttatgcggtaaatggaatcgcgttccatcctgttcatggcacccttgcaactgtgggatctgatggtagattcagcttctgggacaaagatgccagaacaaaactaaaaacttcggaacagttagatcagcccatctcagcttgctgtttcaatcacaatggaaacatatttgcatacgcttccagctacgactggtcaaagggacatgaattttataatccccagaaaaaaaattacattttcctgcgtaatgcagccgaagagctaaagcccaggaataagaagtagtggctggagactctggctcagccagagttgtttctctccactctgcctcatctctgtacgaatttgggtcccagccttgttgggttgtcagccatggacatggatttcaacccctggagaaaacgatgtcattgttcagcagctgagagcccaggcgtccgcggcgacttgccgtctctccattccactgcctgttgcagagtttttctgtaactaagggggttgaggttattgtagacgttagattgcgggcaccgccagggattttgcagcgcttcagtgtacgtgttagagaatattggaaaagcgtctgtgagccccgtgctgtattttgtaataaagtcttttgcagattgcttcccgagcttcctttgtccttttctccccttgcccaccccgtaacctcaggaacatgcgtcctgcccagcatcagcgtggggttttgagttgagatttcagacaccctctgggaaatgcggcaaccttaggggaaagggagtccccagctgcgctcacttctgctgcgcggaacggcagcctctgtgagccctggtgggcagagtttgaatgtgtttttccttgcttccctcattcccatcttcaaaatccccagtgctttctggccttgctgctcagatttccgagtgactcaaatggggactgttacttgtgctgggtgacaggccatttgtgggtaacctcctaaggcccaagtgggtgacacttgcgtgactttcaagttagaacccaagccccctgcatgggaattgccctgaactcttacccaccccggtcccctgcatgggaattgccctgaaccctcagtagtggttgtttggctgttcttttgtattttgtgtaatttaaaattcctggttggtaagtattcaaaatgaaattcagctgggctgagaaaaagtgtgacttttgggtctgtcactgtatttctcacctgtgatctcaaatgcttcttaggcctttctgtttggactaatgtgtgaagtctgacttgctgagtgtaaaattctagtatcgatagtgttgtaagatgtgtttgcctactcataaaaaacaatgaaaataaaattttctactggaagagaccacctgca

SEQ ID NO: 322112 - DNA, 1107 bp, Artificial Sequence
  derived and/or modified sequence
atgagcctgttcggcaccaccagcggcttcggcaccagcggcaccagcatgttcggaagcgccaccacggacaatcacaatcccatgaaagacatcgaagtcacatcatctcccgatgacagtattggctgcctgtcttttagcccaccaacactgccaggaaatttcctgattgctggctcatgggctaatgacgtcagatgctgggaggtacaggacagtggacagactatccccaaagcacaacagatgcataccggacctgttctggacgtctgctggtctgacgatggaagcaaagtatttactgcttcatgtgacaaaaccgccaaaatgtgggatctaagcagtaatcaagctattcagattgcgcaacatgatgcccctgtgaaaaccatacactggataaaggctcccaactactcttgcgtaatgaccgggagttgggataaaacactcaagttctgggacactcggagctcgaatcccatgatggttctccagctccccgagcgatgctactgcgctgatgtcatctaccctatggccgtggtcgccacggcagagcgtggcctcatcgtgtaccagctggaaaatcagcctagtgagttcaggaggatcgagagtccactgaagcaccaacacaggtgcgtggctatcttcaaggacaagcagaacaaacccactggctttgctctcggcagcattgaaggacgggtggccattcactacattaaccctccgaatcctgccaaggataactttacatttaagtgccatagatcaaatggcaccaatacaagcgctccccaggatatatatgctgtgaatggcatagccttccaccccgtgcatggaacacttgctacagtgggaagtgatggccgcttcagcttttgggataaagacgcaaggacaaagctaaaaacaagtgagcagctggatcagccaatttccgcctgctgtttcaaccacaacggaaatatcttcgcatacgcaagttcatacgattggtcaaaggggcacgaattttataaccctcagaagaaaaattatatttttttgcgcaatgcggccgaggagttaaagcctagaaataaaaaatag

SEQ ID NO: 322113 - DNA, 1107 bp, Artificial Sequence
  derived and/or modified sequence
atgagcctgttcggcaccaccagcggcttcggcaccagcggcaccagcatgttcgggtctgcaacaactgataatcacaaccctatgaaggatatcgaggtgacaagcagtccagacgactccatcggctgtcttagctttagccctcccacactgcctggaaatttcctgatcgcagggagttgggccaatgatgttaggtgctgggaagttcaggactctgggcagacaattcctaaggcccaacaaatgcacaccgggcctgtcttggatgtgtgttggtctgatgacggctctaaggtgtttaccgccagttgcgataaaaccgctaagatgtgggacttgtcaagtaaccaagctatacagatagcccagcatgacgctcctgttaagaccattcactggatcaaagcccctaactactcgtgtgtcatgactggctcctgggacaagacattgaaattttgggacacccgatcctccaaccctatgatggtgctgcaactaccagaacggtgttactgtgccgatgtcatctatcctatggcagtcgtcgccaccgcagagagaggtctgattgtgtaccagctggaaaaccaaccaagcgagttccgtcggattgaatcacccttgaagcaccagcatcgctgcgtggccattttcaaggataagcagaacaaacccaccggcttcgcgcttggcagcattgaagggagagtagccattcactacattaaccctcctaatcccgccaaagacaatttcacttttaagtgtcacaggtcaaacgggactaataccagcgctccacaggatatatacgcagtgaacgggatcgcctttcacccagtgcacggcactctggctaccgtgggctctgacgggagattcagcttttgggacaaagatgccagaacaaaattgaagacatcagagcagctcgatcagccaatcagtgcctgttgctttaatcataatggcaacatctttgcctacgctagctcttacgattggtccaaaggccacgaattctataacccccaaaaaaaaaactatatattcctgaggaacgcggccgaggaactgaaaccccgcaataagaagtag

SEQ ID NO: 322114 - DNA, 1107 bp, Artificial Sequence
  derived and/or modified sequence
atgagcctgttcggcaccaccagcggcttcggcaccagcggcacctctatgttcgggtctgcaacgaccgacaaccataatcctatgaaagacattgaagttaccagctcgcctgacgactctatcggatgcctcagcttcagcccgcctacactgccggggaactttcttatcgccgggagttgggctaatgatgttcggtgctgggaagtgcaggattctggacagacgatccccaaggcacaacagatgcataccgggcccgtgctagacgtgtgctggagtgacgacggctccaaagtgtttacagctagctgcgataaaactgcgaaaatgtgggacctctcaagcaaccaggcaatccagatcgcccagcacgacgctcccgtcaagacaatccactggatcaaggctcctaactactcttgcgttatgactggctcctgggacaagacactaaagttctgggataccagaagcagcaatcctatgatggtcctgcagttgcctgagaggtgttactgcgctgatgtaatctacccaatggctgtcgtggctaccgctgaaagaggcctgatagtgtatcagctggagaaccaacctagcgagtttcgcaggatcgaaagtcctctgaaacaccagcatagatgcgtggcaatatttaaggacaaacagaataagcctaccggatttgcacttggtagcatcgagggaagagtcgcgatacactatatcaatcctccaaatccggctaaggacaattttacttttaaatgccataggagcaacggcacaaatacctccgccccacaggatatttatgcagtcaacggaattgcattccatccagtccacggaacactggctacagtgggctccgatggccggttttcgttctgggacaaggacgcccgcactaagctgaaaacatctgaacagctcgatcagccaatcagtgcctgttgtttcaaccataacggcaatattttcgcctacgcctccagctacgattggtccaaggggcacgaattctataacccccaaaaaaagaattacattttcctgaggaacgccgctgaggagctcaagcctcggaacaaaaagtag

SEQ ID NO: 322115 - DNA, 1107 bp, Artificial Sequence
  derived and/or modified sequence
atgtctctgttcgggaccacgagtggatttggtacctccggaacctctatgtttgggagcgccaccaccgataatcataatccaatgaaggatatagaagtgacctccagtcctgacgacagcatcggctgcctcagctttagtccccctaccctgccgggaaatttcctaatcgccggaagctgggcgaacgacgtcagatgttgggaggtacaggacagcggccagacaattcctaaggcccagcaaatgcataccggacctgtgctggacgtctgctggtccgacgatggctccaaggtgttcactgcatcctgcgataagaccgcaaaaatgtgggatctcagctccaatcaggccatccagattgctcagcatgatgcacctgtgaaaactatacactggatcaaagcacctaactatagttgtgttatgaccgggagctgggataaaaccctgaaattctgggatactaggagctccaatccgatgatggttctgcagctgccagagaggtgctactgcgctgacgtgatttatcccatggccgtagtcgccactgctgaaaggggactcatcgtttaccagctggagaatcaaccgtccgaattccggaggatagagagcccactgaaacaccagcatcgatgcgtggccatcttcaaagataagcagaataaacctaccggcttcgctctgggtagtattgaaggacgagtggccatacactacatcaatccacctaatcctgccaaagacaactttacatttaagtgccaccgatccaatgggactaacactagcgctccacaggatatctacgccgtaaacgggatcgccttccaccccgtgcacggcacgttagctacagtcggctccgatgggaggttctccttttgggacaaggatgctcgaacaaagctgaagacgtctgaacagctggaccagcccatttccgcttgctgctttaatcataatggcaacatcttcgcttacgcctccagttacgattggtcaaaggggcacgagttttacaacccccaaaagaagaactacatctttttgcggaacgcagcggaagaactgaagccccgaaacaaaaaatag

SEQ ID NO: 322116 - DNA, 1107 bp, Artificial Sequence
  derived and/or modified sequence
atgagcttgtttggcaccacgtcagggtttggaactagcggaaccagtatgtttgggagcgcaaccacagacaaccataaccctatgaaagacattgaggtcactagctcccctgacgactcgatcggctgtctgagtttctctccccctactctccctggcaattttctgatagcgggaagttgggccaacgacgtgcgatgctgggaggtgcaggactccggccagacaattcccaaagcccagcagatgcatactggcccagtgctggacgtatgctggagtgatgacggctccaaggtgttcactgcgagttgcgataaaacggctaagatgtgggacctatcttccaatcaggccattcaaatcgctcagcacgatgcccctgttaagacaatacactggatcaaagcccctaattattcgtgtgtcatgacgggcagctgggataagaccctcaagttttgggacaccaggtcctctaacccaatgatggtactgcagctcccggaaaggtgctactgtgccgacgttatttacccaatggcagtggttgccaccgcagagcgtgggctgattgtttatcaattagagaatcaaccatccgagtttcgcagaattgagtcaccattgaaacatcaacataggtgtgtcgccatctttaaagacaagcagaataagcctaccggcttcgctttaggatctatcgagggccgtgttgctattcactacatcaacccacccaacccagcaaaggataacttcacatttaaatgtcaccgttcaaacggcacaaatactagcgccccacaggacatctacgctgtcaatgggatcgccttccatccggtgcatggcaccctcgcgactgttggcagcgacggcagattttcgttctgggacaaggacgctcgaaccaagttaaagacctcggaacagctcgatcagccgatcagcgcttgctgtttcaaccataatggcaacattttcgcctacgcgagcagctatgattggagcaagggccatgaattttataaccctcagaagaagaattatatcttcctgcggaacgccgcagaggaattgaagccacggaataagaaatag

SEQ ID NO: 322117 - DNA, 1107 bp, Artificial Sequence
  derived and/or modified sequence
atgagtttgtttggcacaacatcaggttttgggactagtggtacgtctatgttcgggagtgccacaaccgacaaccacaaccctatgaaggatatcgaggttaccagtagccctgacgactcaattggatgtctgtccttctccccccctactctgcctggcaattttctgatcgcagggagttgggctaacgacgttaggtgttgggaggtgcaggattcgggccagaccatccccaaggcccaacagatgcacaccggccctgtgctcgatgtttgctggagcgacgatggaagtaaagtgtttactgctagctgcgataaaacagccaaaatgtgggacctttcctcaaaccaggctatccagatcgctcagcacgacgcccctgttaaaacgatacactggattaaagctccaaattactcatgcgtgatgactggttcctgggataagaccttaaaattttgggatactagaagttcaaatcccatgatggtgttgcaactacccgagcggtgctactgcgctgacgtgatctatcctatggcagtggtggccacagctgagcgcggtctcattgtttaccagctagaaaaccagcccagtgagttcagaagaatagagtcgcctctgaagcatcaacatcgatgtgtcgctatctttaaggataagcaaaacaagcctaccggctttgcgctcgggagcatcgaggggagggtggccatacactatataaacccaccgaaccctgcaaaggacaactttacattcaagtgccaccgttcgaatggcaccaacacaagcgccccacaggatatctatgcggtgaacggaatcgcattccacccagtgcacggtactctggcgactgtgggctccgatggccgtttctccttttgggataaggacgccagaactaagctaaagaccagtgaacaattagatcagcccataagtgcctgctgttttaaccacaacggcaatatctttgcctatgcctcttcatatgactggtctaagggacacgagttttataatccccagaagaaaaattatatattcctcaggaatgcggctgaagagcttaaaccgcgtaataaaaagtag

SEQ ID NO: 322118 - protein, 378 aa, Artificial Sequence
  derived and/or modified sequence
MEVHGNGKRPSPERREENSFDRDTIAPEPPAKRVCTISPAPRHSPALTVPLMNPGGQFHPTPPPLQHYTLEDIATSHLYREPNKMLEHREVRDRHHSLGLNGGYQDELVDHRLTEREWADEWKHLDHALNCIMEMVEKTRRSMAVLRRCQESDREELNYWKRRYNENTELRKTGTELVSRQHSPGSADSLSNDSQREFNSRPGTGYVPVEFWKKTEEAVNKVKIQAMSEVQKAVAEAEQKAFEVIATERARMEQTIADVKRQAAEDAFLVINEQEESTENCWNCGRKASETCSGCNIARYCGSFCQHKDWERHHRLCGQNLHGQSPHGQGRPLLPVGRGSSARSADCSVPSPALDKTSATTSRSSTPASVTAIDTNGL

SEQ ID NO: 322119 - DNA, 7449 bp, Artificial Sequence
  derived and/or modified sequence
ggagggagaaaaagagagagactgactgtatctggggattctggcaaggtgaagagctggtctgtttggcaggaccttcccatctgggatccatctgtgtttccctggaatgggacaggcagctctagtcagtgagaaatcgcagatgtgagagagctgacacatgtccagctaatgaaaggaggaggaaggctggtctccgattgagctttgaagattaggaggagaaaaagaggagctttggaatatctatttcaaataaatttggtgtatttaagaatctggattgtttataatttgggcatttgggttggtcctgagaaaagggtgccagcgatgcctggatcgcctgtggaagtgaagatacagtccagatcctcacctcccaccatgccacccctcccaccaataaatcctggaggaccgaggccagtgtccttcactcctactgcattaagcaatggcatcaaccattctcctcctaccctgaatggtgccccatcaccgccacagagattcagcaatggtcctgcctcctccacatcatctgcactcacaaatcagcaattgccagccacttgtggtgctcgacaactcagcaagttgaaacgctttcttaccactctgcaacagtttggcaatgacatctcccctgagattggggagaaggtgcggactcttgttcttgcactggtgaactcaacagtgacaattgaggaattccactgtaagctccaagaagccacaaactttccccttcgtccttttgtgattccatttctcaaggccaacctgcccctgctgcagcgggaactgctgcactgcgctcgggcggccaagcagaccccatcccagtacctggctcagcacgaacaccttctgctcaacacaagcattgcatcgcctgctgactcgtcagagttgctcatggaggtgcacggaaatgggaagaggcccagtccagagaggagagaagagaatagttttgatagagacacaattgctcctgagcctcctgccaagagagtatgtaccatcagccctgctcctcggcacagtcctgctctcactgtgcccctcatgaatcccgggggccaattccatcctacccctccacctcttcagcattacaccttagaggatattgcaacttctcacctgtatcgggaacccaacaagatgctagagcatcgagaagttcgtgatagacaccacagtcttggtctaaatggaggctatcaagatgagttggtagatcatcgtttgacagaaagggaatgggctgatgaatggaaacatcttgaccatgcgctgaattgcattatggaaatggtagagaaaacaaggcgctctatggcagttctgcggcgctgtcaggaatcagatcgtgaagaactcaactactggaaaagacggtacaatgaaaacacagagctgaggaaaacggggaccgagttggtctccaggcagcacagccctgggagtgcagattctctcagcaatgattctcagagagagttcaacagcaggccaggtacaggatacgtacctgtggagttttggaaaaaaacagaagaagctgtgaataaggtgaaaattcaggccatgtcagaagtacagaaggccgtcgctgaggcagagcagaaagcctttgaagtgattgcaacagagagagcacgaatggagcaaaccatagcggatgtcaagcggcaggccgcagaggatgctttcctcgtcatcaatgagcaagaggagtccacggagaactgctggaactgtggccgcaaagccagcgagacatgcagtggctgcaatatcgcgcgatactgtggctctttctgccagcacaaggactgggagcggcaccaccgcctctgtggtcagaacctgcatggccagagcccccacggccagggccggccgctgcttcctgtaggcaggggctcctctgccaggtccgccgactgcagcgtgcccagcccagccctcgacaagacctcggcaaccacatcgcgttcctcaacacctgcttctgtgacagctatcgacaccaacggactctgagccccggactctgcttaccctgatggctgctcagcaccacagagtgcttgggctgagggactgactgttggaacccgtgcatgtagctgccgggtcatcagcaagaaatgaattggaggcaggaagagtccaagcctgaataataacaccccacagcctctctgtgcacttgctgtctgcggagccagtgtgccattctctgcacatgggcagccagcctgagctgcctcctccatggctttcctggtttgttcctctctccactgaagctgacttagccggccccttttcagtgtagaccaccagctcccctccccatctccttgagtcagcagactgtccaatgtgctcagccaggctggaggcggcaggcggcaggcagcaggctgtggaggaggcccctcggtcagggagcggcctgcctcacccctgaatagctccttcggccccatctccatcctcagcagatgacactgattggcctcacggggacttgggtaagcaacaggcggcattcaggactcttctcaaccctgctgttcagacttgataagatctcagagtccacaggaaagaagtcactgttgcaataaaagcacccgtagtagcaaaaacataaaacaaataaaacttcccccacatcacagatgattttggacaagattttccaaccttgctggctactttagtttgggacctgttttttttctcatttgattttgcttgtgcagaaaatagtttccagcacatggattgatctgagagagaatgaggctcagttgtggatagtctgttttctctgagcatgttggccaactagtatcgtcaaattattgagtggatcatctcttggaaatgcagaacttctgccaccacttggctatttgcacagtcatcttgttctgtgtccttttatctctcagaccacacacatctggaacgctgtgggcatcttctgcccatgggctccatttggcacctgctgagccacagttgtcctgctggatgtgctgtgcaggttggtaggacttgcccccactgtcaaggcctggtctcatctgaaaagccctcctggacctcaaagaattcttcagacctcatagttacaggtcattatatctactatgttgatttatcatcaggcacacaacttctgtttccttctcttgtgttatctgatagcgtccctccttgagctcatcagaaaggttttatgaaatgtgaaccattttgggaaaagctgatcaatttttcttcctagcttcccattttcaaatgggacatcactcatatccctttcagaatgttaggaactgcctcccacattcttccctgtctttttgggttttgttttttgttgttgtggtggttttttaacacaaagtctcactctgttgcccaggctggagtgcagtggcatgatcttggctcactgcaacctctgccttccaggttcaagcaattctcctgcctcagcctcccgagtagctgagattacaggcgcccaccaccacgcccagctaatttttgtatttttagtagagacagggtttcaccatgttggccaggctgatctcgaactcctgacctcaggtgacctgccttggcctcccaaagtgcagggattacaagcgtgagccaccatgcccggcctgtctttttggttttgatgggagtctgaggaccccgacccctcctgctctccatctttgagcctctggcatcctctcacacccagaaatcagttggagtaagtttaattggccctgctccagctggcctttgaagcacaagtttaaatctccaccttctgtgcactgaccagagtctaaaataaaagttgtcagtaccataaaggaaaagggatccacacaggtagccttctccttggatacaggtacatcttactgtaagaatttcaagtcctggctgggcgcagtggctcactcctgtaatcccagcactttgagagaccgaggcaggcagatcacttgaggtcaggaattcaagaccaacctggccaacatggtgaaaccctgtctctaataaaaaaaaaatagaaaaatcagccgggtgtggtggcacacacctgtaatcctagctactcaggaggctgaggcaagagaatctcttgaacctgtgagccagaggttgcagtgagccgagattccaccactgcactccagcctgggcaacagagcaaaactctgtctcaaaaaaaaaaaaaaaaaggcaaaattaaagaatttcaagtccctaatttactctaaccaagcattttcagtcttacaaagaaatctagtgcacgacacctttaaaatgcctagatttccattgcctaaagtaaggtgtgaccagtgaaacaacagcagagaatcatgttcctttgctgtggaacacataagccccacagttttccagtcagcctaatacatgggtatcccccgaccccatctgcctccttaagccacagtccttggtggggaactctaagggggacggagtcagtaccccggacagggccacatttgcatgagacatggctgtctcacaggtcacagagccattacaacagcttactagtttttcatggatttgttggattaacaccttaagcaggttttttattgttattttgtttgtttgtttgttttgagacgggagtttctctcttgtctcccaggctggagtgcaatcgcgcaatctcggctcacggtaacctctgcctcccaggttcaagcgagtctcctgcctcagccttctgagtagctgggattacaggcatgcgccaccacgcccaactaattttgtatttttagtagagacggggtttctccttgttggtcaggctggtctcaaaccccggacctcaggtgatccccccaccttggcctcccaaagtgccaggattacaggcatgagccactgtgtccggtcttgagcaggtttttaaaatctccagtggccataaaactagccagggtagctcatgcttttactggttggaataaggagccaaaaccaacaaaataatatttattagggctcgatgcccatttctgtggctaaggcttaggtttggtgtgcagagcctggcctgctcttgtgggctgtggttgctgtgacagtttcgttttctgaatctttgtaatgctcttccaccctgctcgtgctgcccagaggctgatctgcaaacctgggcagtattccacactgaagctcagtttgcaaaccttctgctgtgttaattctggtcagtttcacacagaagtcacgagggcctctgcccaggaccttctattcacatttcaagaatccctttctgaaattctccaactctctggtcaggaggaggagcaccattggggcggggtaggcagctagaggcgcaggagcgaatccaggttccttgcgtggttcccagcctctgctgacagcacctcagctaccaggtggggagtggaaattcagcctgcttagaggactgacctctacagttcatatttgcagtgacataaaaggcaaagaggagctggcatggtggtacagaaggtatcagtcaagcgcaggctcttcagaaacctagaaactaaaaagagatgcaacatgtgactggccatcagccagacatgtctagggtgagaccagtgctcagcaccacccgccaaggaacactgatgagttgtgggacattatggtcggccaagtgaggaatgattgcagggaccagagaagaccaaagatgccagatgtccccagagtttcttgagggctgggtttcacgtctttgcttgtcctttttgtccccacttgcctgcaccgtgcctgactcatccagtggggaaggtgactcaagaagttgtttaagcctaggcctaggcagtccacttcgggaggtgggggcactccacactggggggccctgcagctccagggctggtgctctagcagatccgctcaggcacggttgggtgaccgtggggtcaccgattgcgtagattatttctagggcagtgctgggttagaaatgtctgtctggaaacaggacacatcttgccaccacaagtccacacctggccttggctgctgcccgctctctgcagcgtggatttcctttgcccatttgggccagaaggtcaccaggagttcatcactgcttagtgtcaacttgacatcttcagcttccagacagaaaacccatgctttactttgtacagccctgtcccagagttagtaagcctcggcttgtcacctgcttgcaaagggtatagacatcattctgggtagttctagaggatatcgcaacaagtgcgtttgaaggttcagcacagctggaattgtacggtagtgagctcttcaaaatgaaaacagaatgaccggatggccatctgtcctggaaactgtagaattgaataaatcactgaaaatagaacacttcttggaggctttcttcagaactgaactagaaacaaggtttccaggctcccaggtcagtagaccaaaccaacttccttagatttttttttttaagctgtttgcagaaaactgggtggtagcgtgtctgaaccaaacggaagaatagccagcggagcatggactgttccagcacgggccagatggccagctgtcgagagcagccctgcccagattgcggtgggggctgtgccagcggctccgcagggcccttccaactctggagtgtctgtagttcttgtgaaaccaaaacgttgactacctgcctctttcctcgggcatcgacgtgctcatttccaaagatgatggtgcaggtgaccttttccatcgtgagctaagagaaggttaggaggcctgaggggcgggccttgtgtcccctcctccccctccacagcccctgaggtggagcttccctcacagaccccatctggtcgagcctacggctgcccagtgtacactcagtgatgcttataccaaatagggcatgtgcgctggtgtctgttggggacagccccatccctaccttggagtcggcagagaagcagcaataagcattaggcgaatgattgaaagggctgctgcgccaagaggccttcagtccccttaacgtggctttccaacttcctgacgaggctacaaaggctccgctcacaaaagaaagccaataatgtaaataaatagaaaacgaagcctccacgcgtggtttttaaagggggatgatgaatgtgacaccacccacagaatgcattagaatctggtttttctgtgctttgtcattttactctgataggaatttttgttacctaactctgtgcataacttatttaatgtactgtataaatgaaccaaaactgttaaatatgtatttagtttgttctacttaaagtagtcaataaaaaggctatattcctt

SEQ ID NO: 322120 - DNA, 1728 bp, Artificial Sequence
  derived and/or modified sequence
atgccaggctcccctgttgaggtcaagatccagtctagaagttccccaccaacaatgcctcctcttcctccaattaaccccggcgggccacgtccagtgtccttcactcctaccgctctgagcaacgggatcaaccacagcccccccaccttgaatggggccccctctcctcctcagcgatttagcaacggacctgcaagctctacatcttccgcattaactaatcagcagctgccagccacctgcggcgccaggcagctctctaagctaaagcggtttctcacaactctgcagcagttcggaaatgacatctcgcccgaaataggcgaaaaagttcggacactggtcctggctctcgtgaactctactgtgaccatagaggaatttcactgcaagctgcaagaggcaaccaattttcctctccgcccctttgtgatcccattccttaaggccaacctccctctattacagagagagctcctacattgcgcgagagccgccaagcagaccccctctcagtatttggcccagcacgaacacctgttgcttaatacttcaatcgcttccccagcagattcttcagaactattgatggaggtgcacggcaatggaaaaaggccgtcccccgagaggagagaagaaaatagtttcgatagagataccatagcaccagagcctccagccaaaagagtgtgtacgatcagtccagcccctaggcactcaccggctctaaccgtaccattgatgaaccccggaggacagtttcaccctaccccaccacccctgcaacactataccctggaggacattgcaacaagtcatctctatagggaacctaataagatgttagaacaccgcgaggtaagagatcggcaccacagcctaggactgaatggaggctaccaggacgaactggtggatcatagattaactgaacgggaatgggctgatgaatggaaacatttagaccacgcactgaactgcattatggagatggtggaaaagacccgcagatctatggcagtattgaggaggtgtcaagagtctgacagggaggagctgaactactggaagagaaggtataacgaaaatactgagttaaggaaaacaggcacggaattggtctctcgacagcactccccaggttccgccgattctctcagtaatgactcacagcgcgagttcaactctaggccaggtacaggctacgtaccagttgaattctggaaaaaaactgaagaggcggtgaataaggtcaaaattcaagctatgagcgaggttcagaaggctgtcgccgaagccgaacagaaggcctttgaagtgatcgcgactgagcgggcccgtatggaacaaactatcgctgacgttaagaggcaagcagcagaagacgctttcttggtgataaacgaacaagaggagtcaactgagaactgctggaattgcggtcgcaaagcatccgaaacttgctctggctgcaacattgcccggtattgtgggagtttttgccagcataaggactgggaacggcatcatcgtctttgcggacaaaatcttcacggacagagtccacacgggcagggacgccccttgctccccgtgggaagaggctccagtgcccggtcagcagactgttcagtgccaagcccggctctggacaagaccagcgccactacatcacgttcgagcactcccgccagcgtaaccgccattgatactaacggcctgtag

SEQ ID NO: 322121 - DNA, 1137 bp, Artificial Sequence
  derived and/or modified sequence
atggaggtacacggcaacggcaagcgaccgtccccggaaagacgtgaggaaaattccttcgaccgggataccatcgccccggaaccacctgccaaaagagtgtgcactatcagtccagcaccgcgccactccccagcactgaccgtccccctgatgaaccctggcggccagtttcacccaaccccacccccactccagcattacacacttgaagatattgctacctcacacctttaccgcgaacccaataagatgctggagcaccgcgaggtgcgtgaccgacaccactctctggggcttaacggagggtatcaggatgagttggtggaccatagactgactgaacgcgagtgggcagacgaatggaagcatctggatcatgccctgaattgcataatggaaatggtggagaaaacacgcagaagcatggctgtgctgagacgctgccaggagagcgatagggaggagttgaattactggaagcggcgctacaacgagaatacggaattaagaaaaactgggactgagcttgtgagtcggcagcatagtcctggctcagcagatagtctgtcaaatgattctcaacgagaatttaatagccggcctggaacaggttacgtccccgtggaattctggaagaagaccgaggaggccgtgaataaggtgaaaattcaagctatgagcgaggtacagaaggctgttgctgaagcagaacagaaagcctttgaagtcatcgctaccgagcgtgcaaggatggaacagaccattgctgatgtcaaacgacaggcggctgaggacgcctttctggtaatcaacgagcaggaagaatcaaccgagaactgctggaactgcggaagaaaggcgtcagagacgtgtagtggctgcaatattgcacggtattgtggctctttctgtcaacataaggactgggagcgacatcaccgcctctgtggacagaatctccatggccaaagcccccatggacaggggcgccctctgctgcctgtaggacggggctcttccgctaggtcagcagattgctccgtgccatctccggcactcgacaagaccagcgccactacgtctaggtctagcacaccagcatcggtgactgcaatcgacaccaatgggctgtag

SEQ ID NO: 322122 - DNA, 1728 bp, Artificial Sequence
  derived and/or modified sequence
atgcctggcagccctgtggaggtgaagatccagagccgcagcagcccccccaccatgccacccctgccccccatcaaccctgggggccccaggcctgtgtccttcacccccacagccctgagcaatggcatcaaccacagcccccccaccctgaatggagcccccagccccccccagcgcttcagcaatggacctgccagcagcaccagcagcgccctgaccaaccagcagctgcctgccacctgtggggcccggcagctgagcaagctgaagcgcttcctgaccaccctgcagcagtttggaaatgacatcagccctgagatcggggagaaggtgaggaccctggtgctggccctggtgaacagcacagtgaccatcgaggagttccactgcaagctgcaggaggccaccaacttccccctgcggcccttcgtcatccccttcctgaaggccaacctgcccctgctgcagcgggagctgctgcactgtgcccgggccgccaagcagacccccagccagtacctggcccagcacgagcacctgctgctgaacaccagcatcgccagccctgctgacagcagcgagctgctgatggaggtgcatggaaatggcaagaggcccagccctgagcggcgggaggagaacagctttgaccgggacaccatcgcccctgagcccccagccaagagggtgtgcaccatcagccctgcccccaggcacagccctgccctgactgtgcccctgatgaaccctgggggccagttccaccccaccccaccacccctgcagcactacaccctggaggacatcgccaccagccacctgtaccgggagcccaacaagatgctggagcaccgggaggtgcgggacagacaccacagcctgggcctgaatggaggctaccaggatgagctggtggaccaccggctgacagagcgggagtgggcagatgagtggaagcacctggaccacgccctgaactgcatcatggagatggtggagaagaccaggaggtccatggctgtgctgcggcgctgccaggagagtgaccgggaggagctgaactactggaagaggcgctacaatgaaaatacagagctgaggaagacaggaacagagctggtgtcccggcagcacagccctggcagcgctgacagcctgagcaatgacagccagcgggagttcaacagcaggcctggcaccggctacgtgcctgtggagttctggaagaagacagaggaggccgtgaacaaggtgaagatccaggccatgtctgaggtgcagaaggctgtggccgaggccgagcagaaggcctttgaagtcatcgccacagagcgggccaggatggagcagaccatcgcagatgtgaagaggcaggccgcagaagatgccttcctggtgatcaatgagcaggaggagagcacagagaactgctggaactgtggcaggaaggccagcgagacctgcagcggctgcaacatcgcccgctactgcggcagcttctgccagcacaaggactgggagcggcaccaccggctgtgtggccagaacctgcacggccagagcccccacggccagggccggcccctgctgcctgtgggccggggcagcagcgcccggtctgctgactgcagcgtgcccagccctgccctggacaagaccagcgccaccaccagccgcagcagcaccccagcctctgtgacagccatcgacaccaacggcctgtag

SEQ ID NO: 322123 - DNA, 1137 bp, Artificial Sequence
  derived and/or modified sequence
atggaggtgcacggcaatggcaagaggcccagccctgagcggcgggaggagaacagctttgaccgggacaccatcgcccctgagcccccagccaagagggtgtgcaccatcagccctgcccccaggcacagccctgccctgactgtgcccctgatgaaccctgggggccagttccaccccaccccaccacccctgcagcactacaccctggaggacatcgccaccagccacctgtaccgggagcccaacaagatgctggagcaccgggaggtgcgggacagacaccacagcctgggcctgaatggaggctaccaggatgagctggtggaccaccggctgacagagcgggagtgggcagatgagtggaagcacctggaccacgccctgaactgcatcatggagatggtggagaagacccggcgctccatggctgtgctgcggcgctgccaggagagtgaccgggaggagctgaactactggaagaggcgctacaatgaaaatacagagctgaggaagacaggaacagagctggtgtcccggcagcacagccctggcagcgctgacagcctgagcaatgacagccagcgggagttcaacagccggcccggcaccggctacgtgcctgtggagttctggaagaagacagaggaggccgtgaacaaggtgaagatccaggccatgtctgaggtgcagaaggctgtggccgaggccgagcagaaggcctttgaggtgattgccacagagcgggccaggatggagcagaccatcgcagatgtgaagaggcaggccgcagaagatgccttcctggtgatcaatgagcaggaggagagcacagagaactgctggaactgtggcaggaaggccagcgagacctgcagcggctgcaacatcgcccgctactgcggcagcttctgccagcacaaggactgggagcggcaccaccggctgtgtggccagaacctgcacggccagagcccccacggccagggccggcccctgctgcctgtgggccggggcagcagcgcccggtctgctgactgcagcgtgcccagccctgccctggacaagaccagcgccaccaccagccgcagcagcaccccagcctctgtgacagccatcgacaccaacggcctgtag

SEQ ID NO: 322124 - DNA, 1728 bp, Artificial Sequence
  derived and/or modified sequence
atgcccggcagccccgtggaggtgaagatccagagccggagcagcccaccgactatgcccccccttccacctataaatccaggcgggccacggcctgtgagctttactcctacggcactctcgaatggcatcaaccattctccacctaccctcaacggggccccgtctcctcctcagcggtttagtaacggccccgcctctagcacatcgtctgctcttactaatcagcagttgccagcaacatgcggcgctagacagctgagcaagcttaaacggtttttaaccaccctgcagcagtttggtaatgatatttccccagaaattggggagaaggtcaggacacttgtattggcgctggttaattctaccgtgaccatcgaggaatttcactgcaagttgcaggaagctaccaattttccactacgcccgtttgtgattcctttcctcaaagcaaatcttcccttgctgcagagagagctgcttcactgcgctcgcgccgcaaagcagactccaagccagtacctggcgcagcacgaacatctcctactcaatacctcaatcgcctctccagccgattcatcagagctgctgatggaagtgcatggtaacggaaaaaggccctcccctgagcgacgggaggaaaacagcttcgacagggataccattgctcctgagcccccagcgaagcgagtgtgcacaatatctcccgctcctcggcatagccccgcacttaccgtcccgttgatgaaccctgggggacaatttcaccccactcccccgccactgcaacattacaccctggaggacattgcgacaagtcacttgtaccgggaaccaaataaaatgttggaacatagggaagtgagagatcgacaccactcactcgggttgaacgggggataccaagatgagttggtagaccaccgtcttaccgaacgggagtgggctgacgagtggaagcacttggaccacgctctcaactgtatcatggagatggttgaaaagacaagacgaagtatggcggtgctccgcagatgtcaggagagcgacagggaggaattgaactactggaaacgccgctacaacgaaaataccgaactcaggaaaactgggaccgagctagtgtccagacagcatagtcctggctctgccgatagtctcagcaacgattcccaaagagagttcaactcccgcccgggcacagggtacgtaccggtggaattttggaaaaaaactgaggaggcggtgaataaggtgaaaattcaggcaatgagcgaggtgcagaaggccgttgcggaggccgagcagaaggccttcgaggtcatcgccacggagcgagcccggatggagcagaccatagccgatgtgaaacggcaggccgccgaagacgctttcttagtcataaacgaacaagaggagtccacggagaactgttggaactgcggcaggaaggccagtgaaacctgcagtggatgcaatatagcaaggtattgcgggagcttctgccaacacaaggattgggagcggcatcaccggttatgtggccagaaccttcacggccagtctcctcatggacagggccgccctctgttgcccgttggccggggaagtagcgcacgaagcgctgactgctccgtgccgagccccgctctcgacaagacttcagcaaccacctcaagatccagcacgcccgcttcggtcaccgcgattgacacaaatgggctctag

SEQ ID NO: 322125 - DNA, 1137 bp, Artificial Sequence
  derived and/or modified sequence
atggaggtgcacggcaacggcaagcggcccagccccgagcggcgggaagaaaactcgtttgacagagataccatagccccagaaccacccgcaaagagagtatgtaccatctctcccgcccccagacactcccccgccttaacagtccccctcatgaatccaggaggtcagttccacccaacccctccaccactccagcattatactctggaggatattgccactagccacttgtatcgggaacccaacaaaatgctggaacaccgcgaggtgcgtgataggcaccactccctgggcctcaacgggggttaccaggacgagttggttgatcatcggctgaccgagcgagagtgggccgacgaatggaagcacttagaccatgcgctgaattgcatcatggaaatggtggaaaaaactagaaggagcatggccgtcctgcgacggtgtcaggagtccgatcgagaagagctgaattactggaagcgtaggtacaatgaaaataccgaactgcggaaaaccggtactgagctggtttcacgacagcactctccaggatctgctgattctctttcaaacgattcccagagagaatttaactcccgtccaggaacaggatatgtacccgtcgaattttggaaaaaaacagaagaggcagtgaacaaggtcaagatacaggctatgtccgaagtccaaaaggctgtggcagaggctgagcagaaggcctttgaggtgatcgctactgagcgcgcccgcatggagcagactatcgccgacgtcaagagacaggccgctgaggatgcctttctggttatcaacgaacaagaagaaagcaccgagaattgctggaactgtgggcgtaaggcctctgagacgtgctcaggatgtaatatcgccaggtactgtggcagcttttgccagcacaaggattgggaaagacaccatcggctctgtggccagaacctgcacggtcagtccccacacggacagggtcgaccccttctccccgttggccggggtagctcagccaggagtgcagattgcagtgttcctagtcctgcactggataaaacttctgccacaacatcacggtctagcaccccagcaagtgtgacagcgatcgatactaatgggctgtag

SEQ ID NO: 322126 - DNA, 1728 bp, Artificial Sequence
  derived and/or modified sequence
atgcccggaagccccgtggaagtgaagatccagagtcgtagcagtcctcccactatgcccccactgcctcccatcaatcccggaggacccaggcccgttagctttacgccgacagccctgagtaacggaatcaatcactcgccaccaactctcaacggagccccatcgccccctcagagattctccaacggcccagcaagttctactagcagtgcccttactaatcagcaacttccagccacatgcggagctaggcagctatccaagttaaagcggttcttgacaacccttcagcagtttgggaacgacatatctcctgagatcggggagaaggttaggaccttggttcttgccctggtgaacagcactgttactatcgaggagtttcattgcaaactgcaggaggctacgaatttccctctccggcctttcgtgatcccctttttgaaagctaacctacctctgctgcagcgggagctgctccactgcgcacgggcagccaaacaaacccccagtcaatacctggcacagcacgagcatcttctgctgaacacctccatcgcgagccccgctgacagcagtgaactgctgatggaagtgcatgggaatggaaagcgacccagcccagagcgcagagaagaaaattcatttgatcgcgatacgatcgctccagagccgcctgcgaaaagggtctgcactatcagtccagccccaagacactctccagcgctgacagtaccattgatgaatcctgggggacagtttcatcccactcctccgccactgcagcattacactctggaggacatagcgacaagccacttgtatcgggagcccaataagatgctcgaacaccgcgaggtcagagatcgccaccactctctcggcctgaatggcggttaccaggacgagctggtggaccaccggctcactgagagggagtgggccgatgaatggaagcacctggaccatgccctgaattgtattatggaaatggttgagaagaccagacgaagtatggcagtgcttcgcaggtgccaggaatctgatagggaagagctgaattactggaagcgacgctacaacgaaaacacggagctccgcaaaactgggaccgagctggtgagtaggcaacatagcccaggatctgctgactcactgtcaaatgactcccaaagagagttcaatagcaggcccggaactggctacgtacccgttgagttctggaagaagacagaggaggccgtcaataaggtgaaaatacaggctatgtccgaggtgcagaaggccgtagcggaggcggagcagaaagccttcgaggtgattgcaacggaacgcgctagaatggaacagaccatcgcagacgtaaagcggcaggccgcagaagacgccttcctcgttattaacgaacaggaagagagcactgagaactgctggaactgcgggaggaaggctagtgagacttgcagtggttgtaatattgctcgctactgcggttccttctgtcaacacaaggactgggaaaggcaccacagactgtgcggccagaatctacacgggcagtcacctcatggccagggtaggccactgttaccagtgggcaggggctcttctgcaaggagcgctgattgttcagtgccatcacccgctctggacaagacaagcgctactactagcagatcttccacaccggcttctgtgaccgcgatcgacactaacggactctag

SEQ ID NO: 322127 - DNA, 1137 bp, Artificial Sequence
  derived and/or modified sequence
atggaggtacatggtaatggcaaacgccctagtccagagcggagggaagaaaatagctttgacagggatactatcgcgcctgagccccctgcgaagagagtgtgtaccattagcccggcaccacgccattctccagccctcacagttcccctcatgaaccctggcggtcagtttcatcctaccccaccgccactccaacactacacacttgaggatattgccacctcccatctgtacagagaaccgaacaagatgcttgaacaccgagaggtacgtgaccgacaccactctttagggctgaatggcggttaccaggacgagttggtggaccaccgtctgaccgagagagagtgggccgacgagtggaagcatctggatcacgcactcaactgtatcatggagatggtggagaagactcgtcgctcaatggccgtacttcgtaggtgtcaggagtctgatagagaggaactcaactattggaaacgacgatacaacgaaaatacagagctgaggaagactggcacggaactcgtgtctaggcagcattcccctggatctgcggacagcctcagtaatgacagtcagagagaatttaattctcgccctggaaccggatacgtgccagtggaattctggaagaagacagaagaggccgttaacaaagtgaagatccaagcaatgtccgaggtgcagaaggctgttgccgaagcagagcaaaaagcctttgaagtaatcgccacagagagggccagaatggaacagacgattgctgatgtgaagagacaagctgctgaagacgcttttctggttatcaatgagcaggaagaaagtaccgaaaactgctggaactgtgggaggaaggcatccgagacatgctctggttgtaacatagcacgctattgtgggagcttttgccaacacaaggattgggagcgccaccacaggttgtgtggacagaacctgcatggacagagcccacatggccaggggaggcccctactgccggttggacggggatcttctgcccgttcggccgattgttcagttccaagtcctgccttggacaaaacttctgcaacaacgagtcgttcttcaacgcccgcatctgtaactgccatcgacactaatggcctgtag

SEQ ID NO: 322128 - DNA, 1883 bp, Artificial Sequence
  derived and/or modified sequence
gcggcctaacggcggcggcggcggcggcgacggcgacagcagcggtggtggtgtctggttagctcggcggctgcagatctcgcggcgacgcctgcgagggacccgggccgcgggtcgaggcgggcggcgcctgcgagggacccgtgtcgcgggtagaggcgggcggcgcgcggcggcggcgctcggcgatggtaggcgtccctggagcggccgccttccagcaactcaacagtgacaattgaggaattccactgtaagctccaagaagccacaaactttccccttcgtccttttgtgattccatttctcaaggccaacctgcccctgctgcagcgggaactgctgcactgcgctcgggcggccaagcagaccccatcccagtacctggctcagcacgaacaccttctgctcaacacaagcattgcatcgcctgctgactcgtcagagttgctcatggaggtgcacggaaatgggaagaggcccagtccagagaggagagaagagaatagttttgatagagacacaattgctcctgagcctcctgccaagagagtatgtaccatcagccctgctcctcggcacagtcctgctctcactgtgcccctcatgaatcccgggggccaattccatcctacccctccacctcttcagcattacaccttagaggatattgcaacttctcacctgtatcgggaacccaacaagatgctagagcatcgagaagttcgtgatagacaccacagtcttggtctaaatggaggctatcaagatgagttggtagatcatcgtttgacagaaagggaatgggctgatgaatggaaacatcttgaccatgcgctgaattgcattatggaaatggtagagaaaacaaggcgctctatggcagttctgcggcgctgtcaggaatcagatcgtgaagaactcaactactggaaaagacggtacaatgaaaacacagagctgaggaaaacggggaccgagttggtctccaggcagcacagccctgggagtgcagattctctcagcaatgattctcagagagagttcaacagcaggccaggtacaggatacgtacctgtggagttttggaaaaaaacagaagaagctgtgaataaggtgaaaattcaggccatgtcagaagtacagaaggccgtcgctgaggcagagcagaaagcctttgaagtgattgcaacagagagagcacgaatggagcaaaccatagcggatgtcaagcggcaggccgcagaggatgctttcctcgtcatcaatgagcaagaggagtccacggagaactgctggaactgtggccgcaaagccagcgagacatgcagtggctgcaatatcgcgcgatactgtggctctttctgccagcacaaggactgggagcggcaccaccgcctctgtggtcagaacctgcatggccagagcccccacggccagggccggccgctgcttcctgtaggcaggggctcctctgccaggtccgccgactgcagcgtgcccagcccagccctcgacaagacctcggcaaccacatcgcgttcctcaacacctgcttctgtgacagctatcgacaccaacggactctgagccccggactctgcttaccctgaataataacaccccacagcctctctgtgcacttgctgtctgcggagccagtgtgccattctctgcacatgggcagccagcctgagctgcctcctccatggctttcctggtttgttcctctctccactgaagctgacttagccggccccttttcagtgtagaccaccagctcccctccccatctccttgagtcagcagactgtccaatgtgctcagccaggctggaggcggcaggcggcaggcagcaggctgtggaggaggcccctcggtca

SEQ ID NO: 322129 - DNA, 1728 bp, Artificial Sequence
  derived and/or modified sequence
atgcccggcagccccgtggaggtgaagatccagagcagaagcagcccccccaccatgccccccctgccccccatcaaccccggcggccccagacccgtgagcttcacccccaccgccctgagcaacggcatcaaccacagcccccccaccctgaacggcgcccccagccccccccagagattcagcaacggccccgccagcagcaccagcagcgccctgaccaaccagcagctgcccgccacctgcggcgccagacagctgagcaagctgaagagattcctgaccaccctgcagcagttcggcaacgacatcagccccgagatcggcgagaaggtgagaaccctggtgctggccctggtgaacagcaccgtgaccatcgaggagttccactgcaagctgcaggaggccaccaacttccccctgagacccttcgtgatccccttcctgaaggccaacctgcccctgctgcagagagagctgctgcactgcgccagagccgccaagcagacccccagccagtacctggcccagcacgagcacctgctgctgaacaccagcatcgccagccccgccgacagcagcgagctgctgatggaggtgcacggcaacggcaagagacccagccccgagagaagagaggagaacagcttcgacagagacaccatcgcccccgagccccccgccaagagagtgtgcaccatcagccccgcccccagacacagccccgccctgaccgtgcccctgatgaaccccggcggccagttccaccccacccccccccccctgcagcactacaccctggaggacatcgccaccagccacctgtacagagagcccaacaagatgctggagcacagagaggtgagagacagacaccacagcctgggcctgaacggcggctaccaggacgagctggtggaccacagactgaccgagagagagtgggccgacgagtggaagcacctggaccacgccctgaactgcatcatggagatggtggagaagaccagaagaagcatggccgtgctgagaagatgccaggagagcgacagagaggagctgaactactggaagagaagatacaacgagaacaccgagctgagaaagaccggcaccgagctggtgagcagacagcacagccccggcagcgccgacagcctgagcaacgacagccagagagagttcaacagcagacccggcaccggctacgtgcccgtggagttctggaagaagaccgaggaggccgtgaacaaggtgaagatccaggccatgagcgaggtgcagaaggccgtggccgaggccgagcagaaggccttcgaggtgatcgccaccgagagagccagaatggagcagaccatcgccgacgtgaagagacaggccgccgaggacgccttcctggtgatcaacgagcaggaggagagcaccgagaactgctggaactgcggcagaaaggccagcgagacctgcagcggctgcaacatcgccagatactgcggcagcttctgccagcacaaggactgggagagacaccacagactgtgcggccagaacctgcacggccagagcccccacggccagggcagacccctgctgcccgtgggcagaggcagcagcgccagaagcgccgactgcagcgtgcccagccccgccctggacaagaccagcgccaccaccagcagaagcagcacccccgccagcgtgaccgccatcgacaccaacggcctgtag

SEQ ID NO: 322130 - DNA, 1137 bp, Artificial Sequence
  derived and/or modified sequence
atggaggtgcacggcaacggcaagagacccagccccgagagaagagaggagaacagcttcgacagagacaccatcgcccccgagccccccgccaagagagtgtgcaccatcagccccgcccccagacacagccccgccctgaccgtgcccctgatgaaccccggcggccagttccaccccacccccccccccctgcagcactacaccctggaggacatcgccaccagccacctgtacagagagcccaacaagatgctggagcacagagaggtgagagacagacaccacagcctgggcctgaacggcggctaccaggacgagctggtggaccacagactgaccgagagagagtgggccgacgagtggaagcacctggaccacgccctgaactgcatcatggagatggtggagaagaccagaagaagcatggccgtgctgagaagatgccaggagagcgacagagaggagctgaactactggaagagaagatacaacgagaacaccgagctgagaaagaccggcaccgagctggtgagcagacagcacagccccggcagcgccgacagcctgagcaacgacagccagagagagttcaacagcagacccggcaccggctacgtgcccgtggagttctggaagaagaccgaggaggccgtgaacaaggtgaagatccaggccatgagcgaggtgcagaaggccgtggccgaggccgagcagaaggccttcgaggtgatcgccaccgagagagccagaatggagcagaccatcgccgacgtgaagagacaggccgccgaggacgccttcctggtgatcaacgagcaggaggagagcaccgagaactgctggaactgcggcagaaaggccagcgagacctgcagcggctgcaacatcgccagatactgcggcagcttctgccagcacaaggactgggagagacaccacagactgtgcggccagaacctgcacggccagagcccccacggccagggcagacccctgctgcccgtgggcagaggcagcagcgccagaagcgccgactgcagcgtgcccagccccgccctggacaagaccagcgccaccaccagcagaagcagcacccccgccagcgtgaccgccatcgacaccaacggcctgtag

SEQ ID NO: 322131 - DNA, 792 bp, Artificial Sequence
  derived and/or modified sequence
atgccgggcagtcccgtagaggtgaagatccagagtagaagcagtccccccactatgcctccactgccacccattaatccaggcggcccacggccagtgtcttttacccccactgccttgtccaacgggattaatcatagtcctcccactttgaacggcgcaccctcacccccccaacgcttcagcaacggacctgccagttccacctcttctgctctaactaaccagcagttgccggctacttgtggcgcccggcaattgagcaagctcaagcggtttctgacaacacttcagcaattcggtaacgacattagccccgaaattggcgagaaagtgcgtacccttgtccttgcgcttgtgaatagcaccgtgaccatcgaggagtttcactgcaagttgcaggaagcaactaactttccactgaggccctttgtgatcccattcctaaaggcaaacctcccgttgctgcagcgagagctgttgcactgcgcgagagctgccaagcaaactcctagccagtatctcgcgcagcacgagcacctgctgttgaataccagtatcgcgtccccagccgatagtagcgaactcctgatggaggtccatggcaatgggaaaaggccaagcccggagagttgcatcattcacctcaaaagtatgggcgtagcatccagacacgagtacttttccgggacccttcagatgccggcccaccctgttagaaattctactcttgaaaatttgtgggttgactgttcccgatccctgcggtcaactgtgcttccgttcccttag

SEQ ID NO: 322132 - DNA, 792 bp, Artificial Sequence
  derived and/or modified sequence
atgcctggcagccctgtggaggtgaagatccagagccgcagcagcccccccaccatgccacccctgccccccatcaaccctgggggccccaggcctgtgtccttcacccccacagccctgagcaatggcatcaaccacagcccccccaccctgaatggagcccccagccccccccagcgcttcagcaatggacctgccagcagcaccagcagcgccctgaccaaccagcagctgcctgccacctgtggggcccggcagctgagcaagctgaagcgcttcctgaccaccctgcagcagtttggaaatgacatcagccctgagatcggggagaaggtgaggaccctggtgctggccctggtgaacagcacagtgaccatcgaggagttccactgcaagctgcaggaggccaccaacttccccctgcggcccttcgtcatccccttcctgaaggccaacctgcccctgctgcagcgggagctgctgcactgtgcccgggccgccaagcagacccccagccagtacctggcccagcacgagcacctgctgctgaacaccagcatcgccagccctgctgacagcagcgagctgctgatggaggtgcatggaaatggcaagaggcccagccctgagagctgcatcatccacctgaagtccatgggcgtggccagcagacatgagtacttcagcggcaccctgcagatgcctgcccaccctgtgaggaacagcaccctggagaacctgtgggtggactgcagccgcagcctgcggagcacagtgctgcccttcccctag

SEQ ID NO: 322133 - DNA, 792 bp, Artificial Sequence
  derived and/or modified sequence
atgcccggcagccccgtggaggtgaagatccagagccggagcagcccacctacgatgccaccgcttccgccgatcaaccccgggggcccacgaccagtctcttttacgcccaccgcactgtctaatggcatcaatcattcaccacccaccctaaacggtgccccaagcccacctcagcgcttttctaacggcccagcaagctcaactagtagtgccttgactaaccagcagctaccagctacatgcggcgccaggcaactgagtaagttgaagcgcttcctgactaccctgcagcaatttggaaatgatatcagcccagagatcggcgagaaggttcgaacactcgtgttagccctggtcaatagtactgtcaccattgaagaatttcactgcaaactgcaggaagcgacaaattttccgctccgtccgttcgtgatcccattcctgaaggcaaacctacctcttttgcaacgcgagctccttcactgtgctcgcgccgccaagcagacccctagtcagtacctggcacagcacgaacacctcctgttgaatacctctatcgcatcacctgctgactccagcgagcttctgatggaggtacatggaaacggcaagcggccctctcctgaatcatgcattatccacctaaaatccatgggcgtggccagccgacatgagtacttttcggggacgctccaaatgccagctcatccagtacgcaactccacgcttgagaacctgtgggtggattgctcaaggtcgttaagatccaccgtactgcccttcccttag

SEQ ID NO: 322134 - DNA, 792 bp, Artificial Sequence
  derived and/or modified sequence
atgcctggaagccctgtggaggtgaagatacagagccggtcttccccccctactatgcccccattgccccctatcaaccccggaggaccgcgaccagtgagttttactcctaccgctctctctaacgggatcaaccattcccctcccactttaaacggcgcaccgtcccctcctcagcgatttagcaacggacccgcatcatccacctcttctgcactgactaatcagcagttgccagccacctgtggagcacgacagctttccaaactcaagcgtttccttactaccctccagcagtttgggaatgacataagccccgagataggcgaaaaagtacgcacacttgtgctggctttagtgaatagcaccgtcaccattgaggaattccattgcaagctgcaagaggccactaatttcccattgcgcccttttgtaataccattccttaaagcaaatctcccgctccttcagagagagctgctgcactgtgccagggccgctaaacagactccttctcagtatcttgcccagcacgagcacttgttgctaaacacatccatcgcttcacccgcagattctagtgagctgctgatggaagtgcacggaaacggaaaaagaccctcacccgagtcatgcattattcaccttaaatcgatgggtgtcgcttctagacacgagtatttttccggcaccctccagatgcctgcccaccctgtcagaaactccacactggaaaatctctgggtggactgctctcgcagcctgaggtcgaccgtcttaccattcccctag

SEQ ID NO: 322135 - DNA, 792 bp, Artificial Sequence
  derived and/or modified sequence
atgcccggcagccccgtggaggtgaagatccagagcagaagcagcccccccaccatgccccccctgccccccatcaaccccggcggccccagacccgtgagcttcacccccaccgccctgagcaacggcatcaaccacagcccccccaccctgaacggcgcccccagccccccccagagattcagcaacggccccgccagcagcaccagcagcgccctgaccaaccagcagctgcccgccacctgcggcgccagacagctgagcaagctgaagagattcctgaccaccctgcagcagttcggcaacgacatcagccccgagatcggcgagaaggtgagaaccctggtgctggccctggtgaacagcaccgtgaccatcgaggagttccactgcaagctgcaggaggccaccaacttccccctgagacccttcgtgatccccttcctgaaggccaacctgcccctgctgcagagagagctgctgcactgcgccagagccgccaagcagacccccagccagtacctggcccagcacgagcacctgctgctgaacaccagcatcgccagccccgccgacagcagcgagctgctgatggaggtgcacggcaacggcaagagacccagccccgagagctgcatcatccacctgaagagcatgggcgtggccagcagacacgagtacttcagcggcaccctgcagatgcccgcccaccccgtgagaaacagcaccctggagaacctgtgggtggactgcagcagaagcctgagaagcaccgtgctgcccttcccctag

SEQ ID NO: 322136 - DNA, 459 bp, Artificial Sequence
  derived and/or modified sequence
atgagcgaggtgcagaaggctgtcgccgaagcggagcagaaggcttttgaggtgattgccactgagcgagccaggatggagcaaactatcgctgacgttaagcggcaagccgcagaggacgcatttttagtcataaacgaacaggaggagagcactgagaactgttggaactgcggtcgcaaggccagcgaaacgtgtagcggctgtaatattgcacggtattgcggcagtttctgtcaacacaaggactgggagagacatcatagactgtgcggtcagaacctgcacggccagtctccacatggccaagggcgcccgcttctgccggtggggagggggagtagcgctcgatcggctgactgctcggtcccttcacccgccctcgacaagacatcagccactacgtcaaggagttccactccagcatccgtaaccgctatcgatacaaacgggttatag

SEQ ID NO: 322137 - DNA, 459 bp, Artificial Sequence
  derived and/or modified sequence
atgtctgaggtgcagaaggctgtggccgaggccgagcagaaggcctttgaggtgattgccacagagcgggccaggatggagcagaccatcgcagatgtgaagaggcaggccgcagaagatgccttcctggtgatcaatgagcaggaggagagcacagagaactgctggaactgtggcaggaaggccagcgagacctgcagcggctgcaacatcgcccgctactgcggcagcttctgccagcacaaggactgggagcggcaccaccggctgtgtggccagaacctgcacggccagagcccccacggccagggccggcccctgctgcctgtgggccggggcagcagcgcccggtctgctgactgcagcgtgcccagccctgccctggacaagaccagcgccaccaccagccgcagcagcaccccagcctctgtgacagccatcgacaccaacggcctgtag

SEQ ID NO: 322138 - DNA, 459 bp, Artificial Sequence
  derived and/or modified sequence
atgagcgaggtgcagaaggccgtggccgaggccgagcagaaggccttcgaagtcatcgctaccgagagggcgcggatggagcagacaattgctgatgttaaacgccaggccgctgaggacgcgttcctagtgattaacgaacaagaagaaagcaccgaaaactgctggaattgtggccggaaagcctccgaaacctgcagcggttgcaacatcgcgagatactgcgggagtttctgccagcataaagactgggaacggcatcaccggttgtgcggacagaacctccacggccaatctccccacggccagggacggcccctgctgccagttggaaggggctctagtgccaggtctgcagactgctcagtgccatcacctgctttggataagacaagtgcaacaaccagtagaagcagtaccccagccagcgtgacagcaatagatacaaatggtctgtag

SEQ ID NO: 322139 - DNA, 459 bp, Artificial Sequence
  derived and/or modified sequence
atgtctgaggtgcaaaaggcagttgctgaggctgaacagaaagcctttgaagtaatcgccaccgagagggcacggatggaacagacaatcgctgatgtgaaacggcaggcagctgaggacgccttcctcgtcatcaacgagcaggaggagagcaccgaaaattgctggaattgcggacggaaagctagcgagacctgctccggctgtaacatcgctaggtattgcggaagcttttgtcaacataaagactgggaacgtcaccatcggctgtgcgggcagaacctgcatgggcagtcgccacacggacagggacgccctctgctccccgtggggagggggtcaagcgcacggagcgcggactgttccgtacctagccccgcattggataaaaccagcgcgacaacttcccgctcctcgacacccgcaagcgtgaccgctattgatactaatggcctatag

SEQ ID NO: 322140 - DNA, 3502 bp, Artificial Sequence
  derived and/or modified sequence
gtattttgggacttcacattcacattctcattgggctgaggctcaaacatatggaatgtgttattttgcagcgtctacattagggaaatcaagcagggcattggtgatgggaggaagtgaacaggaaccaggtaggatgatggtaagtggacagggtttaaaaacccagggcttttggcagtctgcccaaatctatgtctttagcccttgtttgtgcacctagtcttatttatttaattgcctcctggccatttacacctggatgccccagaggcacctccaccttctcacttgcctccacactagctttgtgtggactgtccatttcattgcctagctttagcattcttctctttcacctccacttccaggcccttcggtgctcccaacctttttctgcctcatcccttcctcagtgccacttattcctgcctaaattcagcctcttctatcagttcaatcattgcaccagcctcccggttgctatctctgtctttaatcttccccttgcatagaatcctttatggagtttcctttgaaaataaagtcaagccgactgggcacggtggctcatgcctgtaatcccagcactttgggaggccaaggtgggcggatcacgaggtcaagagatcgagaccatcctggctaacatggtgaaaccctgtctctattaaaaatacaaaaaattagccaggtgtggtggcgggcacctgtagtcccagctactcaggaggctgaggcaggagaatggcgtgaacccgggaggcggagcttgcagtgagcagagattacgccactgcactccagcctgggcaacagagcgggactccgtcgcaaaaaaaaaaaaagaaaataagttcaagccgggggtggtgcctcacccctataacactttaacaccaacgctttgggaggctgaggtaggaggatcacttgagcgcaggagttcgagacaagccttagcaacataaagctgtgaataaggtgaaaattcaggccatgtcagaagtacagaaggccgtcgctgaggcagagcagaaagcctttgaagtgattgcaacagagagagcacgaatggagcaaaccatagcggatgtcaagcggcaggccgcagaggatgctttcctcgtcatcaatgagcaagaggagtccacggagaactgctggaactgtggccgcaaagccagcgagacatgcagtggctgcaatatcgcgcgatactgtggctctttctgccagcacaaggactgggagcggcaccaccgcctctgtggtcagaacctgcatggccagagcccccacggccagggccggccgctgcttcctgtaggcaggggctcctctgccaggtccgccgactgcagcgtgcccagcccagccctcgacaagacctcggcaaccacatcgcgttcctcaacacctgcttctgtgacagctatcgacaccaacggactctgagccccggactctgcttaccctgatggctgctcagcaccacagagtgcttgggctgagggactgactgttggaacccgtgcatgtagctgccgggtcatcagcaagaaatgaattggaggcaggaagagtccaagcctgaataataacaccccacagcctctctgtgcacttgctgtctgcggagccagtgtgccattctctgcacatgggcagccagcctgagctgcctcctccatggctttcctggtttgttcctctctccactgaagctgacttagccggccccttttcagtgtagaccaccagctcccctccccatctccttgagtcagcagactgtccaatgtgctcagccaggctggaggcggcaggcggcaggcagcaggctgtggaggaggcccctcggtcagggagcggcctgcctcacccctgaatagctccttcggccccatctccatcctcagcagatgacactgattggcctcacggggacttgggtaagcaacaggcggcattcaggactcttctcaaccctgctgttcagacttgataagatctcagagtccacaggaaagaagtcactgttgcaataaaagcacccgtagtagcaaaaacataaaacaaataaaacttcccccacatcacagatgattttggacaagattttccaaccttgctggctactttagtttgggacctgttttttttctcatttgattttgcttgtgcagaaaatagtttccagcacatggattgatctgagagagaatgaggctcagttgtggatagtctgttttctctgagcatgttggccaactagtatcgtcaaattattgagtggatcatctcttggaaatgcagaacttctgccaccacttggctatttgcacagtcatcttgttctgtgtccttttatctctcagaccacacacatctggaacgctgtgggcatcttctgcccatgggctccatttggcacctgctgagccacagttgtcctgctggatgtgctgtgcaggttggtaggacttgcccccactgtcaaggcctggtctcatctgaaaagccctcctggacctcaaagaattcttcagacctcatagttacaggtcattatatctactatgttgatttatcatcaggcacacaacttctgtttccttctcttgtgttatctgatagcgtccctccttgagctcatcagaaaggttttatgaaatgtgaaccattttgggaaaagctgatcaatttttcttcctagcttcccattttcaaatgggacatcactcatatccctttcagaatgttaggaactgcctcccacattcttccctgtctttttgggttttgttttttgttgttgtggtggttttttaacacaaagtctcactctgttgcccaggctggagtgcagtggcatgatcttggctcactgcaacctctgccttccaggttcaagcaattctcctgcctcagcctcccgagtagctgagattacaggcgcccaccaccacgcccagctaatttttgtatttttagtagagacagggtttcaccatgttggccaggctgatctcgaactcctgacctcaggtgacctgccttggcctcccaaagtgcagggattacaagcgtgagccaccatgcccggcctgtctttttggttttgatgggagtctgaggaccccgacccctcctgctctccatctttgagcctctggcatcctctcacacccagaaatcagttggagtaagtttaattggccctgctccagctggcctttgaagcacaagtttaaatctccaccttctgtgcactgaccagagtctaaaataaaagttgtcagtaccataaaggaaaagggatccacacaggtagccttctccttggatacaggtacatcttactgtaagaatttcaagtcctggctgggcgcagtggctcactcctgtaatcccagcactttgagagaccgaggcaggcagatcacttgaggtcaggaattcaagaccaacctggccaacatggtgaaaccctgtctct

SEQ ID NO: 322141 - DNA, 459 bp, Artificial Sequence
  derived and/or modified sequence
atgagcgaggtgcagaaggccgtggccgaggccgagcagaaggccttcgaggtgatcgccaccgagagagccagaatggagcagaccatcgccgacgtgaagagacaggccgccgaggacgccttcctggtgatcaacgagcaggaggagagcaccgagaactgctggaactgcggcagaaaggccagcgagacctgcagcggctgcaacatcgccagatactgcggcagcttctgccagcacaaggactgggagagacaccacagactgtgcggccagaacctgcacggccagagcccccacggccagggcagacccctgctgcccgtgggcagaggcagcagcgccagaagcgccgactgcagcgtgcccagccccgccctggacaagaccagcgccaccaccagcagaagcagcacccccgccagcgtgaccgccatcgacaccaacggcctgtag

SEQ ID NO: 322142 - DNA, 5815 bp, Artificial Sequence
  derived and/or modified sequence
cctcgctatggttcgtctgcctctgcagtgcgtcctctggggctgcttgctgaccgctgtccatccagaaccacccactgcatgcagagaaaaacagtacctaataaacagtcagtgctgttctttgtgccagccaggacagaaactggtgagtgactgcacagagttcactgaaacggaatgccttccttgcggtgaaagcgaattcctagacacctggaacagagagacacactgccaccagcacaaatactgcgaccccaacctagggcttcgggtccagcagaagggcacctcagaaacagacaccatctgcacctgtgaagaaggctggcactgtacgagtgaggcctgtgagagctgtgtcctgcaccgctcatgctcgcccggctttggggtcaagcagattggtaagtggctcatctgggaatcagttttggagggggacagaggagcttagggcccaaggtgaggggctgggcagtgggcacttagccccagaggcagaggaagcagaggctccaacctatgtcggtatccccactggagtgagctgcagacgggaccttgttcattctgccttctgccatggggatctgcctttgaagggcaatgggagaagtcctcctggggactgcagctgtcgggggcagtaccacatcgggggaagagtgctcaaggcaggagctcttcccgtcctgcctggccactggctgccttgtgagccggacaggtggtccactgtgatggttaatgtccccctccccacccactcccagctacaggggtttctgataccatctgcgagccctgcccagtcggcttcttctccaatgtgtcatctgctttcgaaaaatgtcacccttggacaaggtataagcactcatcccttgtgtttcctgctctaagagtggcatggagctgcctccattctctccagccacctgtcctgtccctgctcccagaggtccacacacactcatgtacttgtgaagcatctgcagagtggcctcatggccaaccagacaggcacatttccacattttttttgcctgctgtctctttgaggtaatagacactgttgatctctcgcttcatgagagcctcctatcttgggggtattgggacacttattttagctttccttctgcccctcctgcttctcctcagttttcctcgtcttgctttcaccttacctggctttctagggctttctgggctctgggtgctcaccctgagggcctccctctcttacctccaactccaaacccacaccaggtcctgccactggctgtctacgtgttttgggaacttactgtctccactgttgtcactttagtttgggcctcatcactgtggtctgggtgatgccttttctgcctcctggcctccctgcctctgtctctcccctcctgctggttctgtctccatcctcttgccaacatgagcgttcgacagtttctttcaaatcatgacactctcctatttgagatgcttcctgtctctctgttggaactaagactccttagcatggcacccaaccttcctgttgcatttcctgctctctttcctgcatcgcatagcttcatgctacttgcaatcctctgaacacactgttcattctcttccatcaaactcatctgcctggaataccttaaacatgggccccaggccaggcgcggtggctcttgcctgtaatctcagcactttggatgccaaggcgggtggatcacttgaggtcaggagttcaagaccagccagcacaacatggtaaaaacccatctctactaaaaataccaaaaaattagctgggtgtggtggtgggcgcctgtaatcccagctcctcgggaggctgaggcaggagaatcacttgaacccggaaggtggagtttgcagtgagccaagatagcgccactgcactccagcctgggcaacagagcgacattctgtctcaaaaaaaaaaaaaaaaaaaaaaaagactaaagtacatggtttcttcaaagcttctctctctttctcccaccttagatgatttttcctttgcaatgtcctgtgtccattccgccccactcctcctggggccacctggaccaggtcttcatcatctcatatctatatgtttgctgtgtctcctggctggccactcttctgtaatttctcctcctctgagctctctgggcagctgaatcttctcactagtgaagtcgcctggttggatgctgatgagactgaccagctgaatccagttgaaaacttcacacttggcagtgatctggttctaaagacacaattttccatagtttcctaacaccatcctgcatgccacctgccttatttccccacatcacatcgtcccacttagcgggactgcactgctgatccaaattttacatcctttagggcccactcaggtcatatgtcctcagggaagtctttctggaagaaccttaaaccagaggttctcaacagggggcagttttgctccctgtggaacgtttgccaatgtctggacacatttcattcgtcacaaacggagagggggatgctacagggatctggcggatagaggccagggatgctgctgaacatctgcaatgcataggacagcccacccccacccccacacccccagtaaataatgatccagcccaagtgtcactggtgctgacgttgagtaaccctatcttaagctgaactcatcatctctccattccagccttggtggattctgtctcctctgaaccattcccatctcactttagcctacctagatcacaaagcttggcactcattatagactcccctatttattactccttcaagatgtgcaagaatcttttctctgcacttttaagttctgtaagaagagtctgtgtcgttcctataataaccagcataggacgttgcacgtgttgtgtgctcagtgaacctggatttgttgattgttgactgactcactctagagttggaaatcttatgcttggggaaacttaatatctctttctttctctgtgtgtgtgcatttgtgcacgtgtctgtgcatagctgtgagaccaaagacctggttgtgcaacaggcaggcacaaacaagactgatgttgtctgtggtgagtcctggacaatgggccctggagaaagcctaggaaggtgggaactgaagggggagatgaggcacacaggaacactggatgggaaaaaggggaggggaggcagtttgggggtgtggtatcacagctctgccacttatcttgggagtctgggcaaatcacttcccctctcttagcctcagtttcttcatctgtaaaatgggatgataacagcacttccttagtaggttttgattttagagtgagaaggttggcctacagtaaagatcagataatgtaaatcagtgaaaaaggtcaggggtaagaaaattacattctctttacctaacgctaaatgaccagttaatgggtgcagcacaccaacatggtacatgtatacatatgtaacaaacctgcacattatgcacatgtaccctaaagcttaaagtataataataataaaatttaaaaaaacgaaaaatacattctctttgctttttctcaaaatgtactttcctctttgtagggctgggactagaatgaggtgagcaaggcacttgccctcgggcgcaatatttaagaaggtgccataaaagtgtagtaatcaaggtaaattcattttgatgcaatatttttaaaaataaaaattaatgcaaagaaatccatgatgagcaagatagcaacattttaaataaagaacaggatccgaccctgtgtttgcatgaccctgcctcactcacctcaccctaatcctggccctggttccagtaaaaggaataggcagccagcctgcaggccgtagtttgctgacttggtgtccgcctgatgattttcaaaatatggcattaaaagaatgtttaccttgatgactgagtgttttggacatccttttcaattttgtcctgaaacaatttcatcccttgcctcacgctagtctccgccctgccttttggtctttcttttattttcccactttgaaaaaaaaattcggcatgagaaatactttacctttcccctccactcttctataccaaaagcaacatgcagacatgaatcatgctagacctcggcattgggcagagagcagggagtggcggggagcatggtgagcaggtggtgacagccactgccaccactcgcttctagatggttcccaggtggggaggctgccaactggaacccagtcttcccagtttgtaagagaaatcagatgtctaggtttgaatatgtgatctcccagtttaaaaatgtcggcaaatatttccaaacgttaagaaaatgttctggctcctttaaagacatctgccagccacatttccccaaggaccgcggtttgaaccttctgatgtagatgagctctgacattggaagattctggagtctgacaagtcacagcaggttgagggtagggagaaactgcaggtgaggggtgcatgctgaagtcctgatttctccaggtccccaggatcggctgagagccctggtggtgatccccatcatcttcgggatcctgtttgccatcctcttggtgctggtctttatcaaaaaggtggccaagaagccaaccaataaggtaggtcacccctgagaacccgggacagagttttgacaaactgggaagatggcctcacggttgcctatggggcagtaaaactgattcagagtctgtctctgcagccagtggggtggcagcagaattggggactgtcatccccacccaccatgctccttccatccagagctcaatcccccacagaactgcccctggcaccactggcagagcctaacactggctgttcttcactcctttcctggcattcaacgcgtggggagctgcatctttgggccttggggctgggtcaaatgggtgggagcaaatgtggcagccccttaagcccactggctcccactctggaagctcttcgtcgcccttggtgtggccagcagggggcaggaggcacccgaggaatcagcactgacccgccgtctgggaaaggggggagggcttggggaagggatccgcttcccagggaggggctcctcagaggcacagctgcccctgctgctgggggtgacctcacaccttgcctctccaggccccccaccccaagcaggaaccccaggagatcaattttcccgacgatcttcctggctccaacactgctgctccagtgcaggagactttacatggatgccaaccggtcacccaggaggatggcaaagagagtcgcatctcagtgcaggagagacagtgaggctgcacccacccaggagtgtggccacgtgggcaaacaggcagttggccagagagcctggtgctgctgctgctgtggcgtgagggtgaggggctggcactgactgggcatagctccccgcttctgcctgcacccctgcagtttgagacaggagacctggcactggatgcagaaacagttcaccttgaagaacctctcacttcaccctggagcccatccagtctcccaacttgtattaaagacagaggcagaagtttggtggtggtggtgttggggtatggtttagtaatatccaccagaccttccgatccagcagtttggtgcccagagaggcatcatggtggcttccctgcgcccaggaagccatatacacagatgcccattgcagcattgtttgtgatagtgaacaactggaagctgcttaactgtccatcagcaggagactggctaaataaaattagaatatatttatac

SEQ ID NO: 322143 - DNA, 108 bp, Artificial Sequence
  derived and/or modified sequence
agccccaacaagctgctgtttgacccccgggtgggcggccgggtgagccacgtgttcttcctgtttcctccatttgtgctgctgcccggccccccaggcctgccctag

SEQ ID NO: 322144 - DNA, 696 bp, Artificial Sequence
  derived and/or modified sequence
atggccgacgacatcgacatcgaggccatgctggaggccccctacaagaaggacgagaacaagctgagcagcgccaacggccacgaggagagaagcaagaagagaaagaagagcaagagcagaagcagaagccacgagagaaagagaagcaagagcaaggagagaaagagaagcagagacagagagagaaagaagagcaagagcagagagagaaagagaagcagaagcaaggagagaagaagaagcagaagcagaagcagagacagaagattcagaggcagatacagaagcccctacagcggccccaagttcaacagcgccatcagaggcaagatcggcctgccccacagcatcaagctgagaagaagaagcagaagcaagagccccttcagaaaggacaagagccccgtgagagagcccatcgacaacctgacccccgaggagagagacgccagaaccgtgttctgcatgcagctggccgccagaatcagacccagagacctggaggagttcttcagcaccgtgggcaaggtgagagacgtgagaatgatcagcgacagaaacagcagaagaagcaagggcatcgcctacgtggagttcgtggacgtgagcagcgtgcccctggccatcggcctgaccggccagagagtgctgggcgtgcccatcatcgtgcaggccagccaggccgagaagtag

SEQ ID NO: 322145 - DNA, 582 bp, Artificial Sequence
  derived and/or modified sequence
atggccgacgacatcgacatcgaggccatgctggaggccccctacaagaaggacgagaacaagctgagcagcgccaacggccacgaggagagaagcaagaagagaaagaagagcaagagcagaagcagaagccacgagagaaagagaagcaagagcaaggagagaaagagaagcagagacagagagagaaagaagagcaagagcagagagagaaagagaagcagaagcaaggagagaagaagaagcagaagcagaagcagagacagaagattcagaggcagatacagaagcccctacagcggccccaagttcaacagcgccatcagaggcaagatcggcctgccccacagcatcaagctgagcagaagaagaagcagaagcaagagccccttcagaaaggacaagagccccgtgagagagcccatcgacaacctgacccccgaggagagagacgccagaaccgtgttctgcatgcagctggccgccagaatcagacccagagacctggaggagttcttcagcaccgtgggcaaggtgagagacgtgagaatgatcagcgacagaaacagcagaagaagctag

SEQ ID NO: 322146 - DNA, 696 bp, Artificial Sequence
  derived and/or modified sequence
atggccgacgatatcgacattgaagctatgttagaggcaccttataaaaaagacgaaaacaagctgtcttcagccaacggccacgaggagagatctaagaagcgcaagaagtctaagtccaggtcaaggtctcatgagcgcaaacggtccaaatccaaagagaggaaaaggtctcgcgaccgggagaggaagaaatctaaatcacgggagaggaagcgatcccggtctaaagaaagaaggcggtctcggtcaaggagcagagataggcgattccggggacgctacaggagtccctacagtggacctaagttcaatagcgccattcggggaaaaatcggcctgccacacagcataaaactaaggcggcgaagccgcagcaaatctcccttccggaaggataagagcccagtgcgcgaaccaatagataatttgaccccggaggagcgggatgctcgaaccgtgttttgcatgcaattagccgctaggattcgaccaagagacctcgaggaattcttttccaccgtgggcaaggtgcgcgatgtgagaatgatctcagataggaactccagacggtcaaagggaatagcttatgtcgagttcgtcgatgtgtcaagcgtgcccctggccattgggctcaccgggcagcgagttctgggcgtgccaatcattgtgcaggcaagtcaggcagagaaatag

SEQ ID NO: 322147 - DNA, 582 bp, Artificial Sequence
  derived and/or modified sequence
atggccgatgatatcgacattgaagcaatgttggaagccccatacaagaaagatgaaaataaactgtctagcgccaacggccatgaagaaaggtccaagaagcggaagaagtctaagagccgcagccgatctcacgagcgcaagcgtagcaagtccaaggagaggaaacgcagtcgcgaccgtgagagaaaaaagtcaaaaagcagagagcgtaagagaagccggagtaaggagcgcagacggagccggagcagaagcagagacaggagatttcgaggcaggtatcggtccccatattcaggacccaagttcaactcggcaatacgcgggaaaatcgggctgccacattcaatcaagctgtctcggagaaggtcacgctctaagtctccattcaggaaggacaaatcacccgtccgtgagcctattgataatctcaccccagaagagagggatgctcgtacagttttctgtatgcagctggccgcccggatccgaccccgggatctagaagaattcttctctacagtaggtaaggtgcgggatgtccgaatgatcagcgacaggaatagccgcaggtcatag

SEQ ID NO: 322148 - DNA, 696 bp, Artificial Sequence
  derived and/or modified sequence
atggctgatgacattgatattgaggccatgctggaggccccctacaagaaggatgagaacaagctgagcagcgccaacggccacgaggagaggagcaagaagaggaagaagagcaagagccgcagccgcagccatgagaggaagaggagcaagagcaaggagaggaagaggagccgggaccgggagaggaagaagagcaagagccgggagaggaagaggagccgcagcaaggagcggcggcgcagccgcagccgcagccgggaccggcgcttccggggccgctaccgcagcccctacagcggccccaagttcaacagcgccatccggggcaagattggcctgccccacagcatcaagctgcggcggcgcagccgcagcaagagccccttcaggaaggacaagagccctgtgcgggagcccatcgacaacctgaccccagaggagagagatgccaggacagtgttctgcatgcagctggccgcccgcatccggccccgggacctggaggagttcttcagcacagtgggcaaggtgagagatgtgaggatgatcagtgacaggaacagccgccgcagcaaaggaattgcctacgtggagtttgtggatgtgtcctctgtgcccctggccatcggcctgaccggccagagggtgctgggcgtgcccatcatcgtgcaggccagccaggccgagaagtag

SEQ ID NO: 322149 - DNA, 582 bp, Artificial Sequence
  derived and/or modified sequence
atggctgatgacattgatattgaggccatgctggaggccccctacaagaaggatgagaacaagctgagcagcgccaacggccacgaggagaggagcaagaagaggaagaagagcaagagccgcagccgcagccatgagaggaagaggagcaagagcaaggagaggaagaggagccgggaccgggagaggaagaagagcaagagccgggagaggaagaggagccgcagcaaggagcggcggcgcagccgcagccgcagccgggaccggcgcttccggggccgctaccgcagcccctacagcggccccaagttcaacagcgccatccggggcaagattggcctgccccacagcatcaagctgagcagaagaagaagccgcagcaagagccccttcaggaaggacaagagccctgtgcgggagcccatcgacaacctgaccccagaggagagagatgccaggacagtgttctgcatgcagctggccgcccgcatccggccccgggacctggaggagttcttcagcacagtgggcaaggtgagagatgtgaggatgatcagtgacaggaacagcagaagaagctag

SEQ ID NO: 322150 - DNA, 696 bp, Artificial Sequence
  derived and/or modified sequence
atggccgacgacatcgacatcgaggccatgctggaggccccctacaagaaggatgaaaacaagctgtcctcagccaacggacacgaagagagatctaaaaaacggaaaaagtctaaatcaagatctcgaagccacgagcgcaaaagatcaaagtccaaagagcgcaagagatccagggatagagaaagaaagaagtctaagtctagggaaagaaaacgatccaggtcaaaagaacggcggcgctcgcggtcccggtctagagacagacgctttcgaggacgatacaggtctccctactccggtccaaagtttaacagtgcaatccgaggcaaaattggactgccgcattccatcaagctgagacgacggtctcgttctaagtctcctttcaggaaggataaaagccccgtcagggaacctatcgataatctcacacccgaagagcgagatgctaggaccgtgttctgcatgcagttggctgcacgaattagaccgcgcgatcttgaagaattctttagtacagtgggtaaagtacgagacgtgagaatgatttccgatcgaaactcacgccgatccaaaggaatcgcatacgtcgagtttgtcgacgtgagcagcgtaccccttgccatcgggctgactggccagcgtgttctgggggtgcctataattgtccaagcatcccaagcggagaaatag

SEQ ID NO: 322151 - DNA, 582 bp, Artificial Sequence
  derived and/or modified sequence
atggccgacgacatcgacatcgaggccatgctggaggccccctacaagaaggacgaaaataagcttagttcagctaatggacacgaggagagatcaaaaaaaagaaaaaagagtaagagtcggagtcgatcccacgagaggaagcggtccaagtcaaaggaacgtaaacggagcagggacagagaaagaaagaaaagcaagtccagggaaaggaagaggtccaggtctaaggagagacgtaggtctcggtcaagatctcgcgaccgccgctttcggggacggtataggagtccgtattcaggcccaaagtttaactcagccattcgtggaaagataggacttcctcacagcatcaagctgtctaggcggagatcccggtccaaatcccctttccggaaggacaagtctcctgtgagggagcccatcgataacctgacacccgaagagcgagatgcccgtacagtgttttgcatgcagctggctgcacgcatccgcccccgcgacttggaagaattcttctccaccgttgggaaagtgcgcgatgtacggatgattagcgatcgaaatagccggaggtcatag

SEQ ID NO: 322152 - DNA, 696 bp, Artificial Sequence
  derived and/or modified sequence
atggccgacgacatcgacatagaggcaatgctggaagccccttacaagaaagacgagaataagctcagttctgcaaatggacacgaggagcgctccaaaaagcggaagaaatctaagagtcggtcgcggtcccacgaacgaaagaggagtaagagcaaggaacgcaagagaagccgtgaccgtgagcgaaagaagtccaagtcccgggagcgaaagcggtcaaggtctaaggagaggcgcagaagccgaagtcgaagccgagacaggagatttaggggacggtacagatctccgtactcgggccctaaattcaattcagctattcggggtaaaattgggctcccccatagcattaagttgcgcagacgatctaggtctaagtccccctttcgtaaggacaagtcaccggtccgggaaccgattgacaacttaactccagaggaacgggacgctagaaccgtgttctgtatgcaactggccgctcgaatccgacctagggacttagaagaatttttcagcacagtgggaaaggtccgagacgtcagaatgatcagcgaccggaattccaggcgcagtaagggcatcgcttacgtcgagttcgtcgacgtgagcagcgtgcccctggccattggacttacagggcagcgcgttcttggcgttccaataattgtgcaggcaagccaggctgagaagtag

SEQ ID NO: 322153 - DNA, 582 bp, Artificial Sequence
  derived and/or modified sequence
atggccgacgatatcgatatagaagccatgctggaagccccatacaagaaagatgaaaataagctatcatcagcgaatggccatgaggaacgtagcaagaagcgcaagaagagtaaaagtcgcagcaggagccacgagcgcaagcgtagcaagtcaaaagaacgcaagcgaagtagagacagggagcgcaaaaagagcaaatcacgtgagcgcaagcgatctagatcgaaggagcgaaggaggagtcgttcccgctccagagatagaagatttagaggtagatatagaagcccttacagcggacctaaatttaactccgctatccggggaaagatcggactaccacactccatcaagttgtcacggagacggtccaggtctaagagcccttttcgcaaagataaatcacccgtaagggagcctattgacaatctaactcctgaggagagagacgcaaggacagtgttctgcatgcaactggccgctcgcatcagaccaagggacctcgaggaattcttcagcactgttggcaaggtacgggacgtcaggatgatttccgataggaactctcgcaggtcctag

SEQ ID NO: 322154 - DNA, 1026 bp, Artificial Sequence
  derived and/or modified sequence
gtgtgctggtgaatgtgagtacagggaagcagcggccgccatttcagggagcttgtcgacgctgtcgcaggggtggatcctgagctgccgaagccgccgtcctgctctcccgcgtgggcttctctaattccattgttttttttagattctctcgggcctagccgtccttggaacccgatattcgggctgggcggttccgcggcctgggcctaggggcttaacagtagcaacagaagcggcggcggcggcagcagcagcagcagcagcagcaatctcttcccgaacacgagcaccacaggcgcccgaaggccggaacaggcgtttagagaaaatggcagacgatattgatattgaagcaatgcttgaggctccttacaagaaggatgagaacaagttgagcagtgccaacggccatgaagaacgtagcaaaaagaggaaaaaaagcaagagcagaagtcgtagtcatgaacgaaagagaagcaaaagtaaggaacggaagcgaagtagagacagagaaaggaaaaagagcaaaagccgtgaaagaaagcgaagtagaagcaaagagaggcgacggagccgctcaagaagtcgagatcgaagatttagaggccgctacagaagtccttactccggaccaaaatttaacagtgccatccgaggaaagattgggttgcctcatagcatcaaattaagacgacgttcccgaagcaaaagtccattcagaaaagacaagagccctgtgagagaacctattgataatttaactcctgaggaaagagatgcaaggacagtcttctgtatgcagctggcggcaagaattcgaccaagggatttggaagagtttttctctacagtaggaaaggttcgagatgtgaggatgatttctgacagaaattcaagacgttccaaaggaattgcttatgtggagttcgtcgatgttagctcagtgcctctagcaataggattaactggccaacgagttttaggcgtgccaatcatagtacaggcatcacaggcagaaaaaaa

SEQ ID NO: 322155 - DNA, 716 bp, Artificial Sequence
  derived and/or modified sequence
ggcagcgcgggtttttgcccggaaagaggcgctctcgttcgggtctcccagtttctgtttttggagttgacagcagagttttaaatattggatattgaagtcttcattttcgtgtgtttcgtgcgtttagagaaaatggcagacgatattgatattgaagcaatgcttgaggctccttacaagaaggatgagaacaagttgagcagtgccaacggccatgaagaacgtagcaaaaagaggaaaaaaagcaagagcagaagtcgtagtcatgaacgaaagagaagcaaaagtaaggaacggaagcgaagtagagacagagaaaggaaaaagagcaaaagccgtgaaagaaagcgaagtagaagcaaagagaggcgacggagccgctcaagaagtcgagatcgaagatttagaggccgctacagaagtccttactccggaccaaaatttaacagtgccatccgaggaaagattgggttgcctcatagcatcaaattaagcagacgacgttcccgaagcaaaagtccattcagaaaagacaagagccctgtgagagaacctattgataatttaactcctgaggaaagagatgcaaggacagtcttctgtatgcagctggcggcaagaattcgaccaagggatttggaagagtttttctctacagtaggaaaggttcgagatgtgaggatgatttctgacagaaattcaagacgttccaa

SEQ ID NO: 322156 - protein, 114 aa, Artificial Sequence
  derived and/or modified sequence
MQSVAAFAVSAVASQWERTGKPFNPLLGETYELIREDLGFRFISEQVSHHPPISAFHSEGLNHDFLFHGSIYPKLKFWGKSVEAEPRGTITLELLNVNQRHLRAKHKSPTNAGR

SEQ ID NO: 322157 - protein, 398 aa, Artificial Sequence
  derived and/or modified sequence
MPVPASWPHLPSPFLLMTLLLGRLTGVAGEEELQVIQPDKSISVAAGESATLHCTVTSLIPVGPIQWFRGAGPGRELIYNQKEGHFPRVTTVSDLTKRNNMDFSIRISNITPADAGTYYCVKFRKGSPDHVEFKSGAGTELSVRAKPSAPVVSGPAARATPQHTVSFTCESHGFSPRDITLKWFKNGNELSDFQTNVDPAGDSVSYSIHSTAKVVLTREDVHSQVICEVAHVTLQGDPLRGTANLSETIRVPPTLEVTQQPVRAENQVNVTCQVRKFYPQRLQLTWLENGNVSRTETASTLTENKDGTYNWMSWLLVNVSAHRDDVKLTCQVEHDGQPAVSKSHDLKVSAHPKEQGSNTAPGPALASAAPLLIAFLLGPKVLLVVGVSVIYVYWKQKA

SEQ ID NO: 322158 - protein, 154 aa, Artificial Sequence
  derived and/or modified sequence
  misc_feature (1)..(1): Xaa can be any naturally occurring amino acid
XSQPHTKPSVFVMKNGTNVACLVKEFYPKDIRINLVSSKKITEFDPAIVISPSGKYNAVKLGKYEDSNSVTCSVQHDNKTVHSTDFEVKTDSTDHVKPKETENTKQPSKSCHKPKAIVHTEKVNMMSLTVLGLRMLFAKTVAVNFLLTAKLFFL

SEQ ID NO: 322159 - DNA, 1197 bp, Artificial Sequence
  derived and/or modified sequence
atgcccgtgcccgccagctggccccacctgcccagccccttcctgctgatgaccctgctgctgggcagactgaccggcgtggccggcgaggaggagctgcaggtgatccagcccgacaagagcatcagcgtggccgccggcgagagcgccaccctgcactgcaccgtgaccagcctgatccccgtgggccccatccagtggttcagaggcgccggccccggcagagagctgatctacaaccagaaggagggccacttccccagagtgaccaccgtgagcgacctgaccaagagaaacaacatggacttcagcatcagaatcagcaacatcacccccgccgacgccggcacctactactgcgtgaagttcagaaagggcagccccgaccacgtggagttcaagagcggcgccggcaccgagctgagcgtgagagccaagcccagcgcccccgtggtgagcggccccgccgccagagccaccccccagcacaccgtgagcttcacctgcgagagccacggcttcagccccagagacatcaccctgaagtggttcaagaacggcaacgagctgagcgacttccagaccaacgtggaccccgccggcgacagcgtgagctacagcatccacagcaccgccaaggtggtgctgaccagagaggacgtgcacagccaggtgatctgcgaggtggcccacgtgaccctgcagggcgaccccctgagaggcaccgccaacctgagcgagaccatcagagtgccccccaccctggaggtgacccagcagcccgtgagagccgagaaccaggtgaacgtgacctgccaggtgagaaagttctacccccagagactgcagctgacctggctggagaacggcaacgtgagcagaaccgagaccgccagcaccctgaccgagaacaaggacggcacctacaactggatgagctggctgctggtgaacgtgagcgcccacagagacgacgtgaagctgacctgccaggtggagcacgacggccagcccgccgtgagcaagagccacgacctgaaggtgagcgcccaccccaaggagcagggcagcaacaccgcccccggccccgccctggccagcgccgcccccctgctgatcgccttcctgctgggccccaaggtgctgctggtggtgggcgtgagcgtgatctacgtgtactggaagcagaaggcctag

SEQ ID NO: 322160 - DNA, 1197 bp, Artificial Sequence
  derived and/or modified sequence
atgccagtgcctgcctcctggccccacctcccaagtcccttcctcctcatgactctactgctaggacgtctgacgggtgtcgcgggtgaagaggagttgcaggtgatacaacctgacaaaagcatctcagtggccgccggagaatctgcaacactacactgtaccgttacaagtctcattcctgtcggacccatacaatggtttcgcggggccggcccaggacgagaactcatttataatcagaaagagggccactttccgcgggtgacaactgtttccgatttaaccaagaggaacaacatggacttcagcattagaatcagcaatattacaccagcagatgctgggacatactattgtgtgaaattccgtaagggaagccctgaccatgtggagttcaagtccggggccggaacagaactgtcagtgcgggcaaagccaagcgcccctgtggtgtcaggccccgccgccagagctacaccccagcacactgtgagcttcacctgcgagagtcacggtttttctccaagagacattaccctgaaatggttcaaaaatggcaatgaactgtcagattttcagacaaacgtggatcccgccggtgactctgtcagctactccatccattcgaccgccaaggtggtgctgacccgagaagacgtgcactcccaggtgatctgcgaagtggcccacgtgaccctccagggcgatccgcttcggggcaccgccaatctttcagagaccatcagagtccccccaaccttagaagtgacccagcagccagttagagcagagaatcaggtcaacgttacctgccaagtacggaaattctacccacagcggctccaattaacatggctggaaaacggaaacgtttctagaacagagacagctagtacactgactgaaaataaggacggaacatacaactggatgagttggttgcttgtcaatgtgtccgcacatcgtgacgatgtgaagctcacgtgccaggttgaacacgatggtcagccagctgtgagcaagagccacgacctgaaggtcagcgcccatcccaaagaacaaggaagtaacactgcccccgggccggcactggcctccgctgcgcccctcttgatcgctttccttcttggacctaaggttttgctggtggttggcgtctctgttatttacgtctactggaaacagaaggcatag

SEQ ID NO: 322161 - DNA, 1197 bp, Artificial Sequence
  derived and/or modified sequence
atgcctgtgcctgcctcctggccccacctgcccagccccttcctgctgatgaccctgctgctgggccgcctgactggagtggccggggaggaggagctgcaggtgatccagcctgacaagagcatctctgtggccgccggggagagcgccaccctgcactgcaccgtgaccagcctcatccctgtgggccccatccagtggttcagaggagctggccctggccgggagctgatctacaaccagaaggagggccacttcccccgggtgaccaccgtgtctgacctgaccaagaggaacaacatggacttcagcatccgcatcagcaacatcaccccagcagatgctggcacctactactgtgtgaagttcaggaagggcagcccagaccacgtggagttcaagtctggagctggaacagagctgtctgtgcgggccaagcccagcgcccctgtggtgtctggccctgctgcccgggccaccccccagcacacagtgtccttcacctgtgagagccacggcttcagcccccgggacatcaccctgaagtggttcaagaatggaaatgagctgagtgacttccagaccaacgtggaccctgctggggacagcgtgtcctacagcatccacagcacagccaaggtggtgctgaccagagaagatgtgcacagccaggtgatctgtgaggtggcccacgtgaccctgcagggcgaccccctgcggggcacagccaacctgtctgagaccatccgggtgccccccaccctggaggtgacccagcagcctgtgcgggcagagaaccaggtgaatgtgacctgccaggtgaggaagttctacccccagaggctgcagctgacctggctggagaatggaaatgtgtccaggacagaaacagccagcaccctgacagagaacaaggatggcacctacaactggatgtcctggctgctggtgaatgtgtctgcccacagagatgatgtgaagctgacctgccaggtggagcatgatggccagcctgctgtgtccaagagccatgacctgaaggtgtctgcccaccccaaggagcagggcagcaacacagcccctggccctgccctggccagcgctgcccccctgctgattgccttcctgctgggccccaaggtgctgctggtggtgggcgtgtctgtcatctacgtgtactggaagcagaaggcctag

SEQ ID NO: 322162 - DNA, 1197 bp, Artificial Sequence
  derived and/or modified sequence
atgcccgtgcccgccagctggccccacctgcccagccccttcctgctgatgactctgctgcttgggaggctgaccggcgtggccggggaggaggaactgcaagtgatacagccagacaaatcaatttcagtagctgccggagagagcgctaccctccactgcacagtgactagtctgatccctgtggggccgattcagtggttcaggggggcaggtccgggtcgcgagctcatctacaatcaaaaagaaggacacttcccaagagtgacaacagtgtcggacctgacaaaacgaaacaacatggacttctccattcggatcagtaacatcactcccgccgatgctgggacttattattgcgttaagttccgaaaaggctctccagaccatgtagagttcaagtctggtgcagggaccgaactgagcgtgagggcaaagccctctgctcctgttgtttccggccccgcagctcgcgccacgcctcaacataccgtcagcttcacctgtgagtctcacggcttttcccctcgcgatatcactctaaagtggttcaaaaatggaaatgagctgtctgatttccagacaaatgttgatcctgcaggcgactccgtctcatactctattcacagcactgccaaagtggttctaactagagaggacgtgcacagccaggtcatctgtgaagtggcacacgtcacgctgcaaggagatccacttagaggtacggcaaacctgagcgaaacgatccgcgttcccccaaccctggaggttacccagcagcctgtgagagctgagaaccaagtgaatgttacctgccaggtgagaaagttttacccccagaggctgcagctaacttggctggagaatggcaacgtaagcaggactgaaaccgcgagcaccctcacagagaataaggatgggacatataattggatgagctggttactagtgaacgtgtcggctcatcgcgacgatgtcaaactgacttgtcaggtcgagcacgatggccaacctgccgtgtccaaatcccacgatctgaaagtcagtgcccacccgaaagagcagggctccaacacagctcccgggcctgcgctggcttctgcggcgcccctcctcatcgcattcttgcttggccccaaggttctgctcgtagtgggggtcagcgttatatacgtgtactggaagcagaaggcttag

SEQ ID NO: 322163 - DNA, 1197 bp, Artificial Sequence
  derived and/or modified sequence
atgcccgtacctgccagctggccacatctgccgtccccctttctcctcatgaccctgttgttggggagacttacaggagtggctggggaggaagaacttcaggtgattcagccagacaaatcaatctcagtagccgctggcgagtctgccacgctccactgcactgtgacctctcttattcccgtgggacctatccaatggtttaggggggctgggccaggcagagagttgatttataatcagaaagagggacacttccccagggtgacaaccgtcagcgacctgaccaagcggaataacatggatttctcgatccgtatttcaaacatcaccccggcagatgcagggacttattactgcgtgaaatttcgaaaaggctccccagaccacgtcgagtttaaatcaggggctggcaccgaactgtctgtcagagctaagcctagcgcccctgtcgtctctggccctgccgcacgcgctacccctcagcataccgtctcatttacttgtgaatcccatggattcagcccacgcgatattaccctcaagtggtttaagaacgggaatgagttatctgattttcaaacgaatgtggatcccgcaggtgattctgtctcatacagtatacactcaacagcgaaagtagtgctgacacgcgaggatgtgcactctcaggtaatctgtgaagtggcccacgtaacacttcaaggagaccctctgaggggcaccgctaatcttagcgagaccatcagagtccccccaacactggaggtaacccaacaaccagtccgtgcggagaatcaggtgaacgtaacatgccaggtgagaaaattctatccacagagactacagctcacctggctggaaaacggcaacgtttccagaactgaaaccgcatcaaccctaactgaaaacaaggacgggacttacaactggatgagctggcttttggtgaacgtatcagctcacagagatgacgtgaagctgacctgtcaagtggaacacgacggccagcccgctgtatctaagagccatgacctgaaggtgagcgctcatcccaaggagcaaggatccaatacagccccaggtcctgccctggcgtcggccgctccgctgttgatagctttcttgttgggtcccaaagtgttactggtggtgggggtgagcgtgatatatgtatattggaaacaaaaggcatag

SEQ ID NO: 322164 - DNA, 2207 bp, Artificial Sequence
  derived and/or modified sequence
agagcagagtctgcgatcttcccagcacagacgtttggacagagcaggctcctaaggtctccagaatgcccgtgccagcctcctggccccaccttcctagtcctttcctgctgatgacgctactgctggggagactcacaggggtagctggcgaggaagagctgcaggtgattcagcctgacaagtccatatcagttgcagctggagagtcggccactctgcactgcactgtgacttccctgatccctgtggggcccatccagtggttcagaggagctggaccaggccgggaattaatctacaatcagaaagaaggccacttcccacgggtaacaactgtttcagacctcacaaagagaaacaacatggacttttccatccgcatcagtaacatcaccccagcagatgccggcacctactactgtgtgaagttccggaaagggagccccgaccacgtggagtttaagtctggagcaggcaccgagctgtctgtgcgtgccaaaccctctgcccccgtggtatcgggccctgcggcgagggccacacctcagcacacagtgagcttcacctgcgagtcccacggcttctcacccagagacatcaccctgaaatggttcaaaaatgggaatgagctctcagacttccagaccaacgtggaccccgcaggagacagtgtgtcctacagcatccacagcacagccaaggtggtgctgacccgcgaggacgttcactctcaagtcatctgcgaggtggcccacgtcaccttgcagggggaccctcttcgtgggactgccaacttgtctgagaccatccgagttccacccaccttggaggttactcaacagcccgtgagggcagagaaccaggtgaatgtcacctgccaggtgaggaagttctacccccagagactacagctgacctggttggagaatggaaacgtgtccaggacagaaacggcctcaacccttacagaaaacaaggatggtacctacaactggatgagctggctcctggtgaatgtatctgcccacagggatgatgtgaagctcacctgccaggtggagcatgacgggcagccagcggtcagcaaaagccatgacctgaaggtctcagcccacccgaaggagcagggctcaaatactgctcctggcccagcactggcttctgctgctccacttctcatagctttcctcctgggccccaaggtgctgctggtggttggtgtctctgtcatctatgtctactggaagcagaaggcctgactgcatcccagaaggagaccagcaccaggaatacaacagcctcccaggaaatgtttcttaaatgatgagcagatgattaaatatggacatgttacccacagctccttccctcctcccctgccacatggaacccccagtctctcctgcctacttccttccttgaatggctctgactgagagaaggggctggtgagaagcttccccagactgagctccaaacacctcccctcccaggacatcttcctgcccacaggctcctgttgctcctttgcagagtccttgattctccagagcagtcttcattcatggtcctgagcagaggccatgggatggggctctggggagtgactcatgacacctccctaggatgtgggaaacacgccaaatctaaacacatcaggacacctctcctccatcgtcttggactctccgtaagccacaaactgcagtccagattctcaagagttattctgccttctggattcctgcctacccaattacccagccttgttgagattctctattgcctcctgaatacaaattaacactcatcctggttttaaggagaaaaatgattatccttcctctttgtttatacgtatgatataatttggatattttttccctacaaatctcaatgtgaaatttcatcccctatgttggaggtggggtcaggtgggaggtgtttgggtcatggggatggattcatcatgaatgacttggtgttatcttggtctattagcacccacaagatctgattgtttaaaagtgcctagcagctccctcttctctttttctcttcctctctccccatgttatgccaactccacttcactgtccactgtgagcagaagcactctgaggccctcagcagcagatgcaagtaccatgcttcttgtacagtctgcagaaccaaaagccaaataaacctctctttataaatta

SEQ ID NO: 322165 - protein, 398 aa, Artificial Sequence
  derived and/or modified sequence
MPVPASWPHLPSPFLLMTLLLGRLTGVAGEDELQVIQPEKSVSVAAGESATLRCAMTSLIPVGPIMWFRGAGAGRELIYNQKEGHFPRVTTVSELTKRNNLDFSISISNITPADAGTYYCVKFRKGSPDDVEFKSGAGTELSVRAKPSAPVVSGPAVRATPEHTVSFTCESHGFSPRDITLKWFKNGNELSDFQTNVDPAGDSVSYSIHSTARVVLTRGDVHSQVICEIAHITLQGDPLRGTANLSEAIRVPPTLEVTQQPMRAENQANVTCQVSNFYPRGLQLTWLENGNVSRTETASTLIENKDGTYNWMSWLLVNTCAHRDDVVLTCQVEHDGQQAVSKSYALEISAHQKEHGSDITHEAALAPTAPLLVALLLGPKLLLVVGVSAIYICWKQKA

SEQ ID NO: 322166 - DNA, 1197 bp, Artificial Sequence
  derived and/or modified sequence
atgcccgtgcccgccagctggccccacctgcccagccccttcctgctgatgaccctgctgctgggcagactgaccggcgtggccggcgaggacgagctgcaggtgatccagcccgagaagagcgtgagcgtggccgccggcgagagcgccaccctgagatgcgccatgaccagcctgatccccgtgggccccatcatgtggttcagaggcgccggcgccggcagagagctgatctacaaccagaaggagggccacttccccagagtgaccaccgtgagcgagctgaccaagagaaacaacctggacttcagcatcagcatcagcaacatcacccccgccgacgccggcacctactactgcgtgaagttcagaaagggcagccccgacgacgtggagttcaagagcggcgccggcaccgagctgagcgtgagagccaagcccagcgcccccgtggtgagcggccccgccgtgagagccacccccgagcacaccgtgagcttcacctgcgagagccacggcttcagccccagagacatcaccctgaagtggttcaagaacggcaacgagctgagcgacttccagaccaacgtggaccccgccggcgacagcgtgagctacagcatccacagcaccgccagagtggtgctgaccagaggcgacgtgcacagccaggtgatctgcgagatcgcccacatcaccctgcagggcgaccccctgagaggcaccgccaacctgagcgaggccatcagagtgccccccaccctggaggtgacccagcagcccatgagagccgagaaccaggccaacgtgacctgccaggtgagcaacttctaccccagaggcctgcagctgacctggctggagaacggcaacgtgagcagaaccgagaccgccagcaccctgatcgagaacaaggacggcacctacaactggatgagctggctgctggtgaacacctgcgcccacagagacgacgtggtgctgacctgccaggtggagcacgacggccagcaggccgtgagcaagagctacgccctggagatcagcgcccaccagaaggagcacggcagcgacatcacccacgaggccgccctggcccccaccgcccccctgctggtggccctgctgctgggccccaagctgctgctggtggtgggcgtgagcgccatctacatctgctggaagcagaaggcctag

SEQ ID NO: 322167 - DNA, 1197 bp, Artificial Sequence
  derived and/or modified sequence
atgccagtcccagcctcttggccgcacttacccagcccatttctgctgatgacgcttttactgggacggctcaccggcgtagccggagaagacgagctgcaggtcatccagcctgagaagtctgtcagcgtggcggcaggggagtctgctacgttacggtgtgccatgacaagcctgatccctgtaggccccatcatgtggttccgaggagccggcgcaggtagggaactgatctataatcagaaagagggacactttcctcgcgtgacaaccgtcagtgaactgactaaaagaaacaatcttgacttttccattagcatctccaatatcacccccgcagatgctgggacctactactgcgtgaagttccggaaaggctcgccagacgacgttgagttcaaatctggagccggaacagaactctccgttagagcaaagccatcagccccggtggtgagcggtcccgcagtgcgcgctacacctgagcatactgtgagcttcacatgcgagtcacatgggttttctccgagggacattaccttgaagtggttcaaaaacggcaacgaactgtcagactttcagaccaatgtggatcctgctggcgactccgtgagttatagcatccatagtaccgccagggtggtactgacccgcggggacgtgcacagtcaggtgatctgcgaaatcgcccatataactctccagggtgaccctcttaggggcaccgccaatctgagcgaagctatacgcgtgcccccaaccctcgaggttacccaacagcctatgagggcagaaaaccaggcaaacgtgacatgtcaggtttccaacttctatccacgaggcttacagctcacttggttggagaatggcaacgttagtagaaccgagactgcgtccaccttaattgagaataaggatggcacctataattggatgtcttggttgttggtcaatacgtgtgcacatagagatgatgtggtgcttacctgccaggtagagcatgacggccaacaggcggtgtccaaatcgtatgccttggagatcagcgcgcaccagaaagagcacgggagcgatatcacccacgaggctgcgctggccccaacagcccccctgcttgtagctctgctccttggcccaaagctgctactggtggtgggagtatctgctatctacatttgttggaagcagaaagcgtag

SEQ ID NO: 322168 - DNA, 1197 bp, Artificial Sequence
  derived and/or modified sequence
atgcctgtgcctgcctcctggccccacctgcccagccccttcctgctgatgaccctgctgctgggccgcctgactggagtggccggggaggatgagctgcaggtgatccagcctgagaagtctgtgtctgtggccgccggggagagcgccaccctgcgctgtgccatgaccagcctcatccctgtgggccccatcatgtggttcagaggagctggagctggccgggagctgatctacaaccagaaggagggccacttcccccgggtgaccaccgtgtctgagctgaccaagaggaacaacctggacttcagcatcagcatcagcaacatcaccccagcagatgctggcacctactactgtgtgaagttcaggaagggcagcccagatgatgtggagttcaagtctggagctggaacagagctgtctgtgcgggccaagcccagcgcccctgtggtgtctggccctgctgtgcgggccaccccagagcacacagtgtccttcacctgtgagagccacggcttcagcccccgggacatcaccctgaagtggttcaagaatggaaatgagctgagtgacttccagaccaacgtggaccctgctggggacagcgtgtcctacagcatccacagcacagcccgggtggtgctgaccagaggagatgtgcacagccaggtgatctgtgaaattgcccacatcaccctgcagggcgaccccctgcggggcacagccaacctgtctgaggccatccgggtgccccccaccctggaggtgacccagcagcccatgagagctgagaaccaggccaacgtgacctgccaggtgagcaacttctacccccggggcctgcagctgacctggctggagaatggaaatgtgtccaggacagaaacagccagcaccctgattgagaacaaggatggcacctacaactggatgtcctggctgctggtgaacacctgtgcccacagagatgatgtggtgctgacctgccaggtggagcatgatggccagcaggccgtgtccaagagctatgccctggagatcagcgcccaccagaaggagcacggcagtgacatcacccatgaagctgccctggcccccacagcccccctgctggtggccctgctgctgggccccaagctgctgctggtggtgggcgtgtctgccatctacatctgctggaagcagaaggcctag

SEQ ID NO: 322169 - DNA, 1197 bp, Artificial Sequence
  derived and/or modified sequence
atgcccgtgcccgccagctggccccacctgcccagccccttcctgctgatgactcttctcttgggacgcttgaccggggttgccggagaagacgaactgcaggtcattcaacctgaaaaatcggtctccgtggcagcaggagagtctgcaaccctgagatgtgcaatgactagcttgattcccgtggggcctatcatgtggtttaggggcgctggggcaggccgagagctgatttataatcagaaagagggccactttccgagggtcactaccgtgtcggagctgaccaagcggaacaacttggatttttctatctctatttccaatataacccctgcggatgctggaacctactattgtgtcaagtttcgcaaaggttctcctgacgacgtggagttcaagtcaggcgcaggcacagaactgagcgtacgggctaagccaagtgcccccgtggtttctggaccagctgtcagggccacacctgagcacaccgtgagttttacatgtgagagccatggattcagcccccgtgatattaccctgaagtggtttaagaatggtaacgaattaagtgactttcagactaacgtggatcctgcaggcgattcagtttcatactctatccactcgacagcgcgcgttgtattgactcggggggatgtgcacagccaggtaatttgtgaaattgcgcatattacactccagggagatccactgcggggaaccgccaatcttagtgaggccatcagagtcccccctactttggaggtgacccagcagcctatgagggcagagaatcaggctaacgtgacctgccaagttagcaatttctatccgcggggtctacagttaacctggcttgagaatggcaacgtttcacgtacagaaacggcaagcacattgattgaaaacaaagacggcacctataactggatgtcttggctgttggtaaatacctgcgctcatcgcgacgatgtggtgctgacatgccaggtcgagcacgacggacagcaggcagtgagcaaatcctacgcccttgagatttctgcacaccagaaggagcacgggagcgacattacgcacgaagccgctctggcacccaccgcccctttgctggtggctctcctgcttgggcctaaactgctattggtcgtcggggtcagtgctatttacatctgctggaagcagaaagcatag

SEQ ID NO: 322170 - DNA, 1197 bp, Artificial Sequence
  derived and/or modified sequence
atgccagtaccagccagttggccacaccttccgagtccttttctactaatgactctactgttagggaggttgactggggttgctggtgaggacgaactccaggttatccagcccgaaaagagtgtctctgtggcagcaggggagagcgcaactctacggtgtgcaatgacctccctaatccccgtaggccctataatgtggttccgtggggctggcgcagggcgtgaattgatctacaatcagaaggagggccattttccacgtgtaacaacagtgtcagagctgacgaagcggaataacctagactttagcatttcaattagtaatattacgccggcagacgctgggacatactattgcgtgaagtttagaaaaggaagccctgacgacgtagaattcaagtcaggggctggtaccgaactcagcgtccgggcaaagccgagcgcccctgtggtgtctggccctgcagtgcgcgcaactcctgagcataccgtttcctttacatgcgaaagccacggcttttcaccacgcgatatcactttgaagtggttcaagaacggcaatgagctgtctgattttcagacaaacgttgatcctgctggcgactcagtttcgtatagtattcacagcaccgcccgagtcgtcctgacccgcggagacgtgcactcccaagtgatctgcgagatcgctcacataaccctgcagggcgacccactaagagggacagccaacctgagcgaggctatcagagttcctcctacattggaggtcacccaacagcctatgcgggcagaaaaccaggccaatgtcacctgccaggtcagcaacttctatcctcgagggctgcagctgacatggcttgagaatgggaacgtctctagaactgagacggcctctaccctgattgagaataaggatgggacttacaattggatgagctggctcctagtgaacacctgtgcacatcgcgatgatgtcgttctgacttgtcaggtggagcacgacggtcaacaagcagtgtccaagtcctacgcactagagatttcggcccaccagaaggagcacgggagcgatattacccatgaggcagctctggctcctaccgctccattgctagtagcactgctgctgggcccaaagcttcttctggtcgttggcgtgagtgccatttacatttgctggaaacagaaggcgtag

SEQ ID NO: 322171 - DNA, 3241 bp, Artificial Sequence
  derived and/or modified sequence
agagcagagtctgcgatcttcccagcacagacgtttggacagagcaggctcctaaggtctccagaatgcccgtgccagcctcctggccccaccttcctagtcctttcctgctgatgacgctactgctggggagactcacaggagtggcaggtgaggacgagctacaggtgattcagcctgaaaagtccgtatcagttgcagctggagagtcggccactctgcgctgtgctatgacgtccctgatccctgtggggcccatcatgtggtttagaggagctggagcaggccgggaattaatctacaatcagaaagaaggccacttcccacgggtaacaactgtttcagaactcacaaagagaaacaacctggacttttccatcagcatcagtaacatcaccccagcagacgccggcacctactactgtgtgaagttccggaaagggagccctgacgacgtggagtttaagtctggagcaggcactgagctgtctgtgcgcgccaaaccctctgcccccgtggtatcgggccctgcggtgagggccacacctgagcacacagtgagcttcacctgcgagtcccatggcttctctcccagagacatcaccctgaaatggttcaaaaatgggaatgagctctcagacttccagaccaacgtggaccccgcaggagacagtgtgtcctacagcatccacagcacagccagggtggtgctgacccgtggggacgttcactctcaagtcatctgcgagatagcccacatcaccttgcagggggaccctcttcgtgggactgccaacttgtctgaggccatccgagttccacccaccttggaggttactcaacagcccatgagggcagagaaccaggcaaacgtcacctgccaggtgagcaatttctacccccggggactacagctgacctggttggagaatggaaatgtgtcccggacagaaacagcttcgaccctcatagagaacaaggatggcacctacaactggatgagctggctcctggtgaacacctgtgcccacagggacgatgtggtgctcacctgtcaggtggagcatgatgggcagcaagcagtcagcaaaagctatgccctggagatctcagcgcaccagaaggagcacggctcagatatcacccatgaagcagcgctggctcctactgctccactcctcgtagctctcctcctgggccccaagctgctactggtggttggtgtctctgccatctacatctgctggaaacagaaggcctgactgaccctcagtctctgctgcctcctcctttcttgagaagctcagcctgagagaaggagctggcgagaaccttccccacactcagctccaaacgcctcctctcccaggtcatctgcctgcccacacgctcctgttccaccttcacaagaccatgatgccccaaagcagtgtctctattcacggtcctgagcaggggccatgggattgggctctgggcactgactcatggcacctccctagaaggtgagaaacactccaaatctaaacacaccaggacttctcccatccgtcgccttgggactggccataaaccacagactctctccaggctctcaagagttatcctgtcttctggattcctgcctaccccaactcccccagccttgttgaggttctctactgcctcctgaatacacatgaacccctataccaattttaagaaaaaaatgattctctttcctctttgtccaagcatcctatccctcaaacccaaaaagaaagaagctctcccttctctctctgtgatggagacagtatttcttctagtatcctgcagccttcccagtcctgctgcttgtggtagaaatgctgccacagcccaacattgaggagccctcgatgactgccctttacaactcatattcagttctgcctccaaaatgcatgtgtccacttacatgagatggtaaatgtttaacaatggactttctgaaagggaaaaaccaaaagctgttttgcagtgcttgccaatttctctagtgtaataactcccaacctgaccaatttcacactgccaacagttaaacaaccagattgcaagattcctgaaatttaacaattggttttcagggcccagtccaagcctgctgctggaaacctcagagttaaatccctattctccacacctctcacctccaccacccctccctgtcccagccagcatcatctctttggggaccactcctctggctttcatttttcagccacagtgattctttggaaaagtcaaatcatatcacttctctgcttcttccccaacacagctgcatggctcccgctctccctccttcaagtctctgctcaatgtcacttcattaaaggcaccttctataaactaccttgtataaaatattatttattttctctatcccggcattctaatttctcttatcctaattaatttttctttagcccttattttgatgagtattatgccgaatacaggcagccctcacttttcatggcagtgcaagattgcaaaaatgactgtgcaacctgaaacccaggaaagcagtctccatagtcaatcagaaaaacaatgatcattctgtgacctttaccattttttgtcaaaatattagaaactctcacactctcagttacaaatgtagaggacaatgaaaatataatgaaataaatatttatttgtgcactacaattcaaagcattagaaacattgagagttcaagtgctgtttctttgtaaaaatgtatccagagtagttggaagagtgcttgcctttttttgtatatttctaatatggagtgatatagtttggctctgtgtctccatccaaatctcatcttaaattgtaatctgcatgtgttgtgggatgggcctggtaggaggtgactgaatcatgggggcggacttcccccttgctgttcttgtgatagtgagttctcataagatctcagtgagttctcatgagatctggttttttgaaagtgtgtggcaagtcccccttcgctctctctctctctctccctcctgccaccatgtgaagaaggtgcctgcttccttttctccttccaccatggttgtaagtttcctgaggcctcccagtcatgcttcctgttaagcctgtggaactgtgagtccaattaaacctcttttattcataaaatatccagtttctggtagttctttatagcagtgtgagaatgggctaatacacggagcaagcattgtttcttttc

SEQ ID NO: 322172 - protein, 172 aa, Artificial Sequence
  derived and/or modified sequence
MPVPASWPHLPSPFLLMTLLLGRLTGVAGEEELQVIQPDKSISVAAGESATLHCTVTSLIPVGPIQWFRGAGPGRELIYNQKEGHFPRVTTVSDLTKRNNMDFSIRISNITPADAGTYYCVKFRKGSPDHVEFKSGAGTELSVRVLQVKEIKIPRTLASVVIQVYLLQHPVA

SEQ ID NO: 322173 - DNA, 465 bp, Artificial Sequence
  derived and/or modified sequence
tgaagccagccccacaccaagcccagcgtgttcgtgatgaagaacggcaccaacgtggcctgcctggtgaaggagttctaccccaaggacatcagaatcaacctggtgagcagcaagaagatcaccgagttcgaccccgccatcgtgatcagccccagcggcaagtacaacgccgtgaagctgggcaagtacgaggacagcaacagcgtgacctgcagcgtgcagcacgacaacaagaccgtgcacagcaccgacttcgaggtgaagaccgacagcaccgaccacgtgaagcccaaggagaccgagaacaccaagcagcccagcaagagctgccacaagcccaaggccatcgtgcacaccgagaaggtgaacatgatgagcctgaccgtgctgggcctgagaatgctgttcgccaagaccgtggccgtgaacttcctgctgaccgccaagctgttcttcctgtag

SEQ ID NO: 322174 - DNA, 465 bp, Artificial Sequence
  derived and/or modified sequence
taatcccagcctcacaccaagccttccgtcttcgtcatgaaaaacgggactaatgttgcttgtctggtcaaagagttctacccaaaagatattaggattaatcttgtgtcaagcaaaaagatcacagaatttgatcccgctattgtgatctcacctagcggcaaatacaatgctgttaagttaggcaagtacgaggactccaactctgtgacttgctccgtccagcacgacaacaagacagtacacagcaccgattttgaagtgaaaacagattccactgaccacgtcaaacccaaggagacagagaatacaaagcaaccatccaagtcctgtcacaagccaaaggccatcgttcacactgagaaagtgaacatgatgagccttaccgtactcggattgagaatgctcttcgcgaagaccgtagcagtaaacttcctgctcaccgctaaactctttttcctctag

SEQ ID NO: 322175 - DNA, 465 bp, Artificial Sequence
  derived and/or modified sequence
tgaagccagccccacaccaagcccagcgtgtttgtgatgaagaatggcaccaacgtggcctgcctggtgaaggagttctaccccaaggacatccgcatcaacctggtgagcagcaagaagatcacagaatttgatcctgccatcgtcatcagccccagcggcaagtacaatgctgtgaagctgggcaagtatgaggacagcaacagcgtgacctgcagcgtgcagcacgacaacaagacagtgcacagcacagactttgaggtgaagacagacagcacagaccacgtgaagcccaaggagacagagaacaccaagcagcccagcaagagctgccacaagcccaaggccatcgtgcacacagagaaggtgaacatgatgagcctgactgtgctgggcctgaggatgctgtttgccaagacagtggccgtgaacttcctgctgacagccaagctgttcttcctgtag

SEQ ID NO: 322176 - DNA, 465 bp, Artificial Sequence
  derived and/or modified sequence
tgaagccagccccacaccaagcccagcgtgttcgtgatgaagaacggaaccaatgttgcctgcctagtcaaggaattctatcccaaagacattaggatcaacctggtgtcctcaaagaaaatcactgagttcgaccccgctatcgtgatcagccccagcggaaagtacaatgcggtgaagctcggtaagtatgaggattccaattccgtcacatgttcagtccagcacgataacaaaacagtacacagcaccgactttgaggtgaagacagactcaactgaccacgttaaacctaaagagactgagaacaccaagcagccatccaaatcatgccataaacccaaggccatcgttcacacggagaaggtgaacatgatgagcctcaccgtgcttggccttcgaatgctgttcgccaagacagtcgctgtgaacttcctgctgactgccaaattattttttctatag

SEQ ID NO: 322177 - DNA, 465 bp, Artificial Sequence
  derived and/or modified sequence
taatcccagcctcacactaagccgtccgtctttgttatgaaaaatggaacgaacgtcgcttgcctggtcaaagagttttaccctaaggacattcggatcaatctggtaagctccaagaaaattactgaattcgacccagctatagtgatttctccttcgggtaagtacaacgcagtgaaactcggcaagtatgaggacagcaacagcgttacctgcagcgttcaacacgataacaaaaccgtacactccaccgatttcgaggtgaagaccgactccacagaccatgtgaagccaaaggagaccgaaaacaccaagcagcccagcaaatcttgtcataagccgaaggctatcgtgcacacagaaaaggtcaatatgatgtcccttaccgttctgggcctccgaatgctgtttgccaagactgtggccgtgaacttcctgctcaccgccaagttattttttttgtag

SEQ ID NO: 322178 - DNA, 720 bp, Artificial Sequence
  derived and/or modified sequence
gaagtcagcctcataccaaaccatccgtttttgtcatgaaaaatggaacaaatgtcgcttgtctggtgaaggaattctaccccaaggatataagaataaatctcgtgtcatccaagaagataacagagtttgatcctgctattgtcatctctcccagtgggaagtacaatgctgtcaagcttggtaaatatgaagattcaaattcagtgacatgttcagttcaacacgacaataaaactgtgcactccactgactttgaagtgaagacagattctacagatcacgtaaaaccaaaggaaactgaaaacacaaagcaaccttcaaagagctgccataaacccaaagccatagttcataccgagaaggtgaacatgatgtccctcacagtgcttgggctacgaatgctgtttgcaaagactgttgccgtcaattttctcttgactgccaagttatttttcttgtaaggctgactggcatgaggaagctacactcctgaagaaaccaaaggcttacaaaaatgcatctccttggcttctgacttctttgtgattcaagttgacctgtcatagccttgttaaaatggctgctagccaaaccactttttcttcaaagacaacaaacccagctcatcctccagcttgatgggaagacaaaagtcctggggaaggggggtttatgtcctaactgctttgtatgctgttttataaagggatagaagga

SEQ ID NO: 322179 - DNA, 519 bp, Artificial Sequence
  derived and/or modified sequence
atgcccgtgcccgccagctggccccacctgcccagccccttcctgctgatgaccctgctgctgggcagactgaccggcgtggccggcgaggaggagctgcaggtgatccagcccgacaagagcatcagcgtggccgccggcgagagcgccaccctgcactgcaccgtgaccagcctgatccccgtgggccccatccagtggttcagaggcgccggccccggcagagagctgatctacaaccagaaggagggccacttccccagagtgaccaccgtgagcgacctgaccaagagaaacaacatggacttcagcatcagaatcagcaacatcacccccgccgacgccggcacctactactgcgtgaagttcagaaagggcagccccgaccacgtggagttcaagagcggcgccggcaccgagctgagcgtgagagtgctgcaggtgaaggagatcaagatccccagaaccctggccagcgtggtgatccaggtgtacctgctgcagcaccccgtggcctag

SEQ ID NO: 322180 - DNA, 519 bp, Artificial Sequence
  derived and/or modified sequence
atgcccgttcccgcttcctggccccatctcccttccccctttttgctaatgacacttctcctggggcgtttgacaggtgtcgctggcgaggaggaactgcaggtgatacagcctgacaaaagcattagtgtagctgctggagaatccgcaaccctgcactgtaccgtgacatctttgattcctgtgggaccaatccagtggtttaggggggcaggaccgggccgagaattgatttataaccaaaaggagggccattttcccagggtcaccacagtgtccgaccttaccaagcgaaacaacatggacttttcaattcggatttctaatattactccagccgacgcgggaacgtactactgcgttaagttccgtaagggtagtcccgatcatgttgagttcaagagcggagcaggaacagagctgtcagttcgcgtcttgcaagtgaaagaaattaagatccctcgtactttggcctccgtggtgatccaggtgtatctgctgcagcatcccgtggcctag

SEQ ID NO: 322181 - DNA, 519 bp, Artificial Sequence
  derived and/or modified sequence
atgcctgtgcctgcctcctggccccacctgcccagccccttcctgctgatgaccctgctgctgggccgcctgactggagtggccggggaggaggagctgcaggtgatccagcctgacaagagcatctctgtggccgccggggagagcgccaccctgcactgcaccgtgaccagcctcatccctgtgggccccatccagtggttcagaggagctggccctggccgggagctgatctacaaccagaaggagggccacttcccccgggtgaccaccgtgtctgacctgaccaagaggaacaacatggacttcagcatccgcatcagcaacatcaccccagcagatgctggcacctactactgtgtgaagttcaggaagggcagcccagaccacgtggagttcaagtctggagctggaacagagctgtctgtgcgggtgctgcaggtgaaggagatcaagatccccaggaccctggcctctgtggtgatccaggtgtacctgctgcagcaccctgtggcctag

SEQ ID NO: 322182 - DNA, 519 bp, Artificial Sequence
  derived and/or modified sequence
atgcccgtgcccgccagctggccccacctgcccagccccttcctgctgatgactttattattagggcggctgacgggagtcgcaggcgaggaggagctgcaggtcatccaacctgacaagagtatctcagtcgccgcgggggagtccgctacactgcattgcactgtcacatccctgattccagtggggcccatacagtggttccggggcgcgggcccaggccgggagctgatctataaccagaaggagggtcattttcccagagtgactactgtgtccgatctgaccaagcgtaacaacatggactttagcatcaggattagtaatatcactcccgccgacgccgggacttattactgtgtgaaatttcgcaaagggtctcccgaccacgtagaattcaaaagtggcgcgggcaccgaactctcagtaagagtgctgcaagtgaaagagattaaaataccacggacactggcttccgtggtgattcaggtgtacctcctccaacatccagttgcttag

SEQ ID NO: 322183 - DNA, 519 bp, Artificial Sequence
  derived and/or modified sequence
atgccagtgcccgcaagctggcctcaccttccatcccccttcttgctgatgaccctgcttcttgggcgactcactggagtcgcaggagaggaagagctacaggtcattcaacccgacaagagcatcagcgtggcggctggggagagtgctactctgcattgcaccgttacttcactcatccctgtgggcccaatccaatggttccggggagctgggcctggacgtgagctgatctacaatcaaaaagaaggacactttcctcgagtaaccaccgtctctgaccttactaaacgaaacaacatggatttttcaatacggatatccaacatcactcccgctgatgcagggacctactattgcgtaaaatttcgtaagggaagtccggaccacgtcgaatttaaatctggtgcgggaaccgagctgtcggtcagagttctgcaggttaaggagattaaaatccctagaaccttagcaagcgtcgttatacaggtgtatttacttcaacatcccgtcgcgtag

SEQ ID NO: 322184 - DNA, 656 bp, Artificial Sequence
  derived and/or modified sequence
agcacagacgtttggacagagcaggctcctaaggtctccagaatgcccgtgccagcctcctggccccaccttcctagtcctttcctgctgatgacgctactgctggggagactcacaggggtagctggcgaggaagagctgcaggtgattcagcctgacaagtccatatcagttgcagctggagagtcggccactctgcactgcactgtgacttccctgatccctgtggggcccatccagtggttcagaggagctggaccaggccgggaattaatctacaatcagaaagaaggccacttcccacgggtaacaactgtttcagacctcacaaagagaaacaacatggacttttccatccgcatcagtaacatcaccccagcagatgccggcacctactactgtgtgaagttccggaaagggagccccgaccacgtggagtttaagtctggagcaggcaccgagctgtctgtgcgtgtactccaggtgaaagagatcaaaatcccacggaccctggcttcagttgttatccaggtctatctactgcaacatcctgtggcttgacctctagcagccaaaccctctgcccccgtggtatcgggccctgcggcgagggccacacctcagcacacagtgagcttcacctgcgagtcccacgg

SEQ ID NO: 322185 - protein, 263 aa, Artificial Sequence
  derived and/or modified sequence
MDEKTKKAEEMALSLTRAVAGGDEQVAMKCAIWLAEQRVPLSVQLKPEVSPTQDIRSRGEKTEEVGEVREVPDHGGPRVLPRVDSKSSVEPLEGPNWLWVSVEDAQMHTVTIWLTVRPDMTVASLKDMVFLDYGFPPVLQQWVIGQRLARDQETLHSHGVRQNGDSAYLYLLSARNTSLNPQELQRERQLRMLEDLGFKDLTLQPRGPLEPGPPKPGVPQEPGRGQPDAVPEPPPVGWQCPGCTFINKPTRPGCEMCCRARPE

SEQ ID NO: 322186 - DNA, 792 bp, Artificial Sequence
  derived and/or modified sequence
atggatgagaagaccaaaaaggccgaagagatggccttgagcctgacacgggcagtggctgggggggatgaacaggtcgcaatgaagtgcgctatctggcttgcagagcaacgggtgcccctctctgtgcagctcaaaccagaagtctcacccacccaggatataaggtccaggggggagaagaccgaagaggtgggagaggtccgcgaagtgccggatcatggcggcccccgggtgctacctagagtggactcgaagtcgagtgttgaaccactggaaggacctaattggctttgggtgtcggtggaggacgctcagatgcacacagtcacaatatggcttacagtgagaccagacatgaccgttgcttctctcaaggacatggtgtttctggactacggcttccctcctgtgctccagcagtgggtgattggacagagactcgcccgggaccaggagaccctccatagccatggtgtaaggcaaaatggggactcagcctatctctatttgctcagcgccaggaacacttctctcaatccacaagaattgcaaagggaacggcagttgcggatgctggaggacctgggattcaaggacctaaccttgcagccaaggggtcccctagaaccaggaccacccaagcctggtgtgccccaggagccagggagagggcagcccgatgccgttccagagcccccacccgtaggctggcagtgtccgggctgtaccttcattaataagccaactaggccaggatgcgaaatgtgctgtagagctcgccccgagtag

SEQ ID NO: 322187 - DNA, 792 bp, Artificial Sequence
  derived and/or modified sequence
atggatgagaagaccaagaaggccgaggagatggccctgagcctgaccagggctgtggccggaggagatgagcaggtggccatgaagtgtgccatctggctggccgagcagagggtgcccctgtctgtgcagctgaagccagaggtgagccccacccaggacatccgcagcagaggagagaagacagaggaggtgggggaggtgcgggaggtgcctgaccacggcggcccccgggtgctgccccgggtggacagcaagagctctgtggagcccctggagggccccaactggctgtgggtgtctgtggaggatgcccagatgcacacagtgaccatctggctgactgtgcggccagacatgacagtggccagcctgaaggacatggtgttcctggactatggcttcccccctgtgctgcagcagtgggtgattggccagaggctggcccgggaccaggagaccctgcacagccacggcgtgcggcagaatggagacagcgcctacctgtacctgctgagcgccaggaacaccagcctgaacccccaggagctgcagcgggagcggcagctgaggatgctggaggacctgggcttcaaggacctgaccctgcagccccggggccccctggagcccggcccccccaagccaggagtgccccaggagcccggccggggccagccagatgctgtgcctgagcccccacctgtgggctggcagtgccccggctgcaccttcatcaacaagcccacccggcccggctgtgagatgtgctgccgggcccggcctgagtag

SEQ ID NO: 322188 - DNA, 792 bp, Artificial Sequence
  derived and/or modified sequence
atggacgagaagaccaagaaggccgaggagatggccctgagcctgaccagggccgtggccggcggcgacgaacaggtggccatgaagtgcgcaatatggcttgctgagcaacgcgtgcctttgtcagtgcagcttaagcccgaagtgtctcccacccaggacataaggagcaggggcgaaaagaccgaagaggtcggtgaagtgagagaggtacctgaccatggaggtcctcgtgtattgcccagagtggacagtaagtcctctgtagagccattggaaggcccaaactggttgtgggtcagcgtggaagacgcacagatgcatacggtcacaatatggctgacagtgaggcccgacatgactgttgcttcccttaaggatatggtcttcctggactatgggttccccccggtccttcaacagtgggttattggccaaagactcgcgagagatcaagaaaccttgcattcacatggcgtacgtcagaacggcgatagtgcctatctttacctcctgtctgctcgtaacacctcactcaacccacaggagcttcagcgagaacggcagttgcggatgctggaggaccttggctttaaggacctgacactgcagcccagaggacctctggagccgggtcctccgaagcctggcgtgccccaggagcccgggcgggggcagcctgatgccgtgcctgaacccccacccgtggggtggcaatgcccaggctgcacctttatcaataagcctactcgccccgggtgtgagatgtgctgtcgcgccagacctgagtag

SEQ ID NO: 322189 - DNA, 792 bp, Artificial Sequence
  derived and/or modified sequence
atggatgagaagaccaagaaggcagaggagatggcactcagcctgaccagagccgtggccggaggagacgaacaggtggctatgaagtgcgctatctggttggcggagcagcgcgtcccgttaagtgtacaactgaagcctgaagtttcacctacgcaggacattcgctcaaggggggagaagactgaagaggtcggggaagttagggaggtacccgaccacggtgggccacgcgttctacctagagtggatagtaagtctagcgtggagcctctcgaaggcccaaattggttgtgggtctccgtggaagacgcgcagatgcacacggtcactatttggctcactgttaggcccgatatgacagtcgcctcactgaaggacatggtcttcctggactatggattccccccagttctccagcaatgggtgataggacagcgcctggcaagggaccaggaaactcttcattcacatggagtgcgtcaaaacggtgattctgcatatttgtacctgctgtccgcaaggaacacttcactgaatcctcaggaactccaacgagagagacagctgagaatgctagaggaccttgggttcaaggacctgaccctgcaaccaagaggcccactggagcccggtcccccaaagccgggtgtaccacaggagccaggccgaggccagccagacgcagttcctgaaccacccccagtgggctggcagtgtcctggttgcacgttcattaataagccgacacgaccagggtgtgagatgtgctgtcgggctcgacctgaatag

SEQ ID NO: 322190 - DNA, 1242 bp, Artificial Sequence
  derived and/or modified sequence
actttctcttccgccgaagccgctccccttgcgaagaactggggcctcccgggaggagagagggctttgccttgaaacccgggacgccaggggcgctcccgcaagtgggggtcctccgggacttggaacgccccggctgggtggtgtccgggcgtcctttccccgcttcttcccacctcggctggtcccgtttcctcctgcgcccagtgcggacctgtctcggcgcccgctgccctctcaccgccccacgcaggatcccggcctggtcaccgggcagtgtgatgcttcccgactgccgcggggacagcgaggcacacacagggcttgggccgcgccggaggccacacggcctggctgagttgctcctggtctcccgcctctcccaggcgacccggaggtagcatttcccaggaggcacggtcccccccagggggatgggcacagccacgccagatggacgagaagaccaagaaagcagaggaaatggccctgagcctcacccgagcagtggcgggcggggatgaacaggtggcaatgaagtgtgccatctggctggcagagcaacgggtgcccctgagtgtgcaactgaagcctgaggtctccccaacgcaggacatcaggagcaggggagagaagacagaagaggttggagaggtcagggaggtgccagatcatggaggccctcgtgtgctgccacgagttgattctaagagtagcgtggagccattggaggggcctaactggctgtgggtgagcgtggaggatgctcagatgcacaccgtcaccatctggctcacagtgcgccctgatatgacagtggcgtctctcaaggacatggtttttctggactatggcttcccaccagtcttgcagcagtgggtgattgggcagcggctggcacgagaccaggagaccctgcactcccatggggtgcggcagaatggggacagtgcctacctctatctgctgtcagcccgcaacacctccctcaaccctcaggagctgcagcgggagcggcagctgcggatgctggaagatctgggcttcaaggacctcacgctgcagccgcggggccctctggagccaggccccccaaagcccggggtcccccaggaacccggacgggggcagccagatgcagtgcctgagcccccaccggtgggctggcagtgccccgggtgcaccttcatcaacaagcccacgcggcctggctgtgagatgtgctgccgggcgcgccccgag

SEQ ID NO: 322191 - DNA, 792 bp, Artificial Sequence
  derived and/or modified sequence
atggacgagaagaccaagaaggccgaggagatggccctgagcctgaccagagccgtggccggcggcgacgagcaggtggccatgaagtgcgccatctggctggccgagcagagagtgcccctgagcgtgcagctgaagcccgaggtgagccccacccaggacatcagaagcagaggcgagaagaccgaggaggtgggcgaggtgagagaggtgcccgaccacggcggccccagagtgctgcccagagtggacagcaagagcagcgtggagcccctggagggccccaactggctgtgggtgagcgtggaggacgcccagatgcacaccgtgaccatctggctgaccgtgagacccgacatgaccgtggccagcctgaaggacatggtgttcctggactacggcttcccccccgtgctgcagcagtgggtgatcggccagagactggccagagaccaggagaccctgcacagccacggcgtgagacagaacggcgacagcgcctacctgtacctgctgagcgccagaaacaccagcctgaacccccaggagctgcagagagagagacagctgagaatgctggaggacctgggcttcaaggacctgaccctgcagcccagaggccccctggagcccggcccccccaagcccggcgtgccccaggagcccggcagaggccagcccgacgccgtgcccgagcccccccccgtgggctggcagtgccccggctgcaccttcatcaacaagcccaccagacccggctgcgagatgtgctgcagagccagacccgagtag

SEQ ID NO: 322192 - protein, 255 aa, Artificial Sequence
  derived and/or modified sequence
  misc_feature (1)..(1): Xaa can be any naturally occurring amino acid
XEMALSLTRAVAGGDEQVAMKCAIWLAEQRVPLSVQLKPEVSPTQDIRSRGEKTEEVGEVREVPDHGGPRVLPRVDSKSSVEPLEGPNWLWVSVEDAQMHTVTIWLTVRPDMTVASLKDMVFLDYGFPPVLQQWVIGQRLARDQETLHSHGVRQNGDSAYLYLLSARNTSLNPQELQRERQLRMLEDLGFKDLTLQPRGPLEPGPPKPGVPQEPGRGQPDAVPEPPPVGWQCPGCTFINKPTRPGCEMCCRARPE

SEQ ID NO: 322193 - DNA, 768 bp, Artificial Sequence
  derived and/or modified sequence
tgagaaatggcactgagcttgacgagagctgtggccggaggggatgaacaggtggccatgaaatgtgctatttggctggcagaacagcgggtccccctgtctgtccaactgaaaccagaggtatctcctactcaggatatcaggtcccgcggcgaaaagaccgaagaagtgggcgaggtgcgggaggtgcccgaccatgggggacctagggtgctgccaagagtggattctaaatccagtgtggagcctctcgaaggtccaaattggctttgggtcagcgtcgaggacgctcaaatgcatacagtcacaatctggcttaccgtccgaccagacatgaccgtcgcttccctgaaggacatggtgtttctcgactacggtttccctcctgtgctgcagcagtgggtgatcgggcaaagacttgcccgcgatcaggaaaccctgcatagtcacggagttaggcagaacggtgattcagcctatttgtacttattgagcgctagaaataccagcctgaaccctcaagagctgcagcgcgaacgtcagctgcgaatgctcgaagacttaggcttcaaggatctcaccctgcaaccccggggccccttggaacctggtcctccgaaacccggagtcccacaggaacctggtcgcgggcaaccagacgccgtccccgagccacccccagtgggctggcagtgtcctggatgcacattcatcaacaaacccactagaccgggctgtgagatgtgttgtagagccagacctgaatag

SEQ ID NO: 322194 - DNA, 768 bp, Artificial Sequence
  derived and/or modified sequence
tgagaaatggccctgagcctgaccagggctgtggccggaggagatgagcaggtggccatgaagtgtgccatctggctggccgagcagagggtgcccctgtctgtgcagctgaagccagaggtgagccccacccaggacatccgcagcagaggagagaagacagaggaggtgggggaggtgcgggaggtgcctgaccacggcggcccccgggtgctgccccgggtggacagcaagagctctgtggagcccctggagggccccaactggctgtgggtgtctgtggaggatgcccagatgcacacagtgaccatctggctgactgtgcggccagacatgacagtggccagcctgaaggacatggtgttcctggactatggcttcccccctgtgctgcagcagtgggtgattggccagaggctggcccgggaccaggagaccctgcacagccacggcgtgcggcagaatggagacagcgcctacctgtacctgctgagcgccaggaacaccagcctgaacccccaggagctgcagcgggagcggcagctgaggatgctggaggacctgggcttcaaggacctgaccctgcagccccggggccccctggagcccggcccccccaagccaggagtgccccaggagcccggccggggccagccagatgctgtgcctgagcccccacctgtgggctggcagtgccccggctgcaccttcatcaacaagcccacccggcccggctgtgagatgtgctgccgggcccggcctgagtag

SEQ ID NO: 322195 - DNA, 768 bp, Artificial Sequence
  derived and/or modified sequence
tgagagatggccctgagcctgacccgggccgtggccggcggcgacgagcaggtggcgatgaagtgcgccatctggctcgcggaacagagagtgccccttagcgtacagctgaaaccagaagtgtccccgacacaggacattagaagccggggcgagaaaactgaagaagtcggtgaggtgcgcgaagttccggaccatgggggcccacgggtgctacctagagtggatagcaagtcctctgtggagccgctcgaggggcccaactggctttgggtttccgttgaagacgcccagatgcataccgtcacaatctggctcaccgtgcggccggatatgacggtcgcatcactgaaggatatggtgtttctcgattacggttttcccccagttctccaacagtgggtcattgggcaacgcctcgccagggaccaggagacactgcattcccacggtgtgagacagaatggggatagcgcgtacctttatttactcagcgctcgcaatacatctctaaatccccaagagctccagcgggagcgccagcttcgaatgcttgaggatcttggctttaaagatctgacccttcagccccgcgggcctttagagcccggcccccctaaacccggagtcccacaggagcccggtagggggcaacccgatgccgtgcccgaaccaccgcccgtgggttggcagtgtcccggatgtactttcattaacaagcccactcgccctgggtgcgaaatgtgctgcagagctagacctgagtag

SEQ ID NO: 322196 - DNA, 768 bp, Artificial Sequence
  derived and/or modified sequence
taagagatggcactgagcctgacgagggccgtagcgggtggtgacgaacaagtggcaatgaagtgcgcgatatggctggccgagcaacgcgtccccttatctgtgcagctaaagccagaggtgagtcctacccaggatattcgaagccggggagaaaagactgaagaagtcggcgaggtgagggaggtccctgaccatggaggtcctcgggtgctgccgagggtggattccaaatcatccgtagagcccctcgaaggtccgaattggctgtgggtgagcgtggaagatgcccaaatgcacaccgtcactatatggttgactgttcgaccggacatgaccgtggcttcgctgaaagacatggtcttcctcgactatggcttccccccagtactgcagcagtgggtgatcggacagcgcttggctagggaccaggaaaccctgcactcccacggagtccgccagaatggagattccgcatacctgtatctcctgagcgctagaaacacttctctaaacccacaggagttacagagagaacggcagctccggatgctagaagacctgggttttaaggacctcacgcttcagcccagggggcctctcgaacccggaccacctaaacctggggtgccccaagagcccggacgtgggcagcccgatgctgtgcccgagcccccaccggtcggatggcagtgcccaggctgcacctttatcaacaagcctactcggcctgggtgtgaaatgtgttgtagagcaaggccggagtag

SEQ ID NO: 322197 - DNA, 765 bp, Artificial Sequence
  derived and/or modified sequence
aggaaatggccctgagcctcacccgagcagtggcgggcggggatgaacaggtggcaatgaagtgtgccatctggctggcagagcaacgggtgcccctgagtgtgcaactgaagcctgaggtctccccaacgcaggacatcaggagcaggggagagaagacagaagaggttggagaggtcagggaggtgccagatcatggaggccctcgtgtgctgccacgagttgattctaagagtagcgtggagccattggaggggcctaactggctgtgggtgagcgtggaggatgctcagatgcacaccgtcaccatctggctcacagtgcgccctgatatgacagtggcgtctctcaaggacatggtttttctggactatggcttcccaccagtcttgcagcagtgggtgattgggcagcggctggcacgagaccaggagaccctgcactcccatggggtgcggcagaatggggacagtgcctacctctatctgctgtcagcccgcaacacctccctcaaccctcaggagctgcagcgggagcggcagctgcggatgctggaagatctgggcttcaaggacctcacgctgcagccgcggggccctctggagccaggccccccaaagcccggggtcccccaggaacccggacgggggcagccagatgcagtgcctgagcccccaccggtgggctggcagtgccccgggtgcaccttcatcaacaagcccacgcggcctggctgtgagatgtgctgccgggcgcgccccgagg

SEQ ID NO: 322198 - DNA, 768 bp, Artificial Sequence
  derived and/or modified sequence
tgagagatggccctgagcctgaccagagccgtggccggcggcgacgagcaggtggccatgaagtgcgccatctggctggccgagcagagagtgcccctgagcgtgcagctgaagcccgaggtgagccccacccaggacatcagaagcagaggcgagaagaccgaggaggtgggcgaggtgagagaggtgcccgaccacggcggccccagagtgctgcccagagtggacagcaagagcagcgtggagcccctggagggccccaactggctgtgggtgagcgtggaggacgcccagatgcacaccgtgaccatctggctgaccgtgagacccgacatgaccgtggccagcctgaaggacatggtgttcctggactacggcttcccccccgtgctgcagcagtgggtgatcggccagagactggccagagaccaggagaccctgcacagccacggcgtgagacagaacggcgacagcgcctacctgtacctgctgagcgccagaaacaccagcctgaacccccaggagctgcagagagagagacagctgagaatgctggaggacctgggcttcaaggacctgaccctgcagcccagaggccccctggagcccggcccccccaagcccggcgtgccccaggagcccggcagaggccagcccgacgccgtgcccgagcccccccccgtgggctggcagtgccccggctgcaccttcatcaacaagcccaccagacccggctgcgagatgtgctgcagagccagacccgagtag

SEQ ID NO: 322199 - protein, 165 aa, Artificial Sequence
  derived and/or modified sequence
MASGVQVADEVCRIFYDMKVRKCSTPEEIKKRKKAVIFCLSADKKCIIVEEGKEILVGDVGVTITDPFKHFVGMLPEKDCRYALYDASFETKESRKEELMFFLWAPELAPLKSKMIYASSKDAIKKKFQGIKHECQANGPEDLNRACIAEKLGGSLIVAFEGCPV

SEQ ID NO: 322200 - protein, 148 aa, Artificial Sequence
  derived and/or modified sequence
MKVRKCSTPEEIKKRKKAVIFCLSADKKCIIVEEGKEILVGDVGVTITDPFKHFVGMLPEKDCRYALYDASFETKESRKEELMFFLWAPELAPLKSKMIYASSKDAIKKKFQGIKHECQANGPEDLNRACIAEKLGGSLIVAFEGCPV

SEQ ID NO: 322201 - DNA, 498 bp, Artificial Sequence
  derived and/or modified sequence
atggcctcaggggtccaggtcgccgatgaggtttgccggatcttctacgacatgaaagttcgaaaatgttcaacccccgaagaaattaagaagaggaaaaaggccgtgattttttgtctttcagccgataagaagtgcatcattgtggaggaagggaaagagattctcgtcggggatgtcggcgtgaccattacagaccccttcaagcattttgttggaatgctgccggagaaagattgccgctacgctctgtatgacgcaagcttcgagacaaaggaatcacgtaaggaagaattgatgttctttctgtgggcccccgagcttgcccctctgaagtcaaagatgatctacgccagttctaaggacgctattaagaagaagttccaggggattaagcatgagtgccaagcgaatgggcccgaggacttaaatagggcctgtatcgccgagaaattggggggtagcctgattgtggcttttgaaggctgtccagtctag

SEQ ID NO: 322202 - DNA, 498 bp, Artificial Sequence
  derived and/or modified sequence
atggccagcggcgtgcaggtggctgatgaggtgtgccgcatcttctatgacatgaaggtgaggaagtgcagcaccccagaggagatcaagaagaggaagaaggctgtgatcttctgcctgtctgctgacaagaagtgcatcatcgtggaggagggcaaggagatcctggtgggagatgtgggcgtgaccatcacagaccccttcaagcactttgtgggcatgctgcctgagaaggactgccgctatgccctgtatgatgccagctttgagaccaaggagagcaggaaggaggagctgatgttcttcctgtgggcccctgagctggcccccctgaagagcaagatgatctatgccagcagcaaggatgccatcaagaagaagttccagggcatcaagcatgagtgccaggccaacggccctgaggacctgaacagagcctgcatcgccgagaagctgggcggcagcctgattgtggcctttgagggctgccctgtgtag

SEQ ID NO: 322203 - DNA, 498 bp, Artificial Sequence
  derived and/or modified sequence
atggccagcggcgtgcaggtggccgacgaggtgtgccggatcttctacgatatgaaggtgaggaagtgttctacccctgaagaaataaagaagcggaagaaagctgttattttttgtctgagcgccgacaagaaatgcattatcgtcgaagagggaaaggagattcttgtgggtgatgtgggagtgacgattaccgacccttttaagcattttgtgggaatgctccccgagaaagactgccggtatgccctgtatgatgcctcattcgagaccaaagaatctcggaaggaggagcttatgttttttttgtgggcccccgagctcgccccactgaaatcgaagatgatatacgcctcttccaaggacgctatcaagaagaagttccagggcataaagcacgagtgccaagcaaacgggccagaagacctaaatagagcatgtatcgccgagaagctgggtggatcgcttatcgtcgccttcgaaggttgtccagtgtag

SEQ ID NO: 322204 - DNA, 498 bp, Artificial Sequence
  derived and/or modified sequence
atggcatcaggcgtgcaggtggccgacgaggtttgcagaatcttctacgatatgaaggtgaggaagtgtagcacacctgaggagattaagaagcgaaagaaggctgtgatcttctgcctgtccgccgacaagaaatgtattatcgttgaggagggaaaggaaattctcgttggcgatgtgggagtgaccataactgacccctttaagcattttgtggggatgctccctgagaaggactgccggtatgccctgtacgacgcgtctttcgagactaaggagtcaaggaaggaagaactgatgttcttcctttgggctccagagttggcgccactcaagagtaagatgatctatgccagctccaaagatgcgattaagaaaaaattccaggggattaagcacgaatgtcaagccaatggacctgaagacttaaaccgggcttgcatcgccgagaagcttgggggatctctgattgtagcttttgagggatgccctgtttag

SEQ ID NO: 322205 - DNA, 498 bp, Artificial Sequence
  derived and/or modified sequence
atggccagcggcgtgcaggtggccgacgaggtgtgcagaatcttctacgacatgaaggtgagaaagtgcagcacccccgaggagatcaagaagagaaagaaggccgtgatcttctgcctgagcgccgacaagaagtgcatcatcgtggaggagggcaaggagatcctggtgggcgacgtgggcgtgaccatcaccgaccccttcaagcacttcgtgggcatgctgcccgagaaggactgcagatacgccctgtacgacgccagcttcgagaccaaggagagcagaaaggaggagctgatgttcttcctgtgggcccccgagctggcccccctgaagagcaagatgatctacgccagcagcaaggacgccatcaagaagaagttccagggcatcaagcacgagtgccaggccaacggccccgaggacctgaacagagcctgcatcgccgagaagctgggcggcagcctgatcgtggccttcgagggctgccccgtgtag

SEQ ID NO: 322206 - DNA, 1940 bp, Artificial Sequence
  derived and/or modified sequence
ttctagcctcctgcagaccagagaggacgcacccccacccctaaacactttctggtgaggcggaccctgccccgcagccttcagcagatgagggaagctcccctccgagactctggatagccgccgggggggcgttgcctggccggctggttgcgtagcaacggcaggcggtgcgtgacgtgcgcagccgcgttccgtcctgaggcgcgcccgccccggggtaagctcgcgccgccgcgtcagctcagcgctgggtctctcggtcccgcagccgtgaggaggacggtctgcatactcgctgcccgccggctccctcccccgcgtccctgcgaccgccgcggcgaagatggcctcaggagtgcaagtagctgatgaagtatgtcgcattttttatgacatgaaagttcgtaaatgctccacaccagaagaaatcaagaaaagaaagaaggctgtcattttttgtctcagtgcagacaaaaagtgcatcattgtagaagaaggcaaagagatcttggttggagatgttggtgtaaccataactgatcctttcaagcattttgtgggaatgcttcctgaaaaagattgtcgctatgctttgtatgatgcaagctttgaaacaaaagaatccagaaaagaagagttgatgttttttttgtgggcaccagaactagcacctctgaaaagtaaaatgatctatgcaagctccaaggatgcaattaaaaagaaatttcaaggcataaaacatgaatgtcaagcaaatggaccagaagatctcaatcgggcttgtattgctgaaaagttaggtggatccttaattgtagcctttgaaggatgccctgtgtagattattcagtgccacaaattgaaagcttccatgtttaatgttatcctcttgctatataaataaagcaaatatatttaggccagggtctcactgagggggagctgtcttgtcatcttttagagtaaactattctataaacatatgcaaacagccctaaataaatctaaagtctaaagttttattgatgtgaaattaaattcttattggccaaatgcctgttttgatgagttgatttataaagatttttgttaagctcaggattttaaattacacagttcacaaacagtaaaggccatgtgaagagaattattacatctttattaacctcagcatttactttgtttcttttgcttaggaaattgctcataatctggttataattttggtccaaattctttattcttccttgagctaagcagaataatggaatataatatgtcttcataatataacaacactaatacactaatagtaagattaagttaggcagtcttctaccaaatgtgtaatggagattgcctcaaaattgtgtccacataatccacgctcatcttgcaaagcgctatttcaggcacatcattggaatacaggaagtagccctgcacctgccagtgagctcgccattcactgattggaagagtgacctggcatcttggaaatcattgtgtgtcttcaggagaatgtgcagtgtcttgtaacaactaattataatgcaaattagggctacattgtaatctgctttgttaatgaaaatgataaaacagaatattgacaagctaggacacctgtggtatctttaattgtatctccttcagaagtttgcttcttatggtataataaagtatggaagaatattgagtatatgtttactctgggcctgggagaacttaactttctagagcagtttgttgacttgtgtgcaatggggagaggtaccatgatgacactcacagggagccactgttcactgacacttggaagcggtcattgttaatatcacgggcgtaacactttgaacgatatagagatgcacaaacagttgaacttagaagtagcagtattggctttatgtaataaaggaagcatttttgactta

SEQ ID NO: 322207 - DNA, 1746 bp, Artificial Sequence
  derived and/or modified sequence
gggaagctcccctccgagactctggatagccgccgggggggcgttgcctggccggctggttgcgtagcaacggcaggcggtgcgtgacgtgcgcagccgcgttccgtcctgaggcgcgcccgccccggggtaagctcgcgccgccgcgtcagctcagcgctgggtctctcggtcccgcagccgtgaggaggacggtctgcatactcgctgcccgccggctccctcccccgcgtccctgcgaccgccgcggcgaagatgattttcagttcacccactagaggcaaagacgtaagagagctaccagcgtattgagaggagatacacaggcactacgagaatggagtttagaagaaggtcagagccctgggcagtgttgggccaggctttagggcctcaggagtgcaagtagctgatgaagtatgtcgcattttttatgacatgaaagttcgtaaatgctccacaccagaagaaatcaagaaaagaaagaaggctgtcattttttgtctcagtgcagacaaaaagtgcatcattgtagaagaaggcaaagagatcttggttggagatgttggtgtaaccataactgatcctttcaagcattttgtgggaatgcttcctgaaaaagattgtcgctatgctttgtatgatgcaagctttgaaacaaaagaatccagaaaagaagagttgatgttttttttgtgggcaccagaactagcacctctgaaaagtaaaatgatctatgcaagctccaaggatgcaattaaaaagaaatttcaaggcataaaacatgaatgtcaagcaaatggaccagaagatctcaatcgggcttgtattgctgaaaagttaggtggatccttaattgtagcctttgaaggatgccctgtgtagattattcagtgccacaaattgaaagcttccatgtttaatgttatcctcttgctatataaataaagcaaatatatttaggccagggtctcactgagggggagctgtcttgtcatcttttagagtaaactattctataaacatatgcaaacagccctaaataaatctaaagtctaaagttttattgatgtgaaattaaattcttattggccaaatgcctgttttgatgagttgatttataaagatttttgttaagctcaggattttaaattacacagttcacaaacagtaaaggccatgtgaagagaattattacatctttattaacctcagcatttactttgtttcttttgcttaggaaattgctcataatctggttataattttggtccaaattctttattcttccttgagctaagcagaataatggaatataatatgtcttcataatataacaacactaatacactaatagtaagattaagttaggcagtcttctaccaaatgtgtaatggagattgcctcaaaattgtgtccacataatccacgctcatcttgcaaagcgctatttcaggcacatcattggaatacaggaagtagccctgcacctgccagtgagctcgccattcactgattggaagagtgacctggcatcttggaaatcattgtgtgtcttcaggagaatgtgcagtgtcttgtaacaactaattataatgcaaattagggctacattgtaatctgctttgttaatgaaaatgataaaacagaatattgacaagctaggacacctgtggtatctttaattgtatctccttcagaagtttgcttcttatggtataataaagtatggaagaatattgagta

SEQ ID NO: 322208 - DNA, 447 bp, Artificial Sequence
  derived and/or modified sequence
atgaaagtgcgcaaatgctcaacccccgaggagatcaagaagagaaaaaaagcggttatattctgcctatccgcagacaagaaatgtatcattgtcgaagaggggaaggaaattctagtgggggatgtgggagtgaccatcaccgacccgttcaagcactttgtgggaatgctaccggagaaagactgtcgatacgccctgtacgatgcctcattcgaaacgaaagagagtagaaaggaggaactaatgttcttcttgtgggcaccggaactggcaccattaaagtctaagatgatctacgcctcctctaaggatgcgatcaagaaaaaatttcagggcatcaaacacgaatgtcaggccaatggcccagaagatctcaatagggcctgtattgccgaaaagctcggcggtagcctgatagtggctttcgaaggatgcccagtctag

SEQ ID NO: 322209 - DNA, 447 bp, Artificial Sequence
  derived and/or modified sequence
atgaaggtgaggaagtgcagcaccccagaggagatcaagaagaggaagaaggccgtcatcttctgcctgtctgctgacaagaagtgcatcatcgtggaggagggcaaggagatcctggtgggagatgtgggcgtgaccatcacagaccccttcaagcactttgtgggcatgctgcctgagaaggactgccgctatgccctgtatgatgccagctttgagaccaaggagagcaggaaggaggagctgatgttcttcctgtgggcccctgagctggcccccctgaagagcaagatgatctatgccagcagcaaggatgccatcaagaagaagttccagggcatcaagcatgagtgccaggccaatggacctgaggacctgaacagagcctgcatcgccgagaagctgggcggcagcctcatcgtggcctttgagggctgccctgtgtag

SEQ ID NO: 322210 - DNA, 447 bp, Artificial Sequence
  derived and/or modified sequence
atgaaggtgcggaagtgcagcacccccgaggagatcaagaagcggaagaaggcagtgatcttctgcctgagcgccgataaaaaatgtatcattgtggaggagggaaaggagatcctcgtcggagatgttggggtgactatcactgacccatttaagcactttgtgggcatgctaccagagaaggactgcaggtacgctctatatgatgcaagcttcgagacaaaggaatccaggaaggaggaacttatgttcttcttgtgggctccagagctcgcgccacttaaatccaagatgatttacgccagcagtaaagatgcaattaaaaagaagtttcagggcattaagcacgagtgtcaagcaaatgggcctgaggatctgaaccgcgcttgcattgccgaaaagctgggtgggtctctaatcgtagcgtttgaaggttgtcctgtttag

SEQ ID NO: 322211 - DNA, 447 bp, Artificial Sequence
  derived and/or modified sequence
atgaaggtgaggaaatgctctacccccgaagaaataaagaagcgcaagaaggctgtgattttctgcttgtcagcagacaagaagtgcatcatcgtggaggaagggaaagagatactggtgggggacgtaggtgtgaccattactgaccccttcaagcatttcgttggaatgttacccgaaaaggactgcaggtacgcactctatgatgcctcttttgaaactaaggagagccgaaaagaagagctcatgttcttcctctgggccccagaactggcacccctgaagagtaagatgatctacgccagctccaaagacgcgatcaaaaaaaaatttcagggaatcaaacatgagtgtcaggccaatggtcctgaagatcttaatcgggcatgtatcgccgaaaaactgggcggatcactaatcgtggccttcgagggctgcccagtatag

SEQ ID NO: 322212 - DNA, 447 bp, Artificial Sequence
  derived and/or modified sequence
atgaaggtgagaaagtgcagcacccccgaggagatcaagaagagaaagaaggccgtgatcttctgcctgagcgccgacaagaagtgcatcatcgtggaggagggcaaggagatcctggtgggcgacgtgggcgtgaccatcaccgaccccttcaagcacttcgtgggcatgctgcccgagaaggactgcagatacgccctgtacgacgccagcttcgagaccaaggagagcagaaaggaggagctgatgttcttcctgtgggcccccgagctggcccccctgaagagcaagatgatctacgccagcagcaaggacgccatcaagaagaagttccagggcatcaagcacgagtgccaggccaacggccccgaggacctgaacagagcctgcatcgccgagaagctgggcggcagcctgatcgtggccttcgagggctgccccgtgtag

SEQ ID NO: 322213 - DNA, 3242 bp, Artificial Sequence
  derived and/or modified sequence
gcccctcgcgaggggccgccgggcgcagtcagccgccgccacctccgccgcgctctgtccggacggacgctcgccgcccgcagcctgccgcccgccgcagggcgctgacggtcccgcacgtctgccgctgccaccggcgcgcccgattcatccatgagctcggatttcccacattacaacttcaggatgcctaatattggattccagaatctgcctctcaacatatatattgtggtttttggtactgctatatttgtcttcatccttagtttactcttctgttgctacttgattaggctaagacatcaagcacacaaagaattttatgcctacaaacaggttatattaaaagagaaagtaaaagaattgaatttacatgagctctgtgcagtgtgcctagaagacttcaagcctcgagatgagttggggatttgcccatgtaagcacgccttccacagaaagtgccttattaagtggctggaggttcgtaaagtgtgtcccctgtgcaacatgccagttctacagctggcccagttgcacagtaagcaggaccgtggaccccctcaggggccccttcctggggcagagaacattgtatagcttaccgcaaggatcagactgttgctggacacgacgtctgtgtggagccaggaggaacacatgtggtgtctgtatggctgctctctacctaggacaccagctgccacttcttttgcctcatgaagaactcttgggccagccaaactgggaacctaggtgtctgggtcttgtgacaaccaaagcactttgacactaccccctgccgagagaagaggagtggatgagcctgcgggtttgcctcaagaaacttcatgagggtctcttactaactccattacactctctctcctggagcctcatctccatgtcaagcaggagggtaaagaagggaactaagagcaggtctttcaagccacacccccacctgcggatggatgggtttctctgtaggccatgcaggcctttgtcgcagcaaaccttcccagcagcccttgagccaagtaaaaccagcacaaccagccaccagtggttggtgaggcagtgcccacaaggctcatgttgtatgcctttgataaggccatcttggctttgagtagcagtgttcctcgtcacccatttccccctcaggattacaacacctgctatcaaatcatctaagctgaaaacatgagatgcgcttggaaaggcctagtcagaagccatttcctcttatcatttccctctcctatgcaccagtaaggcccgtccagagccccagcagggagtgggccctgagtccacactgtccctgagtgatccaggaggctgcccacatccccacatgtgcactgtggttccagtgtagctgctgtgagcccactgccactgcctcagaagggagccactgtgaacctctcgagtggctccaaagagcagtggctttttgagaatggcccatacttctggcccggctggatgaagggaatgccgaccctttggcctctccccctccttccatctcttctctctcttgccctatctctctttctacttcagaaaaaaaaaaaaaaaaaaaaaaaagcctgtcattcactttttaacactttatcccaaataagatccctgtgtaattctgaagctggtgatccacttggaattgtagatagtttcaggaagctcctgcagggctgtccaccgttggtgtgtgcctcagtatttggacttccgaaactgaaagtgaaagtgtctttataggagagaaacgcatgctgctctttggctctttctgtccaacttttctagaaatgactcaaagtccattaagatttgtgaatattgtataaattagctatggaaagtagcaggtcagatggaaaattcttttccacagccctgctctccgcctccctccatcttaggagcgcctgcctcaattcctcgtcaactgctttgctccactccatcccacaggtgtgagtgggggaagtttttcattaggaatacagtctgcgtgacatggagaatggatggagggagctttgctactctgctcttggcatgactccaggatttttttctggaatccaacctctgtcctcttaggagaaggaacctgtccttggttcagatggctgggcatgaggaggaaaatttccattagtgtagaacagtgctggacagaatccggtttggaaaattacaaatccagttggtcaaaataggccatttcctatgtgtgacctattcgtggtatgccaactggactgcttcctaaacaggacgaggaaagtgaggaatatttttatatgaaagccttagcctgtctggcacccatgaaaaaaactatttatgcactcctactttcaccgtctttttgcattctctatttgtagcacaacagagttgaatgccacaaaacaccccgtttatagtgagctgttttcagtgaccaatatcagaaggaggcttgcttctggactagcctcactaattgccagcagccaccattttccatggaatggccttgggacagatgtcacctctgttatggggctctaataggaaagagaatgttttttcccttcctatgatcaatactgcaaattattgctgctcacagcttttataggattctcccaactgaaagttgcaggctttttctgtccctgtgcatcagtactaacaaaagacagcctcaccaagtctgtatatttgaacagaggcaagttaattcatccccccgtgtcagagccacaggcatgttgagggggttgatacgtagcactggaccagggcgcaaagcccagatagttccagccatgagaggagagcacaagaatgctctgcactctgcactcagcaccaccttgggtctgctttgcccagatgagggaccactaacaaccttctcagcacatgtgaatgtggactggttttaaaatgcattcattctgctaggattgggctggaagctggaacagtgagagtactttttctgctcctagtcatctccctttctcagcgtgacatcctcctgcagcaagcctagtatcactagcagtagttcctgcgactcttagcaacacaacccgaatatttgctccctgcatctgggtcctccaccaggatgggcctgcgcatctgcattgctgtacagacaaacaggccttttaatttacatcctcctttaattctcattaaaatcgcagggtttttgtttgaaa

SEQ ID NO: 322214 - protein, 469 aa, Artificial Sequence
  derived and/or modified sequence
MAFLMHLLVCVFGMGSWVTINGLWVELPLLVMELPEGWYLPSYLTVVIQLANIGPLLVTLLHHFRPSCLSEVPIIFTLLGVGTVTCIIFAFLWNMTSWVLDGHHSIAFLVLTFFLALVDCTSSVTFLPFMSRLPTYYLTTFFVGEGLSGLLPALVALAQGSGLTTCVNVTEISDSVPSPVPTRETDIAQGVPRALVSALPGMEAPLSHLESRYLPAHFSPLVFFLLLSIMMACCLVAFFVLQRQPRCWEASVEDLLNDQVTLHSIRPREENDLGPAGTVDSSQGQGYLEEKAAPCCPAHLAFIYTLVAFVNALTNGMLPSVQTYSCLSYGPVAYHLAATLSIVANPLASLVSMFLPNRSLLFLGVLSVLGTCFGGYNMAMAVMSPCPLLQGHWGGEVLIVASWVLFSGCLSYVKVMLGVVLRDLSRSALLWCGAAVQLGSLLGALLMFPLVNVLRLFSSADFCNLHCPA

SEQ ID NO: 322215 - protein, 415 aa, Artificial Sequence
  derived and/or modified sequence
MAFLMHLLVCVFGMGSWVTINGLWVELPLLVMELPEGWYLPSYLTVVIQLANIGPLLVTLLHHFRPSCLSEVPIIFTLLGVGTVTCIIFAFLWNMTSWVLDGHHSIAFLVLTFFLALVDCTSSVTFLPFMSRLPTYYLTTFFVGEGLSGLLPALVALAQGSGLTTCVNVTEISDSVPSPVPTRETDIAQGVPRALVSALPGMEAPLSHLESRYLPAHFSPLVFFLLLSIMMACCLVAFFVLQRQPRCWEASVEDLLNDQVTLHSIRPREENDLGPAGTVDSSQGQGYLEEKAAPCCPAHLAFIYTLVAFVNALTNGMLPSVQTYSCLSYGPVAYHLAATLSIVANPLASLVSMFLPNRSLLFLGVLSVLGTCFGGYNMAMAVMSPCPLLQGHWGGEVLIVSIRPVGLLPLRTPHP

SEQ ID NO: 322216 - DNA, 279 bp, Artificial Sequence
  derived and/or modified sequence
atgacgaagccacaggccgaatctggtgaggccgctcggcaccctatctttcgcccagcgcgaagggtttttggaatcaaaatgaccaccctgcaaccaagaattaaggctccccaggagctgaccgtactgcaggagagatcaagacctacctcaaagaaaatggccgtttgtttccacggcagtagccttaggtctgaagcgacgcctagatacagcctggaggaagaggcaagaaatgggagatggcaacaggcattaagttggtggccactctag

SEQ ID NO: 322217 - DNA, 1248 bp, Artificial Sequence
  derived and/or modified sequence
atggcttttttgatgcacctactggtgtgtgtctttggcatgggcagctgggtaacaatcaatggcctctgggttgaacttcccttgctggtaatggaactccccgagggttggtatctaccttcctatctgactgttgtgatacagctggccaacattgggcctttactggtgactttgttgcatcatttccggccatcctgcttatccgaagtccccatcattttcacattacttggagtaggcactgtgacatgcattattttcgcattcctatggaatatgactagctgggtactggatggccatcacagtatagccttcctcgtcctgaccttttttctcgcactggtggactgtaccagctctgtgacattcctgccctttatgtcacgactgcctacctactatctgacaactttcttcgtgggcgaaggactttcaggtctgctccctgcattggttgccctggcgcaaggttccggactgaccacatgcgttaacgtgactgagatttctgacagcgtcccttcaccagtacctactcgcgaaaccgatatcgcccagggggttccacgggccttggttagcgccttgcctggtatggaggcacctctgtcgcatctagagtctagatacttgcccgcccatttcagcccacttgtatttttcttgctattgagtataatgatggcatgttgtctagttgcctttttcgtgctccagcgtcaaccgagatgttgggaggcctcagtggaggacctgctcaatgaccaggtaactctgcattcaatacggcccagagaggaaaatgatttaggtcccgctggcaccgtggactctagccagggccagggatacctcgaggagaaggctgccccttgctgcccagcccaccttgctttcatttacaccctggtcgcctttgtgaacgctctgactaacggcatgctgcctagcgtgcaaacttatagttgtctcagctatggccctgtagcctaccatttggctgccaccctgtctattgtggcgaatccactggcgagccttgtctcaatgtttctgccaaatcgaagcctgctcttcctgggggtgttaagtgtgctggggacgtgtttcggtgggtataatatggcaatggccgtcatgtcaccttgtcctctgttacaagggcactggggcggagaggtgctgattgtgtccatacgacccgtgggtctcctgccactccggacgcctcacccctag

SEQ ID NO: 322218 - DNA, 1410 bp, Artificial Sequence
  derived and/or modified sequence
atggcctttcttatgcatctgctggtgtgtgtcttcgggatgggctcttgggtcacaattaacggcttgtgggtcgagctccccctgctggtaatggaactgcccgagggttggtatctcccctcatatctgaccgtggtgatccagttagcgaacatcgggccattattggtcacgctgctgcatcactttcgtccgtcctgtttgtccgaggttccaatcatttttacactgctcggagtgggcacagtcacatgtattattttcgcgttcctgtggaatatgacatcttgggtactggacggtcaccattccattgcctttttagtcttgaccttcttcctagccttagtggattgcacgagcagtgttaccttcctcccctttatgagccgtcttcctacttattacctcacgacattctttgtcggagaaggcctttccggcttgctgcctgctctcgtagctctggcgcagggttccggcctcaccacttgtgtgaatgtcaccgaaataagcgactccgtgccttcgcccgttcctacaagagagacggatattgctcagggtgtccccagagccctcgtttctgctctgcctggaatggaggcaccgctatcacatttagaatccagatatttgcctgcacactttagtccacttgtgttttttttactgttgagcataatgatggcctgttgcctggtcgcgttcttcgtgctgcagaggcagccccggtgttgggaggcctcagtggaagatctgctcaacgatcaggttacgttacactccatacgaccacgtgaggaaaatgatttaggacccgctggcactgtggatagtagtcaagggcaggggtacctcgaagaaaaggccgccccttgctgtcctgctcacctggcattcatttataccctggtggcctttgtcaatgccctcacaaacggtatgctgccaagcgttcagacctactcttgcctgagttacggccccgtggcttatcatctggccgccacactgtccatcgtcgctaatcctttggcttctctcgtcagtatgtttctccccaaccggtccttactgttcctgggggtactgagcgtcttaggcacctgtttcgggggctataacatggccatggcagtaatgtcaccttgtccactcctccagggccactggggcggcgaagtcctcatcgtggcatcttgggtgctgttttccgggtgtctgtcctacgtgaaagtcatgctgggggtggtcctccgcgacctgtctcgctcagccctgctatggtgtggggcagccgtgcagctgggctcgctgctgggggccctgctcatgtttccactcgtgaacgtgctgagactcttcagtagcgccgacttttgtaaccttcactgccccgcctag

SEQ ID NO: 322219 - DNA, 1248 bp, Artificial Sequence
  derived and/or modified sequence
atggccttcctgatgcacctgctggtgtgtgtgtttggcatgggctcctgggtgaccatcaatggcctgtgggtggagctgcccctgctggtgatggagctgcctgagggctggtacctgcccagctacctgactgtggtgatccagctggccaacatcggccccctgctggtgaccctgctgcaccacttccggcccagctgcctgtctgaggtgcccatcatcttcaccctgctgggcgtgggcaccgtgacctgcatcatctttgccttcctgtggaacatgacctcctgggtgctggatggccaccacagcatcgccttcctggtgctgaccttcttcctggccctggtggactgcaccagctctgtgaccttcctgcccttcatgagccggctgcccacctactacctgaccaccttctttgtgggggagggcctgagcggcctgctgcctgccctggtggccctggcccagggcagcggcctgaccacctgtgtgaatgtgacagagatcagtgacagcgtgcccagccctgtgcccacccgggagacagacatcgcccagggcgtgccccgggccctggtgtctgccctgcccggcatggaggcccccctgagccacctggagagccgctacctgcctgcccacttcagccccctggtgttcttcctgctgctgagcatcatgatggcctgctgcctggtggccttctttgtgctgcagaggcagccccgctgctgggaggcctctgtggaggacctgctgaatgaccaggtgaccctgcacagcatccggccccgggaggagaatgacctgggccctgctggcaccgtggacagcagccagggccagggctacctggaggagaaggccgccccctgctgcccagcccacctggccttcatctacaccctggtggcctttgtgaatgccctgaccaacggcatgctgcccagcgtgcagacctacagctgcctgtcctatggccctgtggcctaccacctggccgccaccctgagcatcgtggccaaccccctggccagcctggtgtccatgttcctgcccaacagaagcctgctcttcctgggcgtgctgtctgtgctgggcacctgctttggaggctacaacatggccatggctgtgatgagcccctgccccctgctgcagggccactggggcggggaggtgctgattgtgtccatccggcctgtgggcctgctgcccctgcggaccccccacccctag

SEQ ID NO: 322220 - DNA, 1410 bp, Artificial Sequence
  derived and/or modified sequence
atggccttcctgatgcacctgctggtgtgtgtgtttggcatgggctcctgggtgaccatcaatggcctgtgggtggagctgcccctgctggtgatggagctgcctgagggctggtacctgcccagctacctgactgtggtgatccagctggccaacatcggccccctgctggtgaccctgctgcaccacttccggcccagctgcctgtctgaggtgcccatcatcttcaccctgctgggcgtgggcaccgtgacctgcatcatctttgccttcctgtggaacatgacctcctgggtgctggatggccaccacagcatcgccttcctggtgctgaccttcttcctggccctggtggactgcaccagctctgtgaccttcctgcccttcatgagccggctgcccacctactacctgaccaccttctttgtgggggagggcctgagcggcctgctgcctgccctggtggccctggcccagggcagcggcctgaccacctgtgtgaatgtgacagagatcagtgacagcgtgcccagccctgtgcccacccgggagacagacatcgcccagggcgtgccccgggccctggtgtctgccctgcccggcatggaggcccccctgagccacctggagagccgctacctgcctgcccacttcagccccctggtgttcttcctgctgctgagcatcatgatggcctgctgcctggtggccttctttgtgctgcagaggcagccccgctgctgggaggcctctgtggaggacctgctgaatgaccaggtgaccctgcacagcatccggccccgggaggagaatgacctgggccctgctggcaccgtggacagcagccagggccagggctacctggaggagaaggccgccccctgctgcccagcccacctggccttcatctacaccctggtggcctttgtgaatgccctgaccaacggcatgctgcccagcgtgcagacctacagctgcctgtcctatggccctgtggcctaccacctggccgccaccctgagcatcgtggccaaccccctggccagcctggtgtccatgttcctgcccaacagaagcctgctcttcctgggcgtgctgtctgtgctgggcacctgctttggaggctacaacatggccatggctgtgatgagcccctgccccctgctgcagggccactggggcggggaggtgctgattgtggcctcctgggtgctcttcagcggctgcctgtcctatgtgaaggtgatgctgggcgtggtgctgcgggacctgagccgcagcgccctgctgtggtgtggggctgctgtgcagctgggcagcctgctgggcgccctgctgatgttccccctggtgaatgtgctgcggctcttcagcagcgctgacttctgcaacctgcactgcccagcctag

SEQ ID NO: 322221 - DNA, 1248 bp, Artificial Sequence
  derived and/or modified sequence
atggccttcctgatgcacctgctggtgtgcgtgttcggcatgggcagttgggtcactatcaatggtctgtgggtggagctacctttactagtgatggaactgccagaggggtggtatctgccctcctacttaacagtagtgatccagctggcgaacatcggacccctcctggtgaccctcctccaccatttccgtcctagctgtctcagcgaagtgcccatcatctttaccctgctgggtgttgggaccgtcacttgcatcatattcgccttcctatggaacatgaccagctgggtcctagacggccaccacagcattgcgttcctcgtgttgacattctttctcgccctagtggattgcaccagctctgttacttttctcccttttatgtcacggctgcccacgtattacttgaccacattctttgtgggcgaagggctgtctgggcttctgccggccctggtggcacttgcacagggatcaggactgactacctgcgttaatgtgactgaaataagtgatagtgtcccgtccccagtccccacgcgtgaaactgatatcgcccaaggcgtgcccagagctcttgtgagcgctctgcctggcatggaggctccgctgtctcacttggagtccagatacctgcccgcacacttcagtcccctagtgttttttcttttgctctctataatgatggcttgctgcttggtggctttctttgtcctccagagacagccaagatgctgggaggccagtgtagaggacctgctcaacgaccaagtgactctgcattcaattcgtccacgagaagagaatgatctcgggcccgctggaactgtcgactccagtcaaggacagggctatcttgaagaaaaagctgccccttgctgccctgcacatcttgcatttatttataccctggtcgccttcgtcaacgcgttgaccaatgggatgcttccaagcgtgcagacttacagctgtctgagctatggtccagtagcatatcacctcgctgccactttatcaattgtcgctaatcctctggcgagcctggtgagcatgtttctccccaaccgctcactgctgtttctcggcgtactgagcgtgctcggcacctgctttggtggttacaatatggcaatggccgttatgagcccttgtcctctcctccagggtcattggggaggcgaagtgttgatcgtatctatcagaccggtggggctgcttccacttcgaacgccacacccctag

SEQ ID NO: 322222 - DNA, 1410 bp, Artificial Sequence
  derived and/or modified sequence
atggccttcctgatgcacctgctggtgtgcgtgttcggcatgggctcgtgggtcacgattaatggcctgtgggtcgagctgcccctcttggtgatggagctccccgaaggctggtacttgcccagttacctgacggtcgtaattcagctagccaacatagggccacttctagtaactctgctgcatcatttccggcctagttgcctgagtgaggtgcccatcatttttactctgctgggggttggtactgtgacttgtatcatcttcgctttcctgtggaatatgaccagttgggtcctggatgggcatcactctatcgccttcctggtcctgacatttttcctggccttggtggattgtacctctagcgttacgttcctccctttcatgtctcgactccctacctactacctgacaacatttttcgtgggggagggccttagtggcctgctgccagctcttgtggccttagcccaaggtagcgggttaacaacatgcgttaatgtaaccgaaatttctgacagcgtgcccagcccagtgcccactcgagaaacagatatcgcccagggagtacctagggccctagtgagtgcactcccaggcatggaagctcccctcagtcacttggagagccgctatttgccagcccacttctcacccttggtgttctttctgcttctctccattatgatggcgtgctgcctggtggccttttttgtgttacagcggcagccaaggtgttgggaggcctctgttgaagatctgcttaacgaccaggtgactttgcatagtattcgacccagagaggagaatgacctgggccctgcaggcacggtagacagcagccagggccagggatatctggaggagaaggccgcaccctgctgtccagctcatcttgcctttatctataccctagtggccttcgtcaacgccctgacaaacggaatgctgccaagtgtgcaaacctattcctgcctgtcatacggtccagtggcttaccacctcgccgccacactgtctatcgtcgctaatcctctggcttccctcgtgtcaatgttcctgccgaacaggtccctgctgttcctcggagttcttagtgtcctggggacctgcttcggtggctataatatggccatggccgtcatgtccccctgccccctcctgcagggccactggggcggggaggtgttgattgtggcttcgtgggtgctgttctctggctgtctgtcttacgtgaaggtcatgctcggcgtcgttcttcgggacctgtctaggtctgccctcctctggtgtggtgccgctgtgcagttgggtagcctgttgggtgctttgttaatgtttccactcgttaatgtgctgcgcttgttttcatctgctgatttttgtaatttacactgtcccgcatag

SEQ ID NO: 322223 - DNA, 1248 bp, Artificial Sequence
  derived and/or modified sequence
atggcatttctgatgcaccttctggtgtgtgtgtttgggatgggatcttgggtgaccatcaacgggctgtgggtcgaactacccttacttgtgatggaattaccggagggatggtacctgccttcttacctgaccgtagtaatacaacttgctaacatagggcctctcctcgttacacttttgcaccacttcaggccctcctgtctgagcgaagtgcctattatttttaccctactgggcgtcggcacggtgacatgtataatcttcgcgtttctttggaacatgacttcctgggtgttagacgggcatcacagtatagccttcctggtcctgacgttctttttggcgttggtggattgcacctccagcgtgactttcctcccatttatgtcccggctgcccacatactaccttaccacctttttcgttggagaggggttgtctggtcttctgcccgctctggtggcccttgcacaggggtccggccttactacatgtgtgaacgtgaccgagatttcagactccgtgccgtctcctgtcccaactcgtgagaccgatatagctcaaggtgtgccccgagccttggtctctgcacttcctggcatggaagcaccactgtcccatctagaaagccggtacctgccggcacacttttcccctcttgtgttttttctgttattgagcatcatgatggcctgctgcctggtggctttctttgtactgcagcggcagcccagatgctgggaggcatccgtggaggacctccttaacgaccaagttaccctgcatagcatcagacccagggaggagaacgacttgggccctgcagggactgtggacagtagtcagggccaggggtacttagaggagaaggcggcaccctgttgtccggcacacctggcgtttatatacaccctggtcgcattcgtgaacgccctgaccaatggtatgctgcctagtgtccagacatactcctgtctctcttatggaccagtggcctaccatctggccgcaacactgtcaatcgtagccaaccccctggccagtttagtgtctatgtttctcccgaatcggagcctgctctttttgggcgtgctttctgtgctcggaacatgtttcggtggctacaacatggcaatggccgtgatgagcccctgtcctcttctgcagggccattggggcggtgaggtgctgatcgtctccattcgacctgttggtctcttgccgctgaggactccccacccatag

SEQ ID NO: 322224 - DNA, 1410 bp, Artificial Sequence
  derived and/or modified sequence
atggccttcctcatgcacttgttggtgtgcgtcttcgggatgggaagctgggtgacaatcaacggtctgtgggtcgaacttccactcttggtaatggagctccccgaaggatggtatttacctagttacctcaccgtagtgattcaactggccaacataggaccccttctggtcaccctgctgcatcactttaggcccagttgtctcagcgaggttccgatcatcttcacactcttaggggtggggacagtaacgtgtataatattcgctttcctgtggaatatgacatcatgggtactggacggacatcacagtatagcattcctagtcctcactttctttctggctctagtcgattgtacttctagcgttacgtttcttccattcatgtccaggctaccgacctattatctcacaactttcttcgtgggggaagggctgtcaggactgctgccagccctcgtagcactggcccagggatccgggctcaccacctgtgtgaacgtgactgagatttcagacagcgtgcctagtcctgtcccaactagggagaccgatattgcacagggagttcctcgcgctctcgtttcagccttgccaggaatggaggccccactgagccacctcgagtcgcgctatttgcccgctcatttctcacccctggtgttcttcctactcctcagtatcatgatggcctgctgtctggttgcctttttcgtactgcagcgccagccccgatgctgggaggcctcagtcgaagatttgttgaatgatcaagtgactctgcattcaatccgaccccgagaagaaaatgaccttggcccagcaggcaccgtggattccagccagggccagggctatcttgaagagaaggccgcaccttgttgccctgctcacctcgcgttcatatacacactcgtcgctttcgtgaacgctcttacaaatggcatgttgccctctgtgcagacttacagttgtctctcatacggcccagtggcctatcatctggctgccaccctatcaatcgttgccaaccccctcgcctccttagtttccatgtttctcccgaatcgaagcctgcttttcctgggcgtgctgtccgtgctcggtacttgctttgggggatataacatggccatggccgtgatgtcaccctgtcccctgctgcagggacactggggcggtgaggtactcattgtggcgtcttgggttcttttttctggctgtctgtcatatgttaaggtgatgctgggggtcgttctcagggacctctccagatcagctctcttatggtgcggagcagcggtccaactgggcagtctgctgggagctctcctgatgtttcccctggtgaatgtcctgcgtctgttcagctccgcagatttttgtaatctgcattgtccagcctag

SEQ ID NO: 322225 - DNA, 2598 bp, Artificial Sequence
  derived and/or modified sequence
actagaaggaagaagtatggagttaaagactgcagcgtgaactgaggagtcccggacaggccgcttgctgcagaggatccagtccagatcccaggagagcccctctgccccttcggacctcgtctcccatctacaaaacgtgaagattggcccagttagcgtgtctctacaaaaaggtgcatataccactgccccgctgcaggctgatctgagaaagcctctggcccagggcagataccgccatggccttcctgatgcacctgctggtctgcgtcttcggaatgggctcctgggtgaccatcaatgggctctgggtagagctgcccctgctggtgatggagctgcccgagggctggtacctgccctcctacctcacggtggtcatccagctggccaacatcgggcccctcctggtcaccctgctccatcacttccggcccagctgcctttccgaagtgcccatcatcttcaccctgctgggcgtgggaaccgtcacctgcatcatctttgccttcctctggaatatgacctcctgggtgctggacggccaccacagcatcgccttcttggtcctcaccttcttcctggccctggtggactgcacctcttcagtgaccttcctgccgttcatgagccggctgcccacctactacctcaccaccttctttgtgggtgaaggactcagcggcctcttgcccgccctggtggctcttgcccagggctccggtctcactacctgcgtcaatgtcactgagatatcagacagcgtaccaagccctgtacccacgagggagactgacatcgcacagggagttcccagagctttggtgtccgccctccccggaatggaagcacccttgtcccacctggagagccgctaccttcccgcccacttctcacccctggtcttcttcctcctcctatccatcatgatggcctgctgcctcgtggcgttctttgtcctccagcgtcaacccaggtgctgggaggcttccgtggaagacctcctcaatgaccaggtcaccctccactccatccggccgcgggaagagaatgacttgggccctgcaggcacggtggacagcagccagggccaggggtatctagaggagaaagcagccccctgctgcccggcgcacctggccttcatctataccctggtggccttcgtcaacgcgctcaccaacggcatgctgccctctgtgcagacctactcctgcctgtcctatgggccagttgcctaccacctggctgccaccctcagcattgtggccaaccctcttgcctcgttggtctccatgttcctgcctaacaggtctctgctgttcctgggggtcctctccgtgcttgggacctgctttgggggctacaacatggccatggcggtgatgagcccctgccccctcttgcagggccactggggtggggaagtcctcattgtggcctcgtgggtgcttttcagcggctgcctcagttacgtcaaggtgatgctgggcgtggtcctgcgcgacctcagccgcagcgccctcttgtggtgcggggcggcggtgcagctgggctcgctgctcggagcgctgctcatgttccctctggtcaacgtgctgcggctcttctcgtccgcggacttctgcaatctgcactgtccagcctaggcaggccgccgaccccgcccccatcgctcacggacggaactggggtccagagaggccaggtcacagagcaaggggcaggaacagagagacagagcctgagtaattgaatcatgaacgcaagtgcccactggggactgtggggaagatggcacctggaaatgcaaggtgcggctctatccccaactctgtgtcacactacctgtgacgaccagctcagatctcctttgctttgactctcaagagaggactgatttgcagcatctagctggaggcaggcccaagggtgttagaagggaaacagctgggacagccggctgtcccttcaggctgtgtgaccttgggaaagtcatttggcttctctgtgcctgtttcttcatgcatgcagtggggattccagtaagtaccaactacctcacaggcatggcacggaggcaaaaggaaaaagcagcccgcatcaagcaagccctcctgggccacctgctgatctgacagtccatcgtagtaacaagagtggcagtctgcacaacctagaagtggccagaagggttgagacacgcccctgccctctctcctttgcccctcagtctcacagaggggcttctacaagacaagcagataacgatagaatcttgggcatcttggctttcggattctcagtgtggagggacgtagtaccccacacaccccttcctgtcatccttcctggcccataaagcccactagttggagagtaagtaccctcctggaagccgggagagatgatttgctggtggggctggggaaggcccatccctgagcctctgaaagtgaactccccgaccaggttggggaccagacatgcagagcccctggaagtattctctcaaatggaggcaacagaggtgattgttattttgttttagtttctgtttttcatttttttaaataaaggcattccctgctttta

SEQ ID NO: 322226 - DNA, 3060 bp, Artificial Sequence
  derived and/or modified sequence
actagaaggaagaagtatggagttaaagactgcagcgtgaactgaggagtcccggacaggccgcttgctgcagaggatccagtccagatcccaggagagcccctctgccccttcggacctcgtctcccatctacaaaacgtgaagattggcccagttagcgtgtctctacaaaaaggtgcatataccactgccccgctgcaggctgatctgagaaagcctctggcccagggcagataccgccatggccttcctgatgcacctgctggtctgcgtcttcggaatgggctcctgggtgaccatcaatgggctctgggtagagctgcccctgctggtgatggagctgcccgagggctggtacctgccctcctacctcacggtggtcatccagctggccaacatcgggcccctcctggtcaccctgctccatcacttccggcccagctgcctttccgaagtgcccatcatcttcaccctgctgggcgtgggaaccgtcacctgcatcatctttgccttcctctggaatatgacctcctgggtgctggacggccaccacagcatcgccttcttggtcctcaccttcttcctggccctggtggactgcacctcttcagtgaccttcctgccgttcatgagccggctgcccacctactacctcaccaccttctttgtgggtgaaggactcagcggcctcttgcccgccctggtggctcttgcccagggctccggtctcactacctgcgtcaatgtcactgagatatcagacagcgtaccaagccctgtacccacgagggagactgacatcgcacagggagttcccagagctttggtgtccgccctccccggaatggaagcacccttgtcccacctggagagccgctaccttcccgcccacttctcacccctggtcttcttcctcctcctatccatcatgatggcctgctgcctcgtggcgttctttgtcctccagcgtcaacccaggtgctgggaggcttccgtggaagacctcctcaatgaccaggtcaccctccactccatccggccgcgggaagagaatgacttgggccctgcaggcacggtggacagcagccagggccaggggtatctagaggagaaagcagccccctgctgcccggcgcacctggccttcatctataccctggtggccttcgtcaacgcgctcaccaacggcatgctgccctctgtgcagacctactcctgcctgtcctatgggccagttgcctaccacctggctgccaccctcagcattgtggccaaccctcttgcctcgttggtctccatgttcctgcctaacaggtctctgctgttcctgggggtcctctccgtgcttgggacctgctttgggggctacaacatggccatggcggtgatgagcccctgccccctcttgcagggccactggggtggggaagtcctcattgtgagtatccggccggtggggctgctcccgctgcgtacccctcacccctagccaaggcctgggagagcttgggcgcggccctttccagcgagcggggtctgtgggaccctcccgggaagccccaggtgggggaagcgccccttcctcatttgggagtggaggcttagggaatcgaggtgactggtaggcctcttcccaccatgtgtacctcagcaggggccttctctcaagggcccttgccctgatcatgggcacgtgaacccagaaaagccactggattctccttcgcccccgggcggccaactcatgggacccgtcggccccgcaggctcactcccagaaggcgctcctcgcacctagagagtattccgtgggttcccctgagccctgtgagagttctttgctccggcgctcgccccgcaagccccgtgactctgcacctcttccctcccggccccgcaggtggcctcgtgggtgcttttcagcggctgcctcagttacgtcaaggtgatgctgggcgtggtcctgcgcgacctcagccgcagcgccctcttgtggtgcggggcggcggtgcagctgggctcgctgctcggagcgctgctcatgttccctctggtcaacgtgctgcggctcttctcgtccgcggacttctgcaatctgcactgtccagcctaggcaggccgccgaccccgcccccatcgctcacggacggaactggggtccagagaggccaggtcacagagcaaggggcaggaacagagagacagagcctgagtaattgaatcatgaacgcaagtgcccactggggactgtggggaagatggcacctggaaatgcaaggtgcggctctatccccaactctgtgtcacactacctgtgacgaccagctcagatctcctttgctttgactctcaagagaggactgatttgcagcatctagctggaggcaggcccaagggtgttagaagggaaacagctgggacagccggctgtcccttcaggctgtgtgaccttgggaaagtcatttggcttctctgtgcctgtttcttcatgcatgcagtggggattccagtaagtaccaactacctcacaggcatggcacggaggcaaaaggaaaaagcagcccgcatcaagcaagccctcctgggccacctgctgatctgacagtccatcgtagtaacaagagtggcagtctgcacaacctagaagtggccagaagggttgagacacgcccctgccctctctcctttgcccctcagtctcacagaggggcttctacaagacaagcagataacgatagaatcttgggcatcttggctttcggattctcagtgtggagggacgtagtaccccacacaccccttcctgtcatccttcctggcccataaagcccactagttggagagtaagtaccctcctggaagccgggagagatgatttgctggtggggctggggaaggcccatccctgagcctctgaaagtgaactccccgaccaggttggggaccagacatgcagagcccctggaagtattctctcaaatggaggcaacagaggtgattgttattttgttttagtttctgtttttcatttttttaaataaaggcattccctgctttta

SEQ ID NO: 322227 - DNA, 1248 bp, Artificial Sequence
  derived and/or modified sequence
atggccttcctgatgcacctgctggtgtgcgtgttcggcatgggcagctgggtgaccatcaacggcctgtgggtggagctgcccctgctggtgatggagctgcccgagggctggtacctgcccagctacctgaccgtggtgatccagctggccaacatcggccccctgctggtgaccctgctgcaccacttcagacccagctgcctgagcgaggtgcccatcatcttcaccctgctgggcgtgggcaccgtgacctgcatcatcttcgccttcctgtggaacatgaccagctgggtgctggacggccaccacagcatcgccttcctggtgctgaccttcttcctggccctggtggactgcaccagcagcgtgaccttcctgcccttcatgagcagactgcccacctactacctgaccaccttcttcgtgggcgagggcctgagcggcctgctgcccgccctggtggccctggcccagggcagcggcctgaccacctgcgtgaacgtgaccgagatcagcgacagcgtgcccagccccgtgcccaccagagagaccgacatcgcccagggcgtgcccagagccctggtgagcgccctgcccggcatggaggcccccctgagccacctggagagcagatacctgcccgcccacttcagccccctggtgttcttcctgctgctgagcatcatgatggcctgctgcctggtggccttcttcgtgctgcagagacagcccagatgctgggaggccagcgtggaggacctgctgaacgaccaggtgaccctgcacagcatcagacccagagaggagaacgacctgggccccgccggcaccgtggacagcagccagggccagggctacctggaggagaaggccgccccctgctgccccgcccacctggccttcatctacaccctggtggccttcgtgaacgccctgaccaacggcatgctgcccagcgtgcagacctacagctgcctgagctacggccccgtggcctaccacctggccgccaccctgagcatcgtggccaaccccctggccagcctggtgagcatgttcctgcccaacagaagcctgctgttcctgggcgtgctgagcgtgctgggcacctgcttcggcggctacaacatggccatggccgtgatgagcccctgccccctgctgcagggccactggggcggcgaggtgctgatcgtgagcatcagacccgtgggcctgctgcccctgagaaccccccacccctag

SEQ ID NO: 322228 - DNA, 1410 bp, Artificial Sequence
  derived and/or modified sequence
atggccttcctgatgcacctgctggtgtgcgtgttcggcatgggcagctgggtgaccatcaacggcctgtgggtggagctgcccctgctggtgatggagctgcccgagggctggtacctgcccagctacctgaccgtggtgatccagctggccaacatcggccccctgctggtgaccctgctgcaccacttcagacccagctgcctgagcgaggtgcccatcatcttcaccctgctgggcgtgggcaccgtgacctgcatcatcttcgccttcctgtggaacatgaccagctgggtgctggacggccaccacagcatcgccttcctggtgctgaccttcttcctggccctggtggactgcaccagcagcgtgaccttcctgcccttcatgagcagactgcccacctactacctgaccaccttcttcgtgggcgagggcctgagcggcctgctgcccgccctggtggccctggcccagggcagcggcctgaccacctgcgtgaacgtgaccgagatcagcgacagcgtgcccagccccgtgcccaccagagagaccgacatcgcccagggcgtgcccagagccctggtgagcgccctgcccggcatggaggcccccctgagccacctggagagcagatacctgcccgcccacttcagccccctggtgttcttcctgctgctgagcatcatgatggcctgctgcctggtggccttcttcgtgctgcagagacagcccagatgctgggaggccagcgtggaggacctgctgaacgaccaggtgaccctgcacagcatcagacccagagaggagaacgacctgggccccgccggcaccgtggacagcagccagggccagggctacctggaggagaaggccgccccctgctgccccgcccacctggccttcatctacaccctggtggccttcgtgaacgccctgaccaacggcatgctgcccagcgtgcagacctacagctgcctgagctacggccccgtggcctaccacctggccgccaccctgagcatcgtggccaaccccctggccagcctggtgagcatgttcctgcccaacagaagcctgctgttcctgggcgtgctgagcgtgctgggcacctgcttcggcggctacaacatggccatggccgtgatgagcccctgccccctgctgcagggccactggggcggcgaggtgctgatcgtggccagctgggtgctgttcagcggctgcctgagctacgtgaaggtgatgctgggcgtggtgctgagagacctgagcagaagcgccctgctgtggtgcggcgccgccgtgcagctgggcagcctgctgggcgccctgctgatgttccccctggtgaacgtgctgagactgttcagcagcgccgacttctgcaacctgcactgccccgcctag

SEQ ID NO: 322229 - DNA, 3151 bp, Artificial Sequence
  derived and/or modified sequence
gaggaggcgggaggcctcagggccgggcgcacgtcgagggctgcggccgccgcagcgggcacggccaacgagctgcgggcccgggatcgcggcggctggacggggctggagctgtcgggagggcggagctacagggcctgcaaggatgttggctgtcccggagatgggcctgcaggggctgtacatcggctccagcccggagcggtccccagtgcctagcccacccggctccccgaggacccaggaaagctgcggcattgcccccctcacaccctcgcagtctccaaaacccgaggtccgagccccccagcaggcctccttctctgtggtggtggccattgacttcggcaccacgtctagtggctatgctttcagctttgccagtgaccctgaggccatccacatgatgaggaaatgggagggcggagacccgggcgtggcccaccagaagaccccgacctgcctgctgctgactccggagggcgccttccacagctttggctacaccgcccgcgattactaccatgacctggaccccgaagaggcgcgggactggctctacttcgagaagttcaagatgaagatccacagcgccacggatctcaccttgaagacccagctagaggcagtaaatggaaagacgatgcccgccctggaggtgttcgcccatgccctgcgcttcttcagggagcacgcccttcaggagctgagggagcagagcccatcgctgccagagaaggacactgtgcgctgggtgttgacggtgcctgccatctggaaacagccagccaagcagttcatgcgggaggctgcctacctggctggactagtgtcccgagagaatgcagagcagctactcatcgccctggagcccgaggccgcctcggtatactgccgcaagctgcgcctgcaccagctcctggacctgagtggccgggccccaggtggtgggcgcctgggtgagcgccgctccatcgactccagcttccgtcaggctcgggagcagctgcgaaggtcccgccacagccgcacgttcctggtggagtcaggcgtaggagagctgtgggcagagatgcaagcaggagaccgctacgtggtggccgactgcggcggaggcaccgtggacctgacggtgcaccagctggagcagccccatggcaccctcaaggagctctacaaggcatctgggggcccttatggcgcggtgggcgtggacctggccttcgagcagctgctgtgccgcatcttcggcgaggacttcatcgccaccttcaaaaggcaacggccggcagcctgggtagatctgaccatcgccttcgaggctcgcaagcgcactgctggcccacaccgtgcaggggcgctcaacatctcgctgcccttctccttcattgacttctaccgcaagcagcggggccacaacgtggagaccgctctgcgcaggagcagcgtgaacttcgtgaagtggtcctcacaggggatgctccgaatgtcttgtgaagccatgaacgagctctttcagcccaccgtcagcgggatcatccagcacatagaggccctgctggcacggccggaggtgcagggtgtgaagctgctgttcctagtgggcggcttcgccgagtcagcggtgctgcagcacgcggtgcaggcggcgctgggcgcccgcggtctgcgtgtcgtggtcccgcacgacgtgggcctcaccatcctcaaaggcgcggtgctgttcggccaggcgccgggcgtggtgcgggtccgccgctcgccgctcacctatggcgtgggcgtgctcaaccgctttgtgcctgggcgccacccgcccgaaaagctgctggttcgcgacggccgccgctggtgcaccgacgtcttcgagcgcttcgtggccgccgagcagtcggtggccctgggcgaggaggtgcggcgcagctactgcccggcgcgtcccggccagcggcgcgtactcatcaacctgtactgctgcgcggcagaggatgcgcgcttcatcaccgaccccggcgtgcgcaaatgcggcgcgctcagcctcgagcttgagcccgccgactgcggccaggacaccgccggcgcgcctcccggccgccgcgagatccgcgccgccatgcagtttggcgacaccgaaattaaggtcaccgccgtcgacgtcagcaccaatcgctccgtgcgcgcgtccatcgactttctttccaactgagggcgcgccggcgcggtgccagcgccgtctgcccggccccgccctctttcggttcaggggcctgcggagcgggttggggcgggggaaacgatagttctgcagtctgcgcctttccacgccctccagccccgggggagataaggtcatgggagagtgggtggggacacacccagagactggctttgggattgggcactggtccgctgactgccaggctgaagggacccgccaaggactgaacgggtaagagaagaggtttgcaagacagagcgcgcagcccggcaaggggcatgtgaccccgaaggaagaacgcaacagaagagtcctggtctgaacttggccgagtaggggtgggggtgggatggcaggaggagccgcaggaggaaggaggttgtgcagggtctggacctgcagggctgaagttcactcatcgaccgactcagccccaaccgggagccaggcagaaaaaccctgtgccgtaggaaagtgactggaagtggactccagagggacaggtgtggtggcacagtcctggtgtggtgctgaccacccaaatatgactgtgaattgtggaaagggcagtagatctctaatgtggaggtgggaacattattgtggtggaggcaattatgagggtagcatttctttcgagacaaaacacccgtctgggaaggccccaaggtcagcttatgaaggaccccacttgcaccccaccccagccatggaagagcagctggagggtggatggggaggccagagggagcaatgaggggtggtcccagctctgctattgactcggtatgcctttaggacattctcttaccgctcatgggcctcagtttcctaaagtgtgaaatgtcaggcacttccctctaactggcatgcaacagccccacctgcctgagagccctgaggtgacaataaaacatttatgctcaaggggaa

SEQ ID NO: 322230 - protein, 508 aa, Artificial Sequence
  derived and/or modified sequence
MEPAGPAPGRLGPLLCLLLAASCAWSGVAGEEELQVIQPDKSVLVAAGETATLRCTATSLIPVGPIQWFRGAGPGRELIYNQKEGHFPRVTTVSDLTKRNNMDFSIRIGNITPADAGTYYCVKFRKGSPDDVEFKSGAGTELSVRAKPSAPVVSGPAARATPQHTVSFTCESHGFSPRDITLKWFKNGNELSDFQTNVDPVGESVSYSIHSTAKVVLTREDVHSQVICEVAHVTLQGDPLRGTANLSETIRVPPTLEVTQQPVRAENQVNVTCQVRKFYPQRLQLTWLENGNVSRTETASTVTENKDGTYNWMSWLLVNVSAHRDDVKLTCQVEHDGQPAVSKSHDLKVSAHPKEQGSNTAAENTGSNERNIYIVVGVVCTLLVALLMAALYLVRIRQKKAQGSTSSTRLHEPEKNAREITQVQSLDTNDITYADLNLPKGKKPAPQAAEPNNHTEYASIQTSPQPASEDTLTYADLDMVHLNRTPKQPAPKPEPSFSEYASVQVPRK

SEQ ID NO: 322231 - DNA, 1527 bp, Artificial Sequence
  derived and/or modified sequence
atggagcccgccggccccgcccccggcagactgggccccctgctgtgcctgctgctggccgccagctgcgcctggagcggcgtggccggcgaggaggagctgcaggtgatccagcccgacaagagcgtgctggtggccgccggcgagaccgccaccctgagatgcaccgccaccagcctgatccccgtgggccccatccagtggttcagaggcgccggccccggcagagagctgatctacaaccagaaggagggccacttccccagagtgaccaccgtgagcgacctgaccaagagaaacaacatggacttcagcatcagaatcggcaacatcacccccgccgacgccggcacctactactgcgtgaagttcagaaagggcagccccgacgacgtggagttcaagagcggcgccggcaccgagctgagcgtgagagccaagcccagcgcccccgtggtgagcggccccgccgccagagccaccccccagcacaccgtgagcttcacctgcgagagccacggcttcagccccagagacatcaccctgaagtggttcaagaacggcaacgagctgagcgacttccagaccaacgtggaccccgtgggcgagagcgtgagctacagcatccacagcaccgccaaggtggtgctgaccagagaggacgtgcacagccaggtgatctgcgaggtggcccacgtgaccctgcagggcgaccccctgagaggcaccgccaacctgagcgagaccatcagagtgccccccaccctggaggtgacccagcagcccgtgagagccgagaaccaggtgaacgtgacctgccaggtgagaaagttctacccccagagactgcagctgacctggctggagaacggcaacgtgagcagaaccgagaccgccagcaccgtgaccgagaacaaggacggcacctacaactggatgagctggctgctggtgaacgtgagcgcccacagagacgacgtgaagctgacctgccaggtggagcacgacggccagcccgccgtgagcaagagccacgacctgaaggtgagcgcccaccccaaggagcagggcagcaacaccgccgccgagaacaccggcagcaacgagagaaacatctacatcgtggtgggcgtggtgtgcaccctgctggtggccctgctgatggccgccctgtacctggtgagaatcagacagaagaaggcccagggcagcaccagcagcaccagactgcacgagcccgagaagaacgccagagagatcacccaggtgcagagcctggacaccaacgacatcacctacgccgacctgaacctgcccaagggcaagaagcccgccccccaggccgccgagcccaacaaccacaccgagtacgccagcatccagaccagcccccagcccgccagcgaggacaccctgacctacgccgacctggacatggtgcacctgaacagaacccccaagcagcccgcccccaagcccgagcccagcttcagcgagtacgccagcgtgcaggtgcccagaaagtag

SEQ ID NO: 322232 - DNA, 1527 bp, Artificial Sequence
  derived and/or modified sequence
atggaacccgctggccctgcacctggccgactgggccctttgctctgcctgctgctagccgcaagttgcgcttggtccggcgtcgccggcgaggaggaactccaagtcattcagcctgataagtccgtgctggtagccgccggcgagacagcaacgctgaggtgcactgctacctccttaattcccgtggggcccatccagtggtttagaggtgcagggcccggccgcgaacttatctataaccagaaagaggggcattttcccagagtaacaacggttagcgaccttacaaagcgcaataatatggattttagcatccgtattgggaatataacgccagccgatgctggaacctactactgcgtgaaattcagaaaaggtagtccagatgatgtggaatttaaatcaggcgcaggcactgagctgagcgttcgtgcaaaaccctcagcacctgtggttagcggacccgcagcgcgggccaccccacagcataccgtgtctttcacgtgcgaatcgcatggcttctctccccgggatatcacccttaagtggttcaagaacggaaatgagctgtctgactttcagacgaacgtcgacccagtgggcgagtctgttagctactcgattcacagtaccgctaaggtggttttgacaagggaagatgtgcacagtcaggtgatctgcgaggtcgcacacgtgacacttcagggggacccgctccggggcacagccaaccttagcgagaccattagggtgccccccacgctcgaggtgacacagcagccggtcagagccgagaaccaagtaaatgtgacatgccaagtccggaaattttatccccagcggctgcagctgacatggctagagaacggcaacgtctcccgaaccgaaaccgcatccactgttacggagaataaggacgggacttataactggatgagctggctgttggtgaacgtgtccgctcaccgagacgatgttaaattaacttgccaggtggagcatgacggccagcccgctgtttctaagtcacatgacctgaaagtcagcgctcatcctaaggagcagggcagtaatactgctgccgaaaatacagggtcaaacgaacgtaatatctatatcgtggtgggtgtcgtctgcaccctgctggtggctctactgatggcagccctatacctggtccgtatcaggcagaagaaagcccagggctcaacctctagtacgaggcttcacgaacctgaaaaaaacgctagagaaatcacccaggtgcagtcgctggacactaatgacatcacttatgccgatttgaacctgcctaaagggaagaagccggcaccacaggcggcagagcccaacaaccacacagagtacgcatctatacaaacttcccctcaacctgccagtgaggatacccttacatacgcggacctggacatggtccatctcaacaggactccaaaacagcccgcccccaagccggaaccttcattttccgaatatgcctcagtgcaggtaccacgtaagtag

SEQ ID NO: 322233 - DNA, 1527 bp, Artificial Sequence
  derived and/or modified sequence
atggagcccgccggccctgcccctggccgcctgggccccctgctgtgcctgctgctggccgccagctgtgcctggagcggcgtggccggggaggaggagctgcaggtgatccagcctgacaagtctgtgctggtggccgccggggagacagccaccctgcgctgcacagccaccagcctcatccctgtgggccccatccagtggttccggggggccggccctggccgggagctgatctacaaccagaaggagggccacttcccccgggtgaccaccgtgtctgacctgaccaagaggaacaacatggacttcagcatccgcatcggcaacatcaccccagcagatgctggcacctactactgtgtgaagttcaggaagggcagcccagatgatgtggagttcaagagcggggccggcacagagctgtctgtgcgggccaagcccagcgcccctgtggtgtctggccctgctgcccgggccaccccccagcacacagtgtccttcacctgtgagagccacggcttcagcccccgggacatcaccctgaagtggttcaagaatggaaatgagctgagtgacttccagaccaacgtggaccctgtgggggagagcgtgtcctacagcatccacagcacagccaaggtggtgctgacccgggaggatgtgcacagccaggtgatctgtgaggtggcccacgtgaccctgcagggcgaccccctgcggggcacagccaacctgtctgagaccatccgggtgccccccaccctggaggtgacccagcagcctgtgcgggcagagaaccaggtgaatgtgacctgccaggtgaggaagttctacccccagaggctgcagctgacctggctggagaatggaaatgtgtccaggacagaaacagccagcacagtgacagagaacaaggatggcacctacaactggatgtcctggctgctggtgaatgtgtctgcccacagagatgatgtgaagctgacctgccaggtggagcatgatggccagcctgctgtgtccaagagccatgacctgaaggtgtctgcccaccccaaggagcagggcagcaacacagctgctgaaaatacaggcagcaatgaaagaaacatctacatcgtggtgggcgtggtgtgcaccctgctggtggccctgctgatggccgccctgtacctggtgcgcatccggcagaagaaggcccagggcagcaccagcagcacccggctgcacgagcctgagaagaatgcccgggagatcacccaggtgcagagcctggacaccaatgacatcacctacgccgacctgaacctgcccaagggcaagaagccagccccccaggccgctgagcccaacaaccacacagaatatgccagcatccagaccagcccccagcctgccagcgaggacaccctgacctatgctgacctggacatggtgcacctgaacagaacacccaagcagcctgcccccaagccagagcccagcttctctgaatatgcctctgtgcaggtgcccaggaagtag

SEQ ID NO: 322234 - DNA, 1527 bp, Artificial Sequence
  derived and/or modified sequence
atggagcccgccggccccgcccccggccggctgggccccctgctgtgtcttctgctggccgcctcttgtgcctggtcaggggtcgccggggaggaggagctccaagtcattcagccggacaagagtgtgctggttgcagcaggtgagaccgctacgctccgctgcaccgccacttcactgatacccgtagggcccatccagtggtttcgcggagcaggacccggtcgagaattgatttacaatcagaaagagggacacttcccaagagtcacaactgtctcagatctaaccaagagaaacaatatggatttctctataaggatcggcaacattacaccagccgacgccggaacatattactgcgtcaagttcaggaaggggtctccagatgacgttgaatttaaaagcggggccggaactgagctgtccgtgagggccaagccttcagcccctgttgtgtccggaccagctgcccgagccactccccagcatactgtgagtttcacatgtgagagccacggttttagcccaagggatataacactgaagtggttcaagaacggcaatgagttgtccgacttccagacaaacgtcgatcctgttggggagtccgtatcttatagcatacacagcaccgctaaagttgtgctgactagggaggacgtgcacagccaagtgatttgcgaagtggcgcacgtgacactacaaggtgatcccttgcgtggcacggcaaatctttctgaaacgattagggtcccccctaccttggaagtcactcagcagccagtccgcgcagagaatcaggtcaatgtgacatgtcaggtccggaagttttatcctcaacgattgcagctgacatggctcgagaatggcaatgtgagtcgtactgaaacagcctcaacggtcactgagaacaaagatggcacttataactggatgagctggttgcttgtgaatgtgtcagctcaccgcgacgacgtcaaacttacatgccaggtggagcatgatggccagcctgccgtctcaaagagtcacgacctcaaggtgagcgcccaccccaaggagcagggcagtaataccgcagctgaaaacactggctccaatgaaaggaacatctatattgtggttggcgttgtgtgtactctgcttgtcgcgctactcatggctgcgttgtatcttgtccgcattcggcagaagaaagcccagggtagtacatctagtacgcgtttgcatgaacccgagaaaaatgcccgtgagataacccaggtccagtcattggacacaaatgatataacatacgcggacctgaatttgcccaaggggaagaaaccggctccccaggctgccgagccaaataatcacacagagtatgcttccattcagacatcaccccaaccagcctccgaagatacactcacatacgccgaccttgatatggtgcacctgaacaggacacctaagcagccagccccaaagcccgaacctagtttctcagaatacgccagcgtgcaggtcccaaggaagtag

SEQ ID NO: 322235 - DNA, 1527 bp, Artificial Sequence
  derived and/or modified sequence
atggagcccgcagggccagccccagggaggctcggtcccctgctgtgcctgctacttgctgcgagctgcgcatggtctggggtcgcaggcgaagaggaactccaggtcatacagccggacaagagcgtgctggtcgccgctggggagaccgccaccctcaggtgcaccgctacaagcctgatccctgttggaccaattcagtggtttaggggagcaggacccggtagggaactgatttacaaccaaaaggaggggcatttccctcgggtcaccacggtatctgacttaacgaagcggaacaatatggacttcagcatcaggattggtaatatcactccagctgacgccggaacctattactgcgtcaaatttcggaagggttcacccgatgatgtcgaattcaagagcggcgctggtaccgagttaagtgtgcgggcaaaaccttcagctcccgtggtctctggaccagccgcacgagctaccccacaacacacagtctcgtttacatgtgagtcacatggattctctccgagagacatcacgttgaagtggttcaagaacggtaatgagctgtcagacttccagactaacgtcgaccccgttggtgagagtgttagttattctatccattcaaccgcaaaggttgttctgacccgcgaggacgtgcactcacaggtgatttgcgaagtcgcacacgtcacactgcagggggaccctctccggggaaccgcaaacctgtctgagactatacgagttcccccaacgctggaagttacacagcaacctgtcagagcggagaatcaagttaatgtgacttgccaggtccggaagttctacccccaaaggctccagctaacatggcttgagaacggcaacgtgagtagaaccgagaccgctagcacagtgacagagaataaggacggcacctacaactggatgtcttggctgcttgtgaatgtgtccgcgcaccgggacgatgtgaaattaacctgccaggtcgaacacgatggtcagcctgcggtgagtaaatcacatgatctgaaggtgtccgcccaccctaaggaacagggcagcaatacagccgcagagaacaccggttccaatgagaggaatatttacatcgtggttggcgtcgtgtgcactctacttgtggcactgttgatggctgccctctatctcgttaggatacggcagaaaaaggcccagggctctacctcatctactcggttgcacgaacccgagaagaacgctagagaaatcacacaggtccagtctctcgacacgaatgacatcacctatgcagaccttaacctgccaaaggggaagaaacctgctccccaggctgccgaacctaacaatcacacggaatacgccagtattcagacctcccctcagcccgcttctgaagacacactgacctacgcagacttagatatggttcacctgaacaggacccctaaacagccagcaccgaaacctgaaccgagcttctcggagtacgccagtgtgcaagtacctagaaagtag

SEQ ID NO: 322236 - DNA, 3875 bp, Artificial Sequence
  derived and/or modified sequence
ggcggcgcagccgcggcccatggagcccgccggcccggcccccggccgcctcgggccgctgctctgcctgctgctcgccgcgtcctgcgcctggtcaggagtggcgggtgaggaggagctgcaggtgattcagcctgacaagtccgtgttggttgcagctggagagacagccactctgcgctgcactgcgacctctctgatccctgtggggcccatccagtggttcagaggagctggaccaggccgggaattaatctacaatcaaaaagaaggccacttcccccgggtaacaactgtttcagacctcacaaagagaaacaacatggacttttccatccgcatcggtaacatcaccccagcagatgccggcacctactactgtgtgaagttccggaaagggagccccgatgacgtggagtttaagtctggagcaggcactgagctgtctgtgcgcgccaaaccctctgcccccgtggtatcgggccctgcggcgagggccacacctcagcacacagtgagcttcacctgcgagtcccacggcttctcacccagagacatcaccctgaaatggttcaaaaatgggaatgagctctcagacttccagaccaacgtggaccccgtaggagagagcgtgtcctacagcatccacagcacagccaaggtggtgctgacccgcgaggacgttcactctcaagtcatctgcgaggtggcccacgtcaccttgcagggggaccctcttcgtgggactgccaacttgtctgagaccatccgagttccacccaccttggaggttactcaacagcccgtgagggcagagaaccaggtgaatgtcacctgccaggtgaggaagttctacccccagagactacagctgacctggttggagaatggaaacgtgtcccggacagaaacggcctcaaccgttacagagaacaaggatggtacctacaactggatgagctggctcctggtgaatgtatctgcccacagggatgatgtgaagctcacctgccaggtggagcatgacgggcagccagcggtcagcaaaagccatgacctgaaggtctcagcccacccgaaggagcagggctcaaataccgccgctgagaacactggatctaatgaacggaacatctatattgtggtgggtgtggtgtgcaccttgctggtggccctactgatggcggccctctacctcgtccgaatcagacagaagaaagcccagggctccacttcttctacaaggttgcatgagcccgagaagaatgccagagaaataacacaggtacagtccttggacacaaatgatatcacatatgcagacctgaacctgcccaaggggaagaagcctgctccccaggctgcggagcccaacaaccacacggagtatgccagcattcagaccagcccgcagcccgcgtcggaggacaccctcacctatgctgacctggacatggtccacctcaaccggacccccaagcagccggcccccaagcctgagccgtccttctcagagtacgccagcgtccaggtcccgaggaagtgaatgggaccgtggtttgctctagcacccatctctacgcgctttcttgtcccacagggagccgccgtgatgagcacagccaacccagttcccggagggctggggcggtgcaggctctgggacccaggggccagggtggctcttctctccccacccctccttggctctccagcacttcctgggcagccacggccccctccccccacattgccacatacctggaggctgacgttgccaaaccagccagggaaccaacctgggaagtggccagaactgcctggggtccaagaactcttgtgcctccgtccatcaccatgtgggttttgaagaccctcgactgcctccccgatgctccgaagcctgatcttccagggtggggaggagaaaatcccacctcccctgacctccaccacctccaccaccaccaccaccaccaccaccaccactaccaccaccacccaactggggctagagtggggaagatttcccctttagatcaaactgccccttccatggaaaagctggaaaaaaactctggaacccatatccaggcttggtgaggttgctgccaacagtcctggcctcccccatccctaggctaaagagccatgagtcctggaggaggagaggacccctcccaaaggactggagacaaaaccctctgcttccttgggtccctccaagactccctggggcccaactgtgttgctccacccggacccatctctcccttctagacctgagcttgcccctccagctagcactaagcaacatctcgctgtggacgcctgtaaattactgagaaatgtgaaacgtgcaatcttgaaactgaggtgttagaaaacttgatctgtggtgttttgttttgttttttttcttaaaacaacagcaacgtgatcttggctgtctgtcatgtgttgaagtccatggttgggtcttgtgaagtctgaggtttaacagtttgttgtcctggagggattttcttacagcgaagacttgagttcctccaagtcccagaaccccaagaatgggcaagaaggatcaggtcagccactccctggagacacagccttctggctgggactgacttggccatgttctcagctgagccacgcggctggtagtgcagccttctgtgaccccgctgtggtaagtccagcctgcccagggctgctgagggctgcctcttgacagtgcagtcttatcgagacccaatgcctcagtctgctcatccgtaaagtggggatagtgaagatgacacccctccccaccacctctcataagcactttaggaacacacagagggtagggatagtggccctggccgtctatcctacccctttagtgaccgcccccatcccggctttctgagctgatccttgaagaagaaatcttccatttctgctctcaaaccctactgggatcaaactggaataaattgaagacagccagggggatggtgcagctgtgaagctcgggctgattccccctctgtcccagaaggttggccagagggtgtgacccagttaccctttaacccccacccttccagtcgggtgtgagggcctgaccgggcccagggcaagcagatgtcgcaagccctatttattcagtcttcactataactcttagagttgagacgctaatgttcatgactcctggccttgggatgcccaagggatttctggctcaggctgtaaaagtagctgagccatcctgcccattcctggaggtcctacaggtgaaactgcaggagctcagcatagacccagctctctgggggatggtcacctggtgatttcaatgatggcatccaggaattagctgagccaacagaccatgtggacagctttggccagagctcccgtgtggcatctgggagccacagtgacccagccacctggctcaggctagttccaaattccaaaagattggcttgtaaaccttcgtctccctctcttttacccagagacagcacatacgtgtgcacacgcatgcacacacacattcagtattttaaaagaatgttttcttggtgccattttcattttattttattttttaattcttggagggggaaataagggaataaggccaaggaagatgtatagctttagctttagcctggcaacctggagaatccacataccttgtgtattgaaccccaggaaaaggaagaggtcgaaccaaccctgcggaaggagcatggtttcaggagtttattttaagactgctgggaaggaaacaggccccattttgtatatagttgcaacttaaactttttggcttgcaaaatatttttgtaataaagatttctgggtaataatgagtc

SEQ ID NO: 322237 - protein, 162 aa, Artificial Sequence
  derived and/or modified sequence
MDPVAAEAPGEAFLARRRPEGGGGSARPRYSLLAEIGRGSYGVVYEAVAGRSGARVAVKKIRCDAPENVELALAEFWALTSLKRRHQNVVQFEECVLQRNGLAQRMSHGNKSSQLYLRLVETSLKGRFLGTHSLTTSPPEDGRGYRWWPGRLAISRQLDPAM

SEQ ID NO: 322238 - DNA, 489 bp, Artificial Sequence
  derived and/or modified sequence
atggacccggttgctgccgaagcgcctggtgaagcctttctggctcgaaggcggcctgagggagggggtggaagcgctcgccccagatactctctcctagcagagattgggcgcggcagttacggagtggtctatgaagcagtcgcagggagatctggagcgcgtgtcgccgtgaagaagatccggtgtgatgcacctgagaatgtcgagctggctcttgctgaattctgggccctgacatcacttaaaaggcggcaccaaaacgtggtgcagttcgaggagtgtgtcctgcagcgcaacggcctagcccagcgcatgtcccacggcaacaagtcttcacagttatacctcaggctcgttgaaacatcactgaaaggtcgattcctgggcactcatagtctgaccacatccccccccgaggacgggcggggctacagatggtggcctggccggttagccatctcgcgtcagctagatccagctatgtag

SEQ ID NO: 322239 - DNA, 489 bp, Artificial Sequence
  derived and/or modified sequence
atggaccctgtggccgctgaggcccctggagaggccttcctggccaggagaagacctgagggcggcggcggcagcgcccggccccgctacagcctgctggccgagatcggccggggcagctatggagtggtgtatgaagctgtggccggccgcagcggggcccgggtggccgtgaagaagatccgctgtgatgccccagaaaatgtggagctggccctggccgagttctgggccctgaccagcctgaagaggaggcaccagaatgtggtgcagtttgaggagtgtgtgctgcagagaaatggcctggcccagaggatgagccacggcaacaagagcagccagctgtacctgcggctggtggagaccagcctgaagggccgcttcctgggcacccacagcctgaccaccagccccccagaagatggccggggctaccgctggtggccaggccgcctggccatcagccggcagctggaccctgccatgtag

SEQ ID NO: 322240 - DNA, 489 bp, Artificial Sequence
  derived and/or modified sequence
atggaccccgtggccgccgaggcccccggcgaggccttcctggccagacggcgaccagaagggggaggcggttctgcacggccaagatactccttactggcagagattggccgcggaagctacggagtcgtatatgaggcagtggcggggcggagtggggcccgagttgccgtgaagaagatacgctgcgatgctccagaaaatgtggaactggctctggcagaattctgggctctcacctcattgaagagacgccatcagaatgtggtccagttcgaagaatgtgtgcttcagcggaatggcctggctcagcgcatgtctcatggtaataaatcttctcagctctacctgcgtctcgtggagacatcattgaagggtagatttctgggcacccattcgttgactacttctccaccagaggacgggaggggctacagatggtggccggggagactggccatcagtcggcaacttgatcccgccatgtag

SEQ ID NO: 322241 - DNA, 489 bp, Artificial Sequence
  derived and/or modified sequence
atggaccctgtggcagcagaggctcctggagaagcctttcttgctagacggaggcctgaagggggaggaggctccgcgaggccacgttattctcttttggccgaaatcgggcgagggagctatggagtcgtgtacgaggcggtggctggcagatctggtgcgagagtagcagtgaaaaaaatccgctgtgacgccccagagaacgtagaactggccctcgctgagttttgggcacttactagcctcaagaggcggcatcagaatgtggtacagttcgaggaatgcgtcttgcagcggaatggtttggcccagcgaatgtcacatggcaacaagagctcacaattgtacctaagactcgttgaaacatccttgaaaggacgcttcctgggaacccacagcctgaccacatcccctcccgaggacggccgtggttacagatggtggccgggtcgcttggctatctctcggcagttagacccggcaatgtag

SEQ ID NO: 322242 - DNA, 1197 bp, Artificial Sequence
  derived and/or modified sequence
acaaagcccggagcggaaaaggcgaagcccagtgccgcgggcgcccagcacgaagctgaggccggcggcggcggcccgggccatggatccggtggcggccgaggccccgggcgaggccttcctggcgcggcgacggcctgagggcggtggcgggtccgcgcggccgcgttacagcctgttggcggagatcgggcgcggcagctacggcgtggtttatgaggcagtggccgggcgcagcggggcccgggtggcggtcaagaagatccgctgcgacgcccccgagaacgtggagctggcgctggctgaattctgggccctcaccagcctcaagcggcgccaccagaacgtcgtgcagtttgaggagtgcgtcctgcagcgcaatgggttagcccagcgcatgagtcacggcaacaagagctcgcagctttacctgcgcctggtggagacctcgctgaaaggtcgattcctcgggacccacagtctcaccacgtctcctccagaggacggcagagggtacaggtggtggcctggccggttggcgatctcccgacagctggatccggcaatgtgaagcttttgtttgggtttccccgcttctttttagttttgctttatttttttccttttcttttcttttttttttttcctctttcctttttttaaatttaaaccattgagacttcagaagagcaggacacaatgctgtggacaggcaccaatttctttaaagaaattcaatgtgggcaaggcatatgtgtaaatttcacttttactttttataaggggttagggagctatttttggttttgtccttcactttccctctgtcttccttctttatacttttctcagttctacttatgacacctcacttccctagagaaggcctgcctccccatagggaatctgggggtttcttctggaacggggcgtgaggacacaaggaggcctctgggccacgcctccctaccagatgcaggaactcctggactccttggtgggctggccctggctagcccttgggcctcggagatgatcagaggtgaagaaccgcctggaagaggaaggccagggtttggccaggagaactaagaaggtctcaactccaggctttgttgtgtttaagctattgagagccccaggccacaccaggacttgcagtggtgggaatccattcctcttctgccctgtgttgca

SEQ ID NO: 322243 - DNA, 489 bp, Artificial Sequence
  derived and/or modified sequence
atggaccccgtggccgccgaggcccccggcgaggccttcctggccagaagaagacccgagggcggcggcggcagcgccagacccagatacagcctgctggccgagatcggcagaggcagctacggcgtggtgtacgaggccgtggccggcagaagcggcgccagagtggccgtgaagaagatcagatgcgacgcccccgagaacgtggagctggccctggccgagttctgggccctgaccagcctgaagagaagacaccagaacgtggtgcagttcgaggagtgcgtgctgcagagaaacggcctggcccagagaatgagccacggcaacaagagcagccagctgtacctgagactggtggagaccagcctgaagggcagattcctgggcacccacagcctgaccaccagcccccccgaggacggcagaggctacagatggtggcccggcagactggccatcagcagacagctggaccccgccatgtag

SEQ ID NO: 322244 - protein, 391 aa, Artificial Sequence
  derived and/or modified sequence
MSGPVPSRARVYTDVNTHRPREYWDYESHVVEWGNQDDYQLVRKLGRGKYSEVFEAINITNNEKVVVKILKPVKKKKIKREIKILENLRGGPNIITLADIVKDPVSRTPALVFEHVNNTDFKQLYQTLTDYDIRFYMYEILKALDYCHSMGIMHRDVKPHNVMIDHEHRKLRLIDWGLAEFYHPGQEYNVRVASRYFKGPELLVDYQMYDYSLDMWSLGCMLASMIFRKEPFFHGHDNYDQLVRIAKVLGTEDLYDYIDKYNIELDPRFNDILGRHSRKRWERFVHSENQHLVSPEALDFLDKLLRYDHQSRLTAREAMEHPYFYTVVKDQARMGSSSMPGGSTPVSSANMMSGISSVPTPSPLGPLAGSPVIAAANPLGMPVPAAAGAQQ

SEQ ID NO: 322245 - protein, 397 aa, Artificial Sequence
  derived and/or modified sequence
MSGPVPSRARVYTDVNTHRPREYWDYESHVVEWGNQDDYQLVRKLGRGKYSEVFEAINITNNEKVVVKILKPVKKKKIKREIKILENLRGGPNIITLADIVKDPVSRTPALVFEHVNNTDFKQLYQTLTDYDIRFYMYEILKALDYCHSMGIMHRDVKPHNVMIDHEHRKLRLIDWGLAEFYHPGQEYNVRVASRYFKGPELLVDYQMYDYSLDMWSLGCMLASMIFRKEPFFHGHDNYDQLVRIAKVLGTEDLYDYIDKYNIELDPRFNDILGRHSRKRWERFVHSENQHLVSPEALDFLDKLLRYDHQSRLTAREAMEHPYFYTVVKDQARMGSSSMPGGSTPVSSANMMSGISSVPTPSPLGPLAGSPVIAAANPLGCLFQLPLRSAVTALSVS

SEQ ID NO: 322246 - protein, 255 aa, Artificial Sequence
  derived and/or modified sequence
MYEILKALDYCHSMGIMHRDVKPHNVMIDHEHRKLRLIDWGLAEFYHPGQEYNVRVASRYFKGPELLVDYQMYDYSLDMWSLGCMLASMIFRKEPFFHGHDNYDQLVRIAKVLGTEDLYDYIDKYNIELDPRFNDILGRHSRKRWERFVHSENQHLVSPEALDFLDKLLRYDHQSRLTAREAMEHPYFYTVVKDQARMGSSSMPGGSTPVSSANMMSGISSVPTPSPLGPLAGSPVIAAANPLGMPVPAAAGAQQ

SEQ ID NO: 322247 - protein, 385 aa, Artificial Sequence
  derived and/or modified sequence
MSGPVPSRARVYTDVNTHRPREYWDYESHVVEWGNQDDYQLVRKLGRGKYSEVFEAINITNNEKVVVKILKPVKKKKIKREIKILENLRGGPNIITLADIVKDPVSRTPALVFEHVNNTDFKQLYQTLTDYDIRFYMYEILKALDYCHSMGIMHRDVKPHNVMIDHEHRKLRLIDWGLAEFYHPGQEYNVRVASRYFKGPELLVDYQMYDYSLDMWSLGCMLASMIFRKEPFFHGHDNYDQLVRIAKVLGTEDLYDYIDKYNIELDPRFNDILGRHSRKRWERFVHSENQHLVSPEALDFLDKLLRYDHQSRLTAREAMEHPYFYTVVKDQARMGSSSMPGGSTPVSSANMMSEMKFCRVAQAGLELLSSTVYPPWPPKVLRLEA

SEQ ID NO: 322248 - DNA, 1176 bp, Artificial Sequence
  derived and/or modified sequence
atgtccggacctgtgcctagtagggctagggtttacactgacgtgaatacacaccgtccgagggaatattgggattacgaatctcatgtggtggagtgggggaatcaggacgactatcagttagttagaaagctcggcaggggcaaatacagcgaggtgttcgaggcgattaacatcactaataatgagaaagtggttgtcaaaattctcaagcccgttaaaaaaaagaagatcaagcgggagatcaaaatactcgagaacctgcgcgggggcccaaacattattacccttgcagatatagttaaagatcctgtctccaggactcctgcgttggtcttcgaacacgttaacaacaccgattttaagcaattgtaccaaacattgactgactatgatatccgtttttatatgtatgagatcctcaaggctctcgattactgccatagtatgggcatcatgcacagggacgtgaagccacacaacgtgatgattgaccatgaacataggaaattacgcctgattgattggggattagcagaattttaccacccgggccaggaatacaatgtccgcgtcgcaagtcgctacttcaagggccctgaacttctcgtcgactaccagatgtatgattattccctggacatgtggagcctgggttgcatgctagcctccatgatctttaggaaggaaccgtttttccacggacacgacaattacgatcagctggtgagaattgctaaagtattggggacggaagacctctacgattatatagacaagtataatatagagcttgatcctcgatttaatgacattctgggccgccatagtcgtaagagatgggagcgttttgtgcactccgagaatcagcacctggtttctcctgaagccctggacttcctcgacaaattgctgagatacgaccaccaaagcaggctgaccgcccgagaagcaatggagcacccttacttctacactgtcgtgaaggaccaggctcgcatggggagctcatcaatgcccggcgggtcaaccccagtgtcctctgctaatatgatgtctggaatctctagtgtccctaccccttcgccactcggacccctggcaggctctcccgtgatcgctgctgccaacccactgggtatgccagtcccagccgccgccggggctcagcagtag

SEQ ID NO: 322249 - DNA, 1194 bp, Artificial Sequence
  derived and/or modified sequence
atgagtgggccagttccaagccgagcaagggtctataccgatgtcaatactcatcgacctcgcgaatactgggattatgagtcacatgtagtcgaatgggggaatcaggatgattaccaactagtgcgcaagctcggaagaggcaagtattccgaggttttcgaggctataaacatcacaaacaacgagaaagtcgtcgttaaaattctgaaaccggtgaaaaagaaaaaaatcaagagggagatcaagatattggaaaacctccggggaggccccaacatcattacactggccgatatagttaaggaccccgtttccagaacacccgctctcgtgttcgagcatgtaaataatacggactttaagcagctctaccagactttgactgactatgatatcagattctacatgtacgaaatattgaaagctctggactattgccattccatgggtataatgcacagagacgtaaaacctcataatgttatgatcgatcacgagcatcgcaagctacgcctcatcgactggggactagcagagttttaccatccgggccaggaatataatgttcgagttgcatcgaggtattttaagggacccgagctgctcgtagactatcaaatgtacgattactcattggacatgtggtcccttgggtgcatgctggcatcaatgatcttcaggaaggagcctttctttcatggccacgacaattatgaccagctagtccggattgccaaagtgttaggaaccgaggacctttacgattatatagacaaatataacatcgaactggatccccgatttaacgacattctagggagacattcgagaaagagatgggagagattcgtgcactcagagaatcagcatctcgtgtctccagaggctctggattttctggataagctgctgcgctatgaccatcagagtcgtctgaccgcgcgcgaggctatggagcatccatatttctacactgtcgtgaaggatcaggcccggatgggctcctcctccatgcctgggggctctactcccgttagctccgcaaacatgatgtcaggcatttcaagcgtacccaccccctcccctttagggccactggcaggttcacctgtgatcgccgccgccaatccactgggctgcttgttccagctgcctctgcgcagtgccgttaccgccctgagtgtgtcttag

SEQ ID NO: 322250 - DNA, 1158 bp, Artificial Sequence
  derived and/or modified sequence
atgtctgggccggtgccttcacgggcacgtgtatatacggacgttaacacgcaccgcccccgtgaatactgggactatgaaagccatgtagtggaatggggcaatcaggacgactatcaattggttaggaagctgggacggggaaaatattcagaagtgttcgaggccattaacattaccaataatgaaaaggttgtggtaaagatcctgaagcctgtgaagaaaaagaaaatcaagcgcgagatcaagattttggaaaacttacgaggcgggcctaatattataacattggctgatattgtgaaagatcccgtttctcggacgcccgctctcgtgttcgaacatgtaaacaacacagacttcaaacagctctatcagacactcaccgactacgatattaggttctatatgtacgagatcctaaaagcgctcgattattgccactcgatgggaattatgcatagagacgttaagccccacaacgttatgatcgatcacgagcatcgcaaactgagactgatcgactggggactagctgaattctatcatcctgggcaggagtataatgtgcgggtcgcatcccgatacttcaagggacctgaactgttggtcgactaccaaatgtatgactacagtctggacatgtggagcctgggttgtatgcttgcatcgatgatcttccggaaggagccattttttcacgggcacgacaattatgaccagctggtccgcattgccaaggttctcggcaccgaggatttgtatgactatatcgataagtacaatatcgagttagatccaagattcaatgatattttaggtcgtcatagtaggaaacgatgggaaaggttcgtgcattccgaaaatcagcatttggtttctcctgaggctttggatttcctggataagctcctccgctacgaccaccagtccagactcacagcgagggaggccatggaacacccatatttttacactgttgtgaaggaccaagcacggatggggtcatcgagtatgccaggagggtctacacctgtgagctctgcaaatatgatgtcagaaatgaagttctgtagagtcgctcaggcaggccttgagctgctgagttcaaccgtatatccaccctggccccccaaggttttgagacttgaagcctag

SEQ ID NO: 322251 - DNA, 1176 bp, Artificial Sequence
  derived and/or modified sequence
atgagcggccctgtgcccagccgggcccgggtgtacacagatgtgaacacccaccggccccgggagtactgggactatgagagccacgtggtggagtggggcaaccaggatgactaccagctggtgaggaagctgggccggggcaagtacagcgaggtgtttgaggccatcaacatcaccaacaatgagaaggtggtggtgaagatcctgaagcctgtgaagaagaagaagatcaagcgggagatcaagatcctggagaacctgcggggcggccccaacatcatcaccctggccgacatcgtgaaggaccctgtgtccaggaccccagccctggtgtttgaacatgtgaacaacacagacttcaagcagctgtaccagaccctgacagattatgacatccgcttctacatgtatgagatcctgaaggccctggactactgccacagcatgggcatcatgcacagagatgtgaagccccacaacgtgatgattgaccacgagcacaggaagctgcggctgattgactggggcctggccgagttctaccaccctggccaggagtacaacgtgcgggtggccagccgctacttcaagggccctgagctgctggtggactaccagatgtatgactacagcctggacatgtggagcctgggctgcatgctggcctccatgatcttcaggaaggagcccttcttccacggccatgacaactatgaccagctggtgagaattgccaaggtgctgggcacagaggacctgtatgactacatcgacaagtacaacatcgagctggacccccgcttcaatgacatcctgggccgccacagcaggaagcgctgggagagatttgtgcacagcgagaaccagcacctggtgtccccagaggccctggacttcctggacaagctgctgcgctatgaccaccagagccggctgacagcccgggaggccatggagcacccctacttctacacagtggtgaaggaccaggccaggatgggcagcagctccatgcctgggggcagcacccctgtgagcagcgccaacatgatgagcggcatcagctctgtgcccacccccagccccctgggccccctggccggcagccctgtgattgctgctgccaaccccctgggcatgcctgtgcctgctgctgctggggcccagcagtag

SEQ ID NO: 322252 - DNA, 1194 bp, Artificial Sequence
  derived and/or modified sequence
atgagcggccctgtgcccagccgggcccgggtgtacacagatgtgaacacccaccggccccgggagtactgggactatgagagccacgtggtggagtggggcaaccaggatgactaccagctggtgaggaagctgggccggggcaagtacagcgaggtgtttgaggccatcaacatcaccaacaatgagaaggtggtggtgaagatcctgaagcctgtgaagaagaagaagatcaagcgggagatcaagatcctggagaacctgcggggcggccccaacatcatcaccctggccgacatcgtgaaggaccctgtgtccaggaccccagccctggtgtttgaacatgtgaacaacacagacttcaagcagctgtaccagaccctgacagattatgacatccgcttctacatgtatgagatcctgaaggccctggactactgccacagcatgggcatcatgcacagagatgtgaagccccacaacgtgatgattgaccacgagcacaggaagctgcggctgattgactggggcctggccgagttctaccaccctggccaggagtacaacgtgcgggtggccagccgctacttcaagggccctgagctgctggtggactaccagatgtatgactacagcctggacatgtggagcctgggctgcatgctggcctccatgatcttcaggaaggagcccttcttccacggccatgacaactatgaccagctggtgagaattgccaaggtgctgggcacagaggacctgtatgactacatcgacaagtacaacatcgagctggacccccgcttcaatgacatcctgggccgccacagcaggaagcgctgggagagatttgtgcacagcgagaaccagcacctggtgtccccagaggccctggacttcctggacaagctgctgcgctatgaccaccagagccggctgacagcccgggaggccatggagcacccctacttctacacagtggtgaaggaccaggccaggatgggcagcagctccatgcctgggggcagcacccctgtgagcagcgccaacatgatgagcggcatcagctctgtgcccacccccagccccctgggccccctggccggcagccctgtgattgctgctgccaaccccctgggctgcctcttccagctgcccctgcggtctgctgtgacagccctgtctgtgtcctag

SEQ ID NO: 322253 - DNA, 1158 bp, Artificial Sequence
  derived and/or modified sequence
atgagcggccctgtgcccagccgggcccgggtgtacacagatgtgaacacccaccggccccgggagtactgggactatgagagccacgtggtggagtggggcaaccaggatgactaccagctggtgaggaagctgggccggggcaagtacagcgaggtgtttgaggccatcaacatcaccaacaatgagaaggtggtggtgaagatcctgaagcctgtgaagaagaagaagatcaagcgggagatcaagatcctggagaacctgcggggcggccccaacatcatcaccctggccgacatcgtgaaggaccctgtgtccaggaccccagccctggtgtttgaacatgtgaacaacacagacttcaagcagctgtaccagaccctgacagattatgacatccgcttctacatgtatgagatcctgaaggccctggactactgccacagcatgggcatcatgcacagagatgtgaagccccacaacgtgatgattgaccacgagcacaggaagctgcggctgattgactggggcctggccgagttctaccaccctggccaggagtacaacgtgcgggtggccagccgctacttcaagggccctgagctgctggtggactaccagatgtatgactacagcctggacatgtggagcctgggctgcatgctggcctccatgatcttcaggaaggagcccttcttccacggccatgacaactatgaccagctggtgagaattgccaaggtgctgggcacagaggacctgtatgactacatcgacaagtacaacatcgagctggacccccgcttcaatgacatcctgggccgccacagcaggaagcgctgggagagatttgtgcacagcgagaaccagcacctggtgtccccagaggccctggacttcctggacaagctgctgcgctatgaccaccagagccggctgacagcccgggaggccatggagcacccctacttctacacagtggtgaaggaccaggccaggatgggcagcagctccatgcctgggggcagcacccctgtgagcagcgccaacatgatgtctgagatgaagttctgccgggtggcccaggccggcctggagctgctgagcagcacagtgtacccaccctggccacccaaggtgctgcggctggaggcctag

SEQ ID NO: 322254 - DNA, 1176 bp, Artificial Sequence
  derived and/or modified sequence
atgagcggccccgtgcccagccgggcccgggtgtacaccgacgtgaacactcaccgacctcgggagtactgggattatgagtcccacgtggtcgagtggggcaaccaggatgattatcagctcgtgcgcaagttaggtcgtggaaaatactcggaagtgtttgaggctatcaatatcactaacaacgagaaggtagttgtcaagatcctcaagccggtgaagaagaagaaaatcaaacgggaaataaaaatcttagaaaatctaagaggcgggcctaatatcatcaccttggcagacattgttaaggatcccgtgtctcgaactcctgcactggtgttcgagcacgtgaacaataccgattttaaacagttgtatcagaccctgacggattatgatatcagattttatatgtacgagatcctaaaggcattggattattgtcatagtatgggcattatgcacagggatgtaaaaccccacaacgtgatgatcgaccatgagcacagaaaactgagactaatagattgggggctggccgaattttaccaccccggacaagaatacaacgtgagggtggcctctcggtacttcaaggggcctgagcttctagttgactatcaaatgtatgactatagtttggacatgtggtcgctgggctgcatgctggcttctatgatattccggaaagagcctttttttcacgggcatgacaattacgatcaactggtgcggattgccaaggtgctggggacagaggatttgtacgactacatagataaatacaatatcgaactcgacccacgattcaatgacatcttaggcaggcactcccgcaagcgatgggagcgcttcgtccattccgaaaaccaacatttagtctccccggaggccctcgattttctggataagctcctgcgctacgatcatcagtccagactgacagcccgtgaggcaatggaacacccctacttctatactgtggtgaaagaccaggctcgcatggggagctcttccatgccaggcgggtccacacctgtgtcaagtgctaatatgatgtctgggatttcatcagtgcctacaccctccccattaggcccactggccggtagccccgtgatcgccgctgcaaatccattgggtatgcctgttccagccgcggccggagcccagcagtag

SEQ ID NO: 322255 - DNA, 1194 bp, Artificial Sequence
  derived and/or modified sequence
atgagcggccccgtgcccagccgggcccgggtgtacaccgacgtgaacacacatcggcctcgtgagtattgggactacgaatcccacgtagtggagtggggcaaccaggacgattaccaattggtgaggaaactcggcagaggcaagtactctgaagtgttcgaggcgatcaacattaccaataacgagaaggtcgtggtgaagatccttaaacccgtgaagaaaaagaagatcaaaagggagatcaagattttagagaaccttcgaggagggcctaacatcatcacactggcagatatcgtcaaagaccctgtcagtaggactccagccctcgtctttgagcacgttaacaatacagatttcaagcagctttatcagaccctgacggactatgacatccgcttttacatgtatgaaattctgaaggctctcgattactgccactccatgggaatcatgcatcgagacgtgaagccccacaatgtgatgatcgaccatgagcaccggaagttgaggctgattgattggggactggcggagttctatcaccctggtcaggagtacaatgttagagtggctagccggtatttcaagggccccgagctattagtggactaccagatgtacgactacagcctcgatatgtggagtttaggctgcatgctcgcatctatgattttccgaaaggagcccttctttcacggccacgataactacgaccaacttgtaagaatcgcgaaggtgttgggaaccgaggacctttacgactacatagataaatataatatcgaactcgaccctcgattcaatgacatccttgggcgtcattcgcgcaaacgctgggagcgcttcgtccactcagagaaccaacacctcgtgtccccagaggcactcgactttctggataagctgctccggtacgaccatcagagcagattaactgctcgggaggctatggagcatccctatttctacactgtcgtcaaggaccaggcccgaatgggttcgtccagtatgcctggtggttccactcccgtgagtagcgctaatatgatgtccggaatctcctcagttcctactccttctcctttggggcctcttgcgggcagtcccgtgatcgctgcagcaaatccgttgggatgcctctttcagcttcccctgcggagtgccgtgacagccctgtcagtcagctag

SEQ ID NO: 322256 - DNA, 1158 bp, Artificial Sequence
  derived and/or modified sequence
atgagcggccccgtgcccagccgggcccgggtgtacaccgacgtgaacacacacagacctcgggaatactgggactacgaaagccatgtcgtggagtggggcaatcaggacgactaccagctcgtgagaaaactggggagagggaaatattctgaagtgtttgaggcgataaatatcaccaataacgaaaaggtggtggtgaagatactcaaaccagtgaaaaaaaagaaaattaaacgggagattaagattttggagaacctgcgcggcggacccaatatcattaccttagccgacatcgtgaaagaccctgtgagccgtacacccgccctcgtcttcgagcacgtgaataacaccgacttcaaacagctgtatcagactctcacagactacgacatcaggttctacatgtacgaaattctgaaggccttagactactgccactccatggggatcatgcatcgcgatgttaagccccacaatgtgatgatcgatcacgagcataggaaactgcgcctgattgattggggattggcggagttctaccatccagggcaggagtataacgttagagtagcctcacgctattttaagggtcctgaactgctggtagactaccagatgtacgactacagcctggacatgtggagcttaggctgcatgctcgcctctatgatctttagaaaagagcccttctttcatggccatgataactacgaccagctagtcaggattgctaaggttcttggtacagaagatctgtacgactatatagacaagtacaacattgaattggaccctaggtttaatgatatactgggacgtcactcaagaaaacgatgggaacggttcgtgcacagcgaaaaccaacacctggtttcccctgaggctctcgatttcctggataaattacttcgatacgaccatcagagtaggcttaccgcccgggaggcaatggaacacccctatttctacaccgttgtcaaggaccaagcccgaatggggagctcttctatgcccggggggagcacccccgttagttcagccaacatgatgtccgaaatgaagttctgtagggtggcccaagccgggcttgaactgttatcttctacagtgtatcccccatggccgccaaaggtgctgcgactcgaagcatag

SEQ ID NO: 322257 - DNA, 1176 bp, Artificial Sequence
  derived and/or modified sequence
atgtctggaccggtgcccagcagggcccgtgtctacacggatgtgaatacacaccgacctcgcgagtactgggattacgagtcacacgttgtggagtggggcaatcaggacgactatcagctggtccgtaagctcggcagaggaaaatatagcgaggtgttcgaagctattaatatcaccaataatgaaaaggtagttgtgaagatcttaaagccagtcaaaaagaagaaaatcaagagggagattaaaattttggaaaaccttagaggagggcctaatatcataaccctcgccgacattgtcaaggaccctgtgagtcgtacgcccgctttggtgttcgaacatgtaaataatactgattttaagcagctgtatcagacattaactgattatgacatccggttttacatgtatgagatattaaaggcattggattattgtcattcaatgggaatcatgcatcgggatgtaaaaccccacaacgtgatgattgaccatgagcacagaaaactgcgcctaatcgattggggcctcgccgagttctatcaccctgggcaagagtataatgtcagggttgcatcaaggtattttaagggtccagagctcttggtagactatcagatgtacgattatagtttagatatgtggtccttgggatgcatgctggcttctatgatttttaggaaagagcccttcttccatggccatgataactacgatcagctggttagaattgccaaagttctggggaccgaggacctctatgattacatagacaagtacaacatcgagctcgacccaaggttcaacgacatactgggcaggcactcccgcaaaaggtgggagagatttgtccattccgagaaccagcatcttgtgtctcctgaggctctggacttcctcgataagctccttcgatatgatcaccagtctagattgaccgctcgagaagctatggagcatccctacttctacaccgtcgtcaaagatcaggcaaggatgggaagcagcagtatgcccggaggctcaacaccagtcagcagtgctaacatgatgagtggaatctcctctgtgccaacaccttccccactcggacccctggccggatctcctgttatcgctgccgcaaaccccctcggaatgcccgtacctgcagcggctggcgcacagcagtag

SEQ ID NO: 322258 - DNA, 1194 bp, Artificial Sequence
  derived and/or modified sequence
atgtccggacctgtcccctcccgagccagagtatacacagatgtgaacacacatagacctagagagtactgggattacgagagccacgtcgtggaatggggcaaccaggatgattaccaattggtgcgcaaacttggccgaggcaagtactcagaagttttcgaagccattaacatcaccaataatgaaaaagttgtagtcaagattctgaaacccgtcaaaaaaaaaaaaatcaagcgcgagattaagatactggagaatctgaggggtgggcctaacatcatcactctggcagatattgtgaaggaccctgtatcccgtacccctgccctggtgtttgagcatgttaataacacagacttcaagcagctataccaaacacttaccgattacgacatccgcttttacatgtatgagatactgaaggccctggattactgccactcaatggggatcatgcatagagacgtgaaaccccataacgtcatgattgatcatgaacatagaaagttgaggctgatcgactggggacttgctgagttttatcatcctgggcaagagtacaacgtgcgcgtggccagtcgctattttaagggacctgaattgttagtcgattaccaaatgtatgactacagcttggacatgtggagcttggggtgtatgttagcatctatgattttccgaaaagagcctttcttccacggccatgataattacgatcagcttgtccgtattgctaaagtgcttgggaccgaggatttgtatgattacattgacaaatataatatcgagctggatcctagattcaacgacattctgggcaggcactcacgaaagcggtgggaaagattcgtacatagtgagaatcagcaccttgtctcccccgaggcattggatttcctcgacaagcttttaagatatgaccaccagagcaggctgacggctagagaggctatggagcacccgtacttctataccgtggttaaggatcaagccagaatgggatcatcctcaatgcccggtggcagcaccccagtgtccagtgccaatatgatgtccggaatctcttccgtgcccaccccatcccctctgggaccccttgctggcagccctgtcatcgcagccgctaacccactcgggtgcttgttccagctccccctgaggtccgcagtcaccgccctgtcagtttcctag

SEQ ID NO: 322259 - DNA, 1158 bp, Artificial Sequence
  derived and/or modified sequence
atgagcggcccagttccatctcgcgctagggtctacactgatgtgaatacacaccgcccaagggagtactgggactatgaatcacacgtcgtcgaatggggaaaccaggatgactatcagctggtcagaaaactcggcaggggtaagtacagcgaagtcttcgaggcaatcaacatcaccaataacgaaaaagttgtggtcaagatactgaagcccgtgaaaaagaagaagatcaagagggaaatcaaaattctcgagaatcttcgaggagggcctaatatcattacgctcgccgacatagtcaaagacccagtctcaaggacaccagccctggtgttcgagcatgtgaacaacacagacttcaaacagttataccaaactcttacggactacgacatccgcttttacatgtatgaaatattgaaagctttggattactgccacagtatggggataatgcaccgggacgtcaagccccacaatgtaatgattgatcatgaacataggaagctgcggcttattgattggggtctcgccgaattctatcaccccggtcaggaatacaacgtaagagttgcctcaagatactttaaaggccctgaactgttagtggattaccagatgtatgactacagcctggacatgtggagtctggggtgcatgctggcaagcatgatattcaggaaggagcccttcttccacggtcatgataattacgaccagctcgttagaattgctaaggtcctgggaacagaggacctgtacgactatatagataagtacaacattgagctagatcccagatttaacgacattctcggccgtcacagcagaaagagatgggagaggttcgtccactcagaaaatcaacaccttgtcagtcccgaagcattggatttccttgataagctgctgcgatacgaccatcaaagtcgtctaactgccagagaggcgatggaacacccatacttttacacagtcgtgaaggatcaagcaaggatggggtcaagttctatgccgggaggatcaacaccagtgtcatcagccaatatgatgtctgagatgaaattctgcagggtcgcacaagccggactagagcttctctcctcaactgtgtaccctccctggccacctaaggtactgcggttggaagcctag

SEQ ID NO: 322260 - DNA, 4416 bp, Artificial Sequence
  derived and/or modified sequence
gggggtttccgcttccggcagcagcggctgcagcctcgctctggtccctgcggctggcggccgagccgtgtgtctcctcctccatcgccgccatattgtctgtgtgagcagaggggagagcggccgccgccgctgccgcttccaccacagctctatcaaggcttgtcaagcagtgtgctcatcacatggtaaatcatgcagcgtggaacctcataaaatctccaagaaacatcattcacccatactgactagtttcacatctctttgtttgaagaaaacaggtctgaaacaaggtcttacccccagctgcttctgaacacagtgactgccagatctccaaacatcaagtccagctttgtccgccaacctgtctgacatgtcgggacccgtgccaagcagggccagagtttacacagatgttaatacacacagacctcgagaatactgggattacgagtcacatgtggtggaatggggaaatcaagatgactaccagctggttcgaaaattaggccgaggtaaatacagtgaagtatttgaagccatcaacatcacaaataatgaaaaagttgttgttaaaattctcaagccagtaaaaaagaagaaaattaagcgtgaaataaagattttggagaatttgagaggaggtcccaacatcatcacactggcagacattgtaaaagaccctgtgtcacgaacccccgccttggtttttgaacacgtaaacaacacagacttcaagcaattgtaccagacgttaacagactatgatattcgattttacatgtatgagattctgaaggccctggattattgtcacagcatgggaattatgcacagagatgtcaagccccataatgtcatgattgatcatgagcacagaaagctacgactaatagactggggtttggctgagttttatcatcctggccaagaatataatgtccgagttgcttcccgatacttcaaaggtcctgagctacttgtagactatcagatgtacgattatagtttggatatgtggagtttgggttgtatgctggcaagtatgatctttcggaaggagccatttttccatggacatgacaattatgatcagttggtgaggatagccaaggttctggggacagaagatttatatgactatattgacaaatacaacattgaattagatccacgtttcaatgatatcttgggcagacactctcgaaagcgatgggaacgctttgtccacagtgaaaatcagcaccttgtcagccctgaggccttggatttcctggacaaactgctgcgatatgaccaccagtcacggcttactgcaagagaggcaatggagcacccctatttctacactgttgtgaaggaccaggctcgaatgggttcatctagcatgccagggggcagtacgcccgtcagcagcgccaatatgatgtcagggatttcttcagtgccaaccccttcaccccttggacctctggcaggctcaccagtgattgctgctgccaacccccttgggatgcctgttccagctgccgctggcgctcagcagtaacggccctatctgtctcctgatgcctgagcagaggtgggggagtccaccctctccttgatgcagcttgcgcctggcggggaggggtgaaacacttcagaagcaccgtgtctgaaccgttgcttgtggatttatagtagttcagtcataaaaaaaaaattataataggctgattttcttttttctttttttttttaactcgaacttttcataactcaggggattccctgaaaaattacctgcaggtggaatatttcatggacaaatttttttttctcccctcccaaatttagttcctcatcacaaaagaacaaagataaaccagcctcaatcccggctgctgcatttaggtggagacttcttcccattcccaccattgttcctccaccgtcccacactttagggggttggtatctcgtgctcttctccagagattacaaaaatgtagcttctcaggggaggcaggaagaaaggaaggaaggaaagaaggaagggaggacccaatctataggagcagtggactgcttgctggtcgcttacatcactttactccataagcgcttcagtggggttatcctagtggctcttgtggaagtgtgtcttagttacatcaagatgttgaaaatctacccaaaatgcagacagatactaaaaacttctgttcagtaagaatcatgtcttactgatctaaccctaaatccaactcatttatacttttatttttagttcagtttaaaatgttgataccttccctcccaggctccttaccttggtcttttccctgttcatctcccaacatgctgtgctccatagctggtaggagagggaaggcaaaatctttcttagttttctttgtcttggccattttgaattcatttagttactgggcataacttactgctttttacaaaagaaacaaacattgtctgtacaggtttcatgctagagctaatgggagatgtggccacactgacttccattttaagctttctaccttcttttcctccgaccgtccccttccctcacatgccatccagtgagaagacctgctcctcagtcttgtaaatgtatcttgagaggtaggagcagagccactatctccattgaagctgaaatggtagacctgtaattgtgggaaaactataaactctcttgttacagccccgccaccccttgctgtgtgtatatatataatactttgtccttcatatgtgaaagatccagtgttggaattctttggtgtaaataaacgtttggttttatttatcaaggttagatttaagttccctgtgtaaaggtcttgctgggtgggtgtctcatgttcacatctgaggggcctgcagccctgtaccgtggaggcttcccaaggcccccattttatacacccctcgttcgacccatggtaccgggcagagcagagaggccttaaaaaaaaagcaccacaagccaaagcgtctctggggattaaggatcctttgccataaaactcattttgtgtctcagcagtgcagggattggggatggaaaaagtcgccagtttttgtgtgtttgtgtgtgtgtgtaaagtggactttccactgtaatccaaccacctaagtttatcaggtgcttcactgaggaagcctagttttttaagcacaatagcaaaaccatcagctctgtattttctcctgttatttcattacagtagctgcttgtgggaactaggaaaaattcttccaacatattttaaggcctaaaatcttagttccccattctcctaccttatagattcacaggcctttctcgcctaggcatcatagataaacgtaattgtttggggagttgaatttaatgaacttatctaactttgtaacccatcttggctttagtaactttatcaaggtggtggctttagtgaatataatggtaaactttagaggacgctaaagcctccttttatagcgcttctcaacggtagggagagctgaagggaaaacattctgactgtgtggcagggtgattttcttccttatgaccacttacagtggatatttattgtacttgacccttttatgccctagaatgctgtgagggttaccatgttgaatttgtgcagaagctaaaagcaccagatgtgccagagatgcaatttgtgattatgtttgcactggattgtgatttgaacaggacacttataactaatgagttctttcttttgaggtggggagagggttgtaaatcaagacttcataccctatccttgtagctcggaaattgaggtgtagcttaggctgatgcggagagctgcagacagctggacctccttacacccatcagaccttggaataaaccgaaggtgaatgcagaggactctgaggtgccacccaagagccttttaaaataaatagaagtttttaaaaatgctacttaagagtcactgcagaagcatggagagagagaaaaaaaaaaaagacccaattgggtggggggtgggggggaggcaagggtttacagagtaacaacttacgtgttgttgtaaattacctcatctgtataccttgtattgggacactatttctcagcactacctgtgtctgcattgcttagatggcaggaaatggaatggccaacatgaaaggttatgttggcaattactctgaaagattttttaaagtatttttaaactttgtttgaagtggtccctcccctcttcctctgcttttttttaagtttgaagccagaaggccctccccaccttgctttattggttgtaattgtattgtaattggtatgactaaaccataactgtgctgggaagaagttgtgccatgaaggtctttaattttttttaataaaaacatttaaataaatgaaatgtccctgca

SEQ ID NO: 322261 - DNA, 4299 bp, Artificial Sequence
  derived and/or modified sequence
gggggtttccgcttccggcagcagcggctgcagcctcgctctggtccctgcggctggcggccgagccgtgtgtctcctcctccatcgccgccatattgtctgtgtgagcagaggggagagcggccgccgccgctgccgcttccaccacagtttgaagaaaacaggtctgaaacaaggtcttacccccagctgcttctgaacacagtgactgccagatctccaaacatcaagtccagctttgtccgccaacctgtctgacatgtcgggacccgtgccaagcagggccagagtttacacagatgttaatacacacagacctcgagaatactgggattacgagtcacatgtggtggaatggggaaatcaagatgactaccagctggttcgaaaattaggccgaggtaaatacagtgaagtatttgaagccatcaacatcacaaataatgaaaaagttgttgttaaaattctcaagccagtaaaaaagaagaaaattaagcgtgaaataaagattttggagaatttgagaggaggtcccaacatcatcacactggcagacattgtaaaagaccctgtgtcacgaacccccgccttggtttttgaacacgtaaacaacacagacttcaagcaattgtaccagacgttaacagactatgatattcgattttacatgtatgagattctgaaggccctggattattgtcacagcatgggaattatgcacagagatgtcaagccccataatgtcatgattgatcatgagcacagaaagctacgactaatagactggggtttggctgagttttatcatcctggccaagaatataatgtccgagttgcttcccgatacttcaaaggtcctgagctacttgtagactatcagatgtacgattatagtttggatatgtggagtttgggttgtatgctggcaagtatgatctttcggaaggagccatttttccatggacatgacaattatgatcagttggtgaggatagccaaggttctggggacagaagatttatatgactatattgacaaatacaacattgaattagatccacgtttcaatgatatcttgggcagacactctcgaaagcgatgggaacgctttgtccacagtgaaaatcagcaccttgtcagccctgaggccttggatttcctggacaaactgctgcgatatgaccaccagtcacggcttactgcaagagaggcaatggagcacccctatttctacactgttgtgaaggaccaggctcgaatgggttcatctagcatgccagggggcagtacgcccgtcagcagcgccaatatgatgtcagggatttcttcagtgccaaccccttcaccccttggacctctggcaggctcaccagtgattgctgctgccaacccccttgggatgcctgttccagctgccgctggcgctcagcagtaacggccctatctgtctcctgatgcctgagcagaggtgggggagtccaccctctccttgatgcagcttgcgcctggcggggaggggtgaaacacttcagaagcaccgtgtctgaaccgttgcttgtggatttatagtagttcagtcataaaaaaaaaattataataggctgattttcttttttctttttttttttaactcgaacttttcataactcaggggattccctgaaaaattacctgcaggtggaatatttcatggacaaatttttttttctcccctcccaaatttagttcctcatcacaaaagaacaaagataaaccagcctcaatcccggctgctgcatttaggtggagacttcttcccattcccaccattgttcctccaccgtcccacactttagggggttggtatctcgtgctcttctccagagattacaaaaatgtagcttctcaggggaggcaggaagaaaggaaggaaggaaagaaggaagggaggacccaatctataggagcagtggactgcttgctggtcgcttacatcactttactccataagcgcttcagtggggttatcctagtggctcttgtggaagtgtgtcttagttacatcaagatgttgaaaatctacccaaaatgcagacagatactaaaaacttctgttcagtaagaatcatgtcttactgatctaaccctaaatccaactcatttatacttttatttttagttcagtttaaaatgttgataccttccctcccaggctccttaccttggtcttttccctgttcatctcccaacatgctgtgctccatagctggtaggagagggaaggcaaaatctttcttagttttctttgtcttggccattttgaattcatttagttactgggcataacttactgctttttacaaaagaaacaaacattgtctgtacaggtttcatgctagagctaatgggagatgtggccacactgacttccattttaagctttctaccttcttttcctccgaccgtccccttccctcacatgccatccagtgagaagacctgctcctcagtcttgtaaatgtatcttgagaggtaggagcagagccactatctccattgaagctgaaatggtagacctgtaattgtgggaaaactataaactctcttgttacagccccgccaccccttgctgtgtgtatatatataatactttgtccttcatatgtgaaagatccagtgttggaattctttggtgtaaataaacgtttggttttatttatcaaggttagatttaagttccctgtgtaaaggtcttgctgggtgggtgtctcatgttcacatctgaggggcctgcagccctgtaccgtggaggcttcccaaggcccccattttatacacccctcgttcgacccatggtaccgggcagagcagagaggccttaaaaaaaaagcaccacaagccaaagcgtctctggggattaaggatcctttgccataaaactcattttgtgtctcagcagtgcagggattggggatggaaaaagtcgccagtttttgtgtgtttgtgtgtgtgtgtaaagtggactttccactgtaatccaaccacctaagtttatcaggtgcttcactgaggaagcctagttttttaagcacaatagcaaaaccatcagctctgtattttctcctgttatttcattacagtagctgcttgtgggaactaggaaaaattcttccaacatattttaaggcctaaaatcttagttccccattctcctaccttatagattcacaggcctttctcgcctaggcatcatagataaacgtaattgtttggggagttgaatttaatgaacttatctaactttgtaacccatcttggctttagtaactttatcaaggtggtggctttagtgaatataatggtaaactttagaggacgctaaagcctccttttatagcgcttctcaacggtagggagagctgaagggaaaacattctgactgtgtggcagggtgattttcttccttatgaccacttacagtggatatttattgtacttgacccttttatgccctagaatgctgtgagggttaccatgttgaatttgtgcagaagctaaaagcaccagatgtgccagagatgcaatttgtgattatgtttgcactggattgtgatttgaacaggacacttataactaatgagttctttcttttgaggtggggagagggttgtaaatcaagacttcataccctatccttgtagctcggaaattgaggtgtagcttaggctgatgcggagagctgcagacagctggacctccttacacccatcagaccttggaataaaccgaaggtgaatgcagaggactctgaggtgccacccaagagccttttaaaataaatagaagtttttaaaaatgctacttaagagtcactgcagaagcatggagagagagaaaaaaaaaaaagacccaattgggtggggggtgggggggaggcaagggtttacagagtaacaacttacgtgttgttgtaaattacctcatctgtataccttgtattgggacactatttctcagcactacctgtgtctgcattgcttagatggcaggaaatggaatggccaacatgaaaggttatgttggcaattactctgaaagattttttaaagtatttttaaactttgtttgaagtggtccctcccctcttcctctgcttttttttaagtttgaagccagaaggccctccccaccttgctttattggttgtaattgtattgtaattggtatgactaaaccataactgtgctgggaagaagttgtgccatgaaggtctttaattttttttaataaaaacatttaaataaatgaaatgtccctgca

SEQ ID NO: 322262 - DNA, 2606 bp, Artificial Sequence
  derived and/or modified sequence
atattgtctgtgtgagcagaggggagagcggccgccgccgctgccgcttccaccacagtttgaagaaaacaggtctgaaacaaggtcttacccccagctgcttctgaacacagtgactgccagatctccaaacatcaagtccagctttgtccgccaacctgtctgacatgtcgggacccgtgccaagcagggccagagtttacacagatgttaatacacacagacctcgagaatactgggattacgagtcacatgtggtggaatggggaaatcaagatgactaccagctggttcgaaaattaggccgaggtaaatacagtgaagtatttgaagccatcaacatcacaaataatgaaaaagttgttgttaaaattctcaagccagtaaaaaagaagaaaattaagcgtgaaataaagattttggagaatttgagaggaggtcccaacatcatcacactggcagacattgtaaaagaccctgtgtcacgaacccccgccttggtttttgaacacgtaaacaacacagacttcaagcaattgtaccagacgttaacagactatgatattcgattttacatgtatgagattctgaaggccctggattattgtcacagcatgggaattatgcacagagatgtcaagccccataatgtcatgattgatcatgagcacagaaagctacgactaatagactggggtttggctgagttttatcatcctggccaagaatataatgtccgagttgcttcccgatacttcaaaggtcctgagctacttgtagactatcagatgtacgattatagtttggatatgtggagtttgggttgtatgctggcaagtatgatctttcggaaggagccatttttccatggacatgacaattatgatcagttggtgaggatagccaaggttctggggacagaagatttatatgactatattgacaaatacaacattgaattagatccacgtttcaatgatatcttgggcagacactctcgaaagcgatgggaacgctttgtccacagtgaaaatcagcaccttgtcagccctgaggccttggatttcctggacaaactgctgcgatatgaccaccagtcacggcttactgcaagagaggcaatggagcacccctatttctacactgttgtgaaggaccaggctcgaatgggttcatctagcatgccagggggcagtacgcccgtcagcagcgccaatatgatgtcagggatttcttcagtgccaaccccttcaccccttggacctctggcaggctcaccagtgattgctgctgccaacccccttggatgcctgttccagctgccgctgcgctcagcagtaacggccctatctgtctcctgatgcctgagcagaggtgggggagtccaccctctccttgatgcagcttgcgcctggcggggaggggtgaaacacttcagaagcaccgtgtctgaaccgttgcttgtggatttatagtagttcagtcataaaaaaaaaattataataggctgattttcttttttctttttttttttaactcgaacttttcataactcaggggattccctgaaaaattacctgcaggtggaatatttcatggacaaatttttttttctcccctcccaaatttagttcctcatcacaaaagaacaaagataaaccagcctcaatcccggctgctgcatttaggtggagacttcttcccattcccaccattgttcctccaccgtcccacactttagggggttggtatctcgtgctcttctccagagattacaaaaatgtagcttctcaggggaggcaggaagaaaggaaggaaggaaagaaggaagggaggacccaatctataggagcagtggactgcttgctggtcgcttacatcactttactccataagcgcttcagtggggttatcctagtggctcttgtggaagtgtgtcttagttacatcaagatgttgaaaatctacccaaaatgcagacagatactaaaaacttctgttcagtaagaatcatgtcttactgatctaaccctaaatccaactcatttatacttttatttttagttcagtttaaaatgttgataccttccctcccaggctccttaccttggtcttttccctgttcatctcccaacatgctgtgctccatagctggtaggagagggaaggcaaaatctttcttagttttctttgtcttggccattttgaattcatttagttactgggcataacttactgctttttacaaaagaaacaaacattgtctgtacaggtttcatgctagagctaatgggagatgtggccacactgacttccattttaagctttctaccttcttttcctccgaccgtccccttccctcacatgccatccagtgagaagacctgctcctcagtcttgtaaatgtatcttgagaggtaggagcagagccactatctccattgaagctgaaatggtagacctgtaattgtgggaaaactataaactctcttgttacagccccgccaccccttgctgtgtgtatatatataatactttgtccttcatatgtgaaagatccagtgttggaattctttggtgtaaataaacgtttggttttatttatc

SEQ ID NO: 322263 - DNA, 2507 bp, Artificial Sequence
  derived and/or modified sequence
cccgcctcctggtaggagggggtttccgcttccggcagcagcggctgcagcctcgctctggtccctgcggctggcggccgagccgtgtgtctcctcctccatcgccgccatattgtctgtgtgagcagaggggagagcggccgccgccgctgccgcttccaccacagaaatcaagatgactaccagctggttcgaaaattaggccgaggtaaatacagtgaagtatttgaagccatcaacatcacaaataatgaaaaagttgttgttaaaattctcaagccagtaaaaaagaagaaaattaagcgtgaaataaagattttggagaatttgagaggaggtcccaacatcatcacactggcagacattgtaaaagaccctgtgtcacgaacccccgccttggtttttgaacacgtaaacaacacagacttcaagcaattgtaccagacgttaacagactatgatattcgattttacatgtatgagattctgaaggccctggattattgtcacagcatgggaattatgcacagagatgtcaagccccataatgtcatgattgatcatgagcacagaaagctacgactaatagactggggtttggctgagttttatcatcctggccaagaatataatgtccgagttgcttcccgatacttcaaaggtcctgagctacttgtagactatcagatgtacgattatagtttggatatgtggagtttgggttgtatgctggcaagtatgatctttcggaaggagccatttttccatggacatgacaattatgatcagttggtgaggatagccaaggttctggggacagaagatttatatgactatattgacaaatacaacattgaattagatccacgtttcaatgatatcttgggcagacactctcgaaagcgatgggaacgctttgtccacagtgaaaatcagcaccttgtcagccctgaggccttggatttcctggacaaactgctgcgatatgaccaccagtcacggcttactgcaagagaggcaatggagcacccctatttctacactgttgtgaaggaccaggctcgaatgggttcatctagcatgccagggggcagtacgcccgtcagcagcgccaatatgatgtcagggatttcttcagtgccaaccccttcaccccttggacctctggcaggctcaccagtgattgctgctgccaacccccttgggatgcctgttccagctgccgctggcgctcagcagtaacggccctatctgtctcctgatgcctgagcagaggtgggggagtccaccctctccttgatgcagcttgcgcctggcggggaggggtgaaacacttcagaagcaccgtgtctgaaccgttgcttgtggatttatagtagttcagtcataaaaaaaaaattataataggctgattttcttttttctttttttttttaactcgaacttttcataactcaggggattccctgaaaaattacctgcaggtggaatatttcatggacaaatttttttttctcccctcccaaatttagttcctcatcacaaaagaacaaagataaaccagcctcaatcccggctgctgcatttaggtggagacttcttcccattcccaccattgttcctccaccgtcccacactttagggggttggtatctcgtgctcttctccagagattacaaaaatgtagcttctcaggggaggcaggaagaaaggaaggaaggaaagaaggaagggaggacccaatctataggagcagtggactgcttgctggtcgcttacatcactttactccataagcgcttcagtggggttatcctagtggctcttgtggaagtgtgtcttagttacatcaagatgttgaaaatctacccaaaatgcagacagatactaaaaacttctgttcagtaagaatcatgtcttactgatctaaccctaaatccaactcatttatacttttatttttagttcagtttaaaatgttgataccttccctcccaggctccttaccttggtcttttccctgttcatctcccaacatgctgtgctccatagctggtaggagagggaaggcaaaatctttcttagttttctttgtcttggccattttgaattcatttagttactgggcataacttactgctttttacaaaagaaacaaacattgtctgtacaggtttcatgctagagctaatgggagatgtggccacactgacttccattttaagctttctaccttcttttcctccgaccgtccccttccctcacatgccatccagtgagaagacctgctcctcagtcttgtaaatgtatcttgagaggtaggagcagagccactatctccattgaagctgaaatggtagacctgtaattgtgggaaaactataaactctcttgttacagccccgccaccccttgctgtgtgtatatatataatactttgtccttcatatgtgaaagatccagtgttggaattctttggtgtaaataaacgtttggttttatttatc

SEQ ID NO: 322264 - DNA, 1483 bp, Artificial Sequence
  derived and/or modified sequence
gccgccgctgccgcttccaccacagtttgaagaaaacaggtctgaaacaaggtcttacccccagctgcttctgaacacagtgactgccagatctccaaacatcaagtccagctttgtccgccaacctgtctgacatgtcgggacccgtgccaagcagggccagagtttacacagatgttaatacacacagacctcgagaatactgggattacgagtcacatgtggtggaatggggaaatcaagatgactaccagctggttcgaaaattaggccgaggtaaatacagtgaagtatttgaagccatcaacatcacaaataatgaaaaagttgttgttaaaattctcaagccagtaaaaaagaagaaaattaagcgtgaaataaagattttggagaatttgagaggaggtcccaacatcatcacactggcagacattgtaaaagaccctgtgtcacgaacccccgccttggtttttgaacacgtaaacaacacagacttcaagcaattgtaccagacgttaacagactatgatattcgattttacatgtatgagattctgaaggccctggattattgtcacagcatgggaattatgcacagagatgtcaagccccataatgtcatgattgatcatgagcacagaaagctacgactaatagactggggtttggctgagttttatcatcctggccaagaatataatgtccgagttgcttcccgatacttcaaaggtcctgagctacttgtagactatcagatgtacgattatagtttggatatgtggagtttgggttgtatgctggcaagtatgatctttcggaaggagccatttttccatggacatgacaattatgatcagttggtgaggatagccaaggttctggggacagaagatttatatgactatattgacaaatacaacattgaattagatccacgtttcaatgatatcttgggcagacactctcgaaagcgatgggaacgctttgtccacagtgaaaatcagcaccttgtcagccctgaggccttggatttcctggacaaactgctgcgatatgaccaccagtcacggcttactgcaagagaggcaatggagcacccctatttctacactgttgtgaaggaccaggctcgaatgggttcatctagcatgccagggggcagtacgcccgtcagcagcgccaatatgatgtcagagatgaagttttgccgtgttgcccaggctggtcttgaactcctgagctcaacagtctacccgccttggcctcccaaagtgctgagattagaggcatgagccaccacacctggcccactagggattcttattggcctcaatgtgagaagcccttccccaggtacctccagatggaagcttacaggatggtcagtccatttcttagagaagttcctggggggattgagtatttctgagtcagcttcactcttgcatcatctgctttgacagttttcttggctcctgtaatg

SEQ ID NO: 322265 - DNA, 1176 bp, Artificial Sequence
  derived and/or modified sequence
atgagcggccccgtgcccagcagagccagagtgtacaccgacgtgaacacccacagacccagagagtactgggactacgagagccacgtggtggagtggggcaaccaggacgactaccagctggtgagaaagctgggcagaggcaagtacagcgaggtgttcgaggccatcaacatcaccaacaacgagaaggtggtggtgaagatcctgaagcccgtgaagaagaagaagatcaagagagagatcaagatcctggagaacctgagaggcggccccaacatcatcaccctggccgacatcgtgaaggaccccgtgagcagaacccccgccctggtgttcgagcacgtgaacaacaccgacttcaagcagctgtaccagaccctgaccgactacgacatcagattctacatgtacgagatcctgaaggccctggactactgccacagcatgggcatcatgcacagagacgtgaagccccacaacgtgatgatcgaccacgagcacagaaagctgagactgatcgactggggcctggccgagttctaccaccccggccaggagtacaacgtgagagtggccagcagatacttcaagggccccgagctgctggtggactaccagatgtacgactacagcctggacatgtggagcctgggctgcatgctggccagcatgatcttcagaaaggagcccttcttccacggccacgacaactacgaccagctggtgagaatcgccaaggtgctgggcaccgaggacctgtacgactacatcgacaagtacaacatcgagctggaccccagattcaacgacatcctgggcagacacagcagaaagagatgggagagattcgtgcacagcgagaaccagcacctggtgagccccgaggccctggacttcctggacaagctgctgagatacgaccaccagagcagactgaccgccagagaggccatggagcacccctacttctacaccgtggtgaaggaccaggccagaatgggcagcagcagcatgcccggcggcagcacccccgtgagcagcgccaacatgatgagcggcatcagcagcgtgcccacccccagccccctgggccccctggccggcagccccgtgatcgccgccgccaaccccctgggcatgcccgtgcccgccgccgccggcgcccagcagtag

SEQ ID NO: 322266 - DNA, 1194 bp, Artificial Sequence
  derived and/or modified sequence
atgagcggccccgtgcccagcagagccagagtgtacaccgacgtgaacacccacagacccagagagtactgggactacgagagccacgtggtggagtggggcaaccaggacgactaccagctggtgagaaagctgggcagaggcaagtacagcgaggtgttcgaggccatcaacatcaccaacaacgagaaggtggtggtgaagatcctgaagcccgtgaagaagaagaagatcaagagagagatcaagatcctggagaacctgagaggcggccccaacatcatcaccctggccgacatcgtgaaggaccccgtgagcagaacccccgccctggtgttcgagcacgtgaacaacaccgacttcaagcagctgtaccagaccctgaccgactacgacatcagattctacatgtacgagatcctgaaggccctggactactgccacagcatgggcatcatgcacagagacgtgaagccccacaacgtgatgatcgaccacgagcacagaaagctgagactgatcgactggggcctggccgagttctaccaccccggccaggagtacaacgtgagagtggccagcagatacttcaagggccccgagctgctggtggactaccagatgtacgactacagcctggacatgtggagcctgggctgcatgctggccagcatgatcttcagaaaggagcccttcttccacggccacgacaactacgaccagctggtgagaatcgccaaggtgctgggcaccgaggacctgtacgactacatcgacaagtacaacatcgagctggaccccagattcaacgacatcctgggcagacacagcagaaagagatgggagagattcgtgcacagcgagaaccagcacctggtgagccccgaggccctggacttcctggacaagctgctgagatacgaccaccagagcagactgaccgccagagaggccatggagcacccctacttctacaccgtggtgaaggaccaggccagaatgggcagcagcagcatgcccggcggcagcacccccgtgagcagcgccaacatgatgagcggcatcagcagcgtgcccacccccagccccctgggccccctggccggcagccccgtgatcgccgccgccaaccccctgggctgcctgttccagctgcccctgagaagcgccgtgaccgccctgagcgtgagctag

SEQ ID NO: 322267 - DNA, 1158 bp, Artificial Sequence
  derived and/or modified sequence
atgagcggccccgtgcccagcagagccagagtgtacaccgacgtgaacacccacagacccagagagtactgggactacgagagccacgtggtggagtggggcaaccaggacgactaccagctggtgagaaagctgggcagaggcaagtacagcgaggtgttcgaggccatcaacatcaccaacaacgagaaggtggtggtgaagatcctgaagcccgtgaagaagaagaagatcaagagagagatcaagatcctggagaacctgagaggcggccccaacatcatcaccctggccgacatcgtgaaggaccccgtgagcagaacccccgccctggtgttcgagcacgtgaacaacaccgacttcaagcagctgtaccagaccctgaccgactacgacatcagattctacatgtacgagatcctgaaggccctggactactgccacagcatgggcatcatgcacagagacgtgaagccccacaacgtgatgatcgaccacgagcacagaaagctgagactgatcgactggggcctggccgagttctaccaccccggccaggagtacaacgtgagagtggccagcagatacttcaagggccccgagctgctggtggactaccagatgtacgactacagcctggacatgtggagcctgggctgcatgctggccagcatgatcttcagaaaggagcccttcttccacggccacgacaactacgaccagctggtgagaatcgccaaggtgctgggcaccgaggacctgtacgactacatcgacaagtacaacatcgagctggaccccagattcaacgacatcctgggcagacacagcagaaagagatgggagagattcgtgcacagcgagaaccagcacctggtgagccccgaggccctggacttcctggacaagctgctgagatacgaccaccagagcagactgaccgccagagaggccatggagcacccctacttctacaccgtggtgaaggaccaggccagaatgggcagcagcagcatgcccggcggcagcacccccgtgagcagcgccaacatgatgagcgagatgaagttctgcagagtggcccaggccggcctggagctgctgagcagcaccgtgtaccccccctggccccccaaggtgctgagactggaggcctag

SEQ ID NO: 322268 - DNA, 1176 bp, Artificial Sequence
  derived and/or modified sequence
atgtcaggtcctgtccccagccgagcgagggtttatacggatgtcaacacccatcgccctcgtgaatactgggattatgagtcccatgtggttgagtggggcaaccaggacgattatcagctggtccggaaactgggcaggggaaaatactctgaagtattcgaagctatcaacatcacgaacaacgagaaggtggtggtcaagatactcaagcccgtgaagaaaaagaaaatcaaacgtgagatcaagatactcgaaaatcttcgggggggacccaacatcatcaccctcgctgacatcgtgaaagaccctgtttcccgcaccccagccctggtgtttgagcatgtcaataataccgattttaaacaactgtaccaaactctcaccgactatgacatccggttctacatgtatgaaattctgaaggcactggattattgccacagcatgggaatcatgcatagagacgtcaagccgcacaatgtaatgatcgatcatgagcacagaaagttaaggttgatcgattggggtttagccgagttttaccaccccggtcaggagtacaacgtgagggtggctagccggtacttcaaaggaccagagctcctggtggactaccagatgtatgactatagcctggatatgtggtcactcggctgcatgttagcctctatgatctttagaaaagagccctttttccacgggcatgataattatgatcagctggtgcgaattgctaaagtgctgggaactgaagatctatatgattatatcgacaagtacaatattgagctggaccctaggtttaatgacattctgggaaggcactcgaggaagaggtgggaacgctttgtccacagtgagaaccagcatctggtttctccggaggcactagattttctcgacaaacttttacggtacgatcatcagtctcggctaacagccagagaggctatggagcacccctacttttataccgtcgtgaaagatcaggctagaatggggtcttcaagcatgcctggaggctctactcccgtgagcagcgccaatatgatgagtggaatcagctccgtgcctacccctagtccattgggcccactggccggatccccagtgatcgccgcagcgaatccactggggatgccagtacccgccgcagcaggcgctcaacagtag

SEQ ID NO: 322269 - DNA, 1176 bp, Artificial Sequence
  derived and/or modified sequence
atgagcggccccgtgcccagccgggcccgggtgtacaccgacgtgaatacccaccgccctcgcgagtactgggactacgagagccatgtggtggagtggggaaatcaagatgattaccagcttgttagaaaactgggaaggggtaagtattctgaggtattcgaggcgataaatattaccaacaatgaaaaggtcgtggtgaagatcctcaagccagtaaagaaaaaaaaaatcaagcgagagattaaaattctcgagaatctgagggggggcccaaatatcatcacactggctgatatcgtcaaggatccggtgagtcggacaccagcattagtcttcgagcacgtcaacaataccgactttaagcagctttaccaaacgctcaccgattatgacataaggttctatatgtatgagatcctgaaagcactggactattgccactcgatggggattatgcatagagatgtgaaacctcataatgttatgattgaccacgagcacagaaagctcaggctaatcgattggggtttggcagagttctatcacccaggccaagagtataatgtgcgagtagcctcacgctacttcaaggggccagaattgctggttgattatcagatgtatgattacagtttggacatgtggagcctgggatgtatgttggctagcatgattttcagaaaggagcctttttttcatggacacgacaattacgaccagctggtacggattgcaaaggtcctgggaactgaagatctctacgactacatcgacaaatataacatagaactggaccctaggtttaacgacatccttggtaggcactccagaaaaaggtgggagagatttgtccatagtgagaaccagcacctggtcagtcccgaagctctggacttcctggacaaactgctgaggtacgaccaccaaagcaggctgaccgccagagaggcaatggagcatccctatttttacaccgtggtgaaggaccaggctcggatgggttcttcttctatgccaggtggaagtacccctgtgtccagcgccaatatgatgtctggaatctcctccgtacctacaccgagtccactgggcccactggccgggtcccctgtaattgccgcagccaacccattgggaatgcctgttcctgctgctgctggggcccagcagtag

SEQ ID NO: 322270 - DNA, 1176 bp, Artificial Sequence
  derived and/or modified sequence
atgtctggtcccgtgccctcccgggctagggtgtatacagatgtcaatacccacagaccacgtgagtactgggactatgagtcccatgtagtagagtggggcaatcaggacgattatcagcttgtcaggaaactggggcgaggcaaatacagtgaggtctttgaggccataaatatcaccaacaacgaaaaagtggtggtcaagatcttgaagcctgtgaaaaaaaagaaaatcaaacgggaaatcaagatcttagaaaacctaaggggtggtccaaacatcattacgttggccgatattgtaaaggatccggtctctagaacccctgcactggttttcgaacatgtaaataatacagattttaagcagctgtaccaaacccttaccgactacgatattcggttctatatgtacgaaatattgaaagccctggactattgtcatagcatgggtataatgcatagagatgtcaagccacacaacgttatgatagaccacgaacataggaaacttcggcttatcgattggggattagccgagttttaccatcctggtcaggagtacaacgtccgcgtcgcatcccgctacttcaaaggtccagaactgctggtggattaccagatgtatgattattcgttggatatgtggtccttgggctgtatgctagcatctatgattttccgtaaagaacctttttttcatggccacgacaactatgatcagcttgtgaggattgctaaagtgctcggaactgaagacctgtacgactacatcgacaagtacaatatcgagcttgaccccagatttaatgatattttgggtagacattctagaaagaggtgggagcgatttgtgcattcggaaaatcaacatctggtatctcctgaagccctggacttcctcgataaactgctgcgttatgaccaccagtccagactgaccgcccgagaggccatggaacatccatacttctatacagtggtaaaagaccaagcccgtatgggttctagcagcatgccaggtggctcaacacctgtttctagcgcgaacatgatgagtgggatctcctccgtcccaacaccatcccccttagggccactagcaggctcccccgtaattgcggcagccaatccactcggcatgccagtgccagcagctgcaggcgctcagcagtag

SEQ ID NO: 322271 - DNA, 768 bp, Artificial Sequence
  derived and/or modified sequence
atgtatgagatcctcaaggcactggattattgtcacagcatggggattatgcaccgagacgtgaaaccccataatgtcatgatagatcacgagcacaggaagctgcgcctcattgactggggcttggccgagttctatcaccccggccaggagtacaacgtcagagttgccagccgatatttcaaagggccggagctgcttgtggattaccagatgtatgactactccctggatatgtggtccctgggttgtatgctggcttccatgatctttcgcaaggagccattctttcatgggcacgataattatgaccagctggtccgcatcgccaaagtactgggaactgaggatctgtacgattacatcgacaagtataacattgagcttgatcctaggtttaacgacatcctgggacgccactcgaggaaacgatgggagcgcttcgtgcactccgagaatcaacacctggtatctccagaagctctggactttctggacaaactgcttagatacgaccaccagagtcgtctcacagcccgtgaggctatggaacacccatacttctataccgtcgtgaaggatcaggcacggatgggctcatcgtcaatgccgggagggtcaacaccagtttcttcagcaaacatgatgtccggtatttcatccgttcctactccatccccattggggccattggctgggagccctgttatcgccgccgcaaatcccctcggaatgccagtccccgcagcagccggagcccagcagtag

SEQ ID NO: 322272 - DNA, 768 bp, Artificial Sequence
  derived and/or modified sequence
atgtatgagatcctgaaggccctggactactgccacagcatgggcatcatgcacagagatgtgaagccccacaacgtgatgattgaccacgagcacaggaagctgcggctgattgactggggcctggccgagttctaccaccctggccaggagtacaacgtgcgggtggccagccgctacttcaagggccctgagctgctggtggactaccagatgtatgactacagcctggacatgtggagcctgggctgcatgctggcctccatgatcttcaggaaggagcccttcttccacggccatgacaactatgaccagctggtgagaattgccaaggtgctgggcacagaggacctgtatgactacatcgacaagtacaacatcgagctggacccccgcttcaatgacatcctgggccgccacagcaggaagcgctgggagagatttgtgcacagcgagaaccagcacctggtgtccccagaggccctggacttcctggacaagctgctgcgctatgaccaccagagccggctgacagcccgggaggccatggagcacccctacttctacacagtggtgaaggaccaggccaggatgggcagcagctccatgcctgggggcagcacccctgtgagcagcgccaacatgatgagcggcatcagctctgtgcccacccccagccccctgggccccctggccggcagccctgtgattgctgctgccaaccccctgggcatgcctgtgcctgctgctgctggggcccagcagtag

SEQ ID NO: 322273 - DNA, 768 bp, Artificial Sequence
  derived and/or modified sequence
atgtacgagatcctgaaggccctggactactgccacagcatgggcattatgcacagagatgtcaagcctcacaacgttatgattgaccacgagcacagaaaattgcgactcatcgattggggcctggccgaattctatcatcccggccaggagtataacgtccgcgtggcaagccggtactttaagggccccgagctgctagtggactaccagatgtacgactactccctcgacatgtggagcttgggctgcatgctggctagtatgatctttagaaaggagccttttttccacggtcacgacaattatgaccagctagtgagaatcgcaaaagtactggggacagaagatttgtatgattatattgataaatacaatatcgaattagatccaagatttaatgacatcctgggccgccatagtaggaaaagatgggagcgcttcgtgcactctgagaatcagcatctcgtgagccctgaagccctcgacttcctggacaagctgctgcgctatgatcaccagtcaaggttaactgcacgcgaagccatggagcacccctacttttatacggtggttaaagaccaggctcgaatgggcagttcttcaatgccgggcggaagtactcctgtgagcagcgcaaacatgatgtctggtatcagtagcgtacccacccccagcccactagggccattagccggttctcctgtcatcgctgccgctaaccccttgggcatgcctgtgccagcagctgcaggcgctcagcagtag

SEQ ID NO: 322274 - DNA, 768 bp, Artificial Sequence
  derived and/or modified sequence
atgtacgagatattgaaggctttggattactgtcactccatgggcattatgcaccgggacgtcaagccacacaacgtcatgattgaccacgaacaccgaaaactacggttgatcgattggggattagccgaattctaccatcccggtcaagagtacaatgtgagggtagcttctaggtacttcaaaggcccagagctgctggttgattatcagatgtacgattactccctggatatgtggtcattgggatgcatgcttgccagcatgatcttccgcaaggagcccttttttcatggacacgataattacgatcagcttgtcagaatcgcaaaagtcctgggaacagaggatctgtacgactatatcgacaagtataatatcgagctcgatcctcggttcaacgacattcttggccgacattcccggaaaaggtgggagcggtttgttcacagcgaaaatcaacacttagtatcccccgaggccttggattttctggataaactgctcaggtacgaccaccagagtcggctgaccgctagagaggctatggaacatccatacttttacaccgtggtaaaagaccaggcaagaatggggtcttcaagtatgccgggtgggagcacaccagtgagctcagcaaacatgatgtctggcatctcgtccgtccctacaccttctcctcttggccctctggccggatctccagtgattgccgcagcaaatccattaggaatgcccgttccagctgctgctggggcacaacagtag

SEQ ID NO: 322275 - DNA, 768 bp, Artificial Sequence
  derived and/or modified sequence
atgtacgagatcctgaaggccctggactactgccacagcatgggcatcatgcacagagacgtgaagccccacaacgtgatgatcgaccacgagcacagaaagctgagactgatcgactggggcctggccgagttctaccaccccggccaggagtacaacgtgagagtggccagcagatacttcaagggccccgagctgctggtggactaccagatgtacgactacagcctggacatgtggagcctgggctgcatgctggccagcatgatcttcagaaaggagcccttcttccacggccacgacaactacgaccagctggtgagaatcgccaaggtgctgggcaccgaggacctgtacgactacatcgacaagtacaacatcgagctggaccccagattcaacgacatcctgggcagacacagcagaaagagatgggagagattcgtgcacagcgagaaccagcacctggtgagccccgaggccctggacttcctggacaagctgctgagatacgaccaccagagcagactgaccgccagagaggccatggagcacccctacttctacaccgtggtgaaggaccaggccagaatgggcagcagcagcatgcccggcggcagcacccccgtgagcagcgccaacatgatgagcggcatcagcagcgtgcccacccccagccccctgggccccctggccggcagccccgtgatcgccgccgccaaccccctgggcatgcccgtgcccgccgccgccggcgcccagcagtag

SEQ ID NO: 322276 - DNA, 1154 bp, Artificial Sequence
  derived and/or modified sequence
ccgcgttccggttgcggatggtgagtgtgtcggggggcttggcggcttttctcctcagttttctggagtgctttggaggagaggactatggcagccagggacgccacttcaggcagcctgtcagaggagagcagtgctttggacctgccatcagcgtgtgacataagagattacgtcctgcagggacccagccaagaagccaacagcgaggctttcagttctttggaattccattcttttccttattcttctgatgtggatccagacaccagtaacttaaatatagaacaaaataactcctggaccgctgagaacttctggcttgaccctgctgtgaaaggccagtcagagaaggaagaggatgatggccttcggaaatccctggatagattctatgaaatgtttggtcatccacagccaggctctgcaaactcactctctgcatctgtctgcaagtgcctgtctcagaaaatcactcaactaagaggccaggagagccaaaagtatgccctccgcagttttcaaatggcccgggtgatcttcaaccgggacggctgctccgtcttacagaggcattccagggacacccacttctacccactggaggaaggaagtacatctttggatgatgaaaagccaaacccaggactgtcaaaggatattactcatttcctcttgcagcagaatgtaatgaaagacctgtaactggtgccgggcagtgtgcagggtagtaatggaggtgctgtgccatgaccagcagtgttggtggccacccagatcccctagggtctctggccagctctgtgtgcccaatcccaattaagtgctttgaggttaaaggctggcacctgtgacctggtattggagccagtcagcccatatggagagccagcagggtctgggagttctccgtcctcttggccaaggccgctgactgactgggctacgagtcaaaagcccagctcccttgcctcaaggaaggacattctctgaggagtaatttatgctctagcactccctttcctctagatcggcctgaggctgggacattacatgaaatcacacccttgctgggcttaatccctttccctaccctcccatttatttactggtgtctctgggagcctttccttaataaacctcttatatctgaa

SEQ ID NO: 322277 - DNA, 539 bp, Artificial Sequence
  derived and/or modified sequence
gttccggttgcggatggtgagtgtgtcggggggcttggcggcttttctcctcagttttctggagtgctttggaggagaggactatggcagccagggacgccacttcaggcagcctgtcagaggagagcagtgctttggacctgccatcagcgtgtgacataagagattacgtcctgcagggacccagccaagaagccaacagcgaggctttcagttctttggaattccattcttttccttattcttctgatgtggatccagacaccagtaacttaaatatagaacaaaataactcctggaccgctgagaacttctggcttgaccctgctgtgaaaggccagtcagagaaggaagaggatgatggccttcggaaatccctggatagattctatgaaatgtttggtcatccacagccaggctctgcaaactcactctctgcatctgtctgcaagtgcctgtctcagaaaatcactcaactaagaggccaggagagccaaaagtatgccctccgccagcagaatgtaatgaaagacctgtaa

SEQ ID NO: 322278 - DNA, 1670 bp, Artificial Sequence
  derived and/or modified sequence
atggaggtttgctcttgttgcccaggctggagtgcaacggtctccgctcactgcaacctccgcttcgcaagttcaacctcccaaagtgctgggattacaggtatgagccagtgtgcctggccaacttttacctttttgactatggcagccagggacgccacttcaggcagcctgtcagaggagagcagtgctttggacctgccatcagcgtgtgacataagagattacgtcctgcagggacccagccaagaagccaacagcgaggctttcagttctttggaattccattcttttccttattcttctgatgtggatccagacaccagtaacttaaatatagaacaaaataactcctggaccgctgagaacttctggcttgaccctgctgtgaaaggccagtcagagaaggaagaggatgatggccttcggaaatccctggatagattctatgaaatgtttggtcatccacagccaggctctgcaaactcactctctgcatctgtctgcaagtgcctgtctcagaaaatcactcaactaagaggccaggagagccaaaagtatgccctccgcagttttcaaatggcccgggtgatcttcaaccgggacggctgctccgtcttacagaggcattccagggacacccacttctacccactggaggaaggaagtacatctttggatgatgaaaagccaaacccaggactgtcaaaggatattactcatttcctcttgcagcagaatgtaatgaaagacctgtaactggtgccgggcagtgtgcagggtagtaatggaggtgctgtgccatgaccagcagtgttggtggccacccagatcccctagggtctctggccagctctgtgtgcccaatcccaattaagtgctttgaggttaaaggctggcacctgtgacctggtattggagccagtcagcccatatggagagccagcagggtctgggagttctccgtcctcttggccaaggccgctgactgactgggctacgagtcaaaagcccagctcccttgcctcaaggaaggacattctctgaggagtaatttatgctctagcactccctttcctctagatcggcctgaggctgggacattacatgaaatcacacccttgctgggcttaatccctttccctaccctcccatttatttactggtgtctctgggagcctttccttaataaacctcttatatctgaatccttgactcagagtctacttctgggagaattcaccctgagagaacatgcttctgtgagatgaggttttagaaggatacaaagctctacaccgaatcaggtataaggaattatatcaagttgtaaaactgagaccatgtcattgagaatacatgtcctaaaataatataaagattgaaatacagttgagaaaagtatatcacatcttgatcacacccttgcctcctctccaaagctagaaatccatgttttatcatactaactgggtgtggaaggaacatttggacaatctaaaataacagcgaaaattcacaattctttttaaaatctcttgtcttttatcagattgcaaacgtgaaaggtgagaaggtaacaaatgtgcaccacccaccacagtatatgtaagcacaattatgctacgctaggctgatgccacgtggccttgtcaagttgtgtttgaaga

SEQ ID NO: 322279 - DNA, 585 bp, Artificial Sequence
  derived and/or modified sequence
gcttccgcgttccggttgcggatggtgagtgtgtcggggggcttggcggcttttctcctcagttttctggagtgctttggaggagaggactatggcagccagggacgccacttcaggcagcctgtcagaggagagcagtgctttggacctgccatcagcgtgtgacataagagattacgtcctgcagggacccagccaagaagccaacagcgaggctttcagttctttggaattccattcttttccttattcttctgatgtggatccagcagatctctgagaatgcttcattgtcttaggcagaaaaacatcttacctaagcaaagctttcaggaggaacttcaaaggacagcttacctggcacagcaatgacaaggagctgtttcctggatgtctttttgttattgttgctgttaatctcaggtctctttctaatctccctcaaaatgaattcagaagcaggggaatatttggttcaacaaagagagagtggaatttttttttgttttgttcttttaaaacttcagaaaatagcaatgtgggcctgttatgtgtgatgagtaataaaaatagagactttagcat

SEQ ID NO: 322280 - DNA, 321 bp, Artificial Sequence
  derived and/or modified sequence
atggaggtgtgcagctgctgccccggctggagcgccaccgtgagcgcccactgcaacctgagattcgccagcagcaccagccagagcgccggcatcaccggcatgagccagtgcgcctggcccaccttcaccttcctgaccatggccgccagagacgccaccagcggcagcctgagcgaggagagcagcgccctggacctgcccagcgcctgcgacatcagagactacgtgctgcagggccccagccaggaggccaacagcgaggccttcagcagcctggagttccacagcttcccctacagcagcgacgtggacccctag

SEQ ID NO: 322281 - DNA, 321 bp, Artificial Sequence
  derived and/or modified sequence
atggaggtttgcagttgctgccctggatggtctgcaactgtgtctgctcactgcaacctgcgtttcgcatcttcgacttctcagtccgctggaataactggtatgagtcagtgtgcttggccgacctttaccttcctgaccatggctgcgcgggacgccacatcagggtctctgagcgaggagtcgtctgcgctcgacctaccgtcagcatgtgatattagagactatgtgctgcagggccccagtcaggaagctaactccgaagctttttcttctcttgagttccacagcttcccgtactcctcggacgtcgacccgtag

SEQ ID NO: 322282 - DNA, 321 bp, Artificial Sequence
  derived and/or modified sequence
atggaggtgtgcagctgctgccccggctggagcgccaccgtgtctgcccactgcaacctgcgctttgccagcagcaccagccagagcgctggcatcaccggcatgagccagtgtgcctggcccaccttcaccttcctgaccatggccgccagagatgccaccagcggcagcctgtctgaggagagcagcgccctggacctgcccagcgcctgtgacatccgggactatgtgctgcagggccccagccaggaggccaacagcgaggccttcagcagcctggagttccacagcttcccctacagcagtgatgtggacccctag

SEQ ID NO: 322283 - DNA, 321 bp, Artificial Sequence
  derived and/or modified sequence
atggaggtgtgcagctgctgccccggctggagcgccaccgtgagcgctcactgcaatcttagattcgctagctctacaagccagagcgcaggaatcaccgggatgtctcaatgtgcttggccaactttcaccttcctcaccatggccgccagagatgcaacctccggatcgctgtctgaggagagtagtgcgctcgatctgccaagcgcctgcgacattcgagactacgtgctgcaggggccaagccaggaagccaattccgaagcgttctcttcgcttgaatttcacagctttccctactcgtccgacgtcgatccttag

SEQ ID NO: 322284 - DNA, 321 bp, Artificial Sequence
  derived and/or modified sequence
atggaagtatgtagctgttgcccaggctggtcggctaccgtaagcgctcactgcaacctgagattcgcatcctcaacctctcagtctgcgggtatcactgggatgtcccagtgcgcctggcctactttcaccttcttgacaatggccgctcgagacgcaacgtccggctctctgagtgaggagagcagcgccctggacctgccaagcgcctgtgacatccgggattacgtccttcaaggcccttctcaggaagccaacagtgaggcatttagctctctggaatttcactctttcccgtattcgagcgatgtagacccatag

SEQ ID NO: 322285 - protein, 30 aa, Artificial Sequence
  derived and/or modified sequence
EEAQSKRQEKLVEKHKEIRQQILDEKPKVP

SEQ ID NO: 322286 - DNA, 93 bp, Artificial Sequence
  derived and/or modified sequence
gaggaggcccagagtaagcggcaagaaaagctggttgagaagcacaaagagattcggcagcagatcctggatgaaaaacctaaggtaccttag

SEQ ID NO: 322287 - DNA, 93 bp, Artificial Sequence
  derived and/or modified sequence
gaggaggcccagagcaagaggcaggagaagctggtggagaagcacaaggagatccggcagcagatcctggatgagaagcccaaggtgccctag

SEQ ID NO: 322288 - DNA, 93 bp, Artificial Sequence
  derived and/or modified sequence
gaggaggcccagagcaagcggcaggagaagctggtggagaagcacaaggagattcgacagcaaattttagacgagaaaccgaaagtcccttag

SEQ ID NO: 322289 - DNA, 288 bp, Artificial Sequence
  derived and/or modified sequence
gaagaagcgcaaagtaaacggcaagaaaaactcgtagagaaacacaaggaaatacgtcagcagatcctggatgaaaagcccaaggtaccatgatgaattcctctgtgcttttcttccatgaggttgctccatgaccatctttttgtgtctggatttgaaggttgcccatgaagattgttggttccatgtcaaactaaagcatttcttgagggtttttcttcatggcttaaaaacgttgtgccttaaagctgtgattttattaataaaataataaatcatgactgttaa

SEQ ID NO: 322290 - DNA, 93 bp, Artificial Sequence
  derived and/or modified sequence
gaggaagcgcagagcaagcgccaggaaaaactcgtcgaaaaacacaaagagatccggcagcagatactggacgaaaaacccaaagtcccgtag

SEQ ID NO: 322291 - DNA, 93 bp, Artificial Sequence
  derived and/or modified sequence
gaggaggcccagagcaagagacaggagaagctggtggagaagcacaaggagatcagacagcagatcctggacgagaagcccaaggtgccctag

SEQ ID NO: 322292 - protein, 1136 aa, Artificial Sequence [sequence omitted]

SEQ ID NO: 322293 - DNA, 699 bp, Artificial Sequence
  derived and/or modified sequence
gccggagctcagccaggggtgcatgcactgcagctcaagcccgtgtgcgtgagtgattccctgaaaaaagggaccaaattcgtcaagtgggatgacgacagtaccattgtgacccccattatactccggaccgacccgcagggatttttcttttattggaccgatcaaaataaggagactgagctcctcgacctctccctagtcaaagacgctcggtgcggaagacatgccaaggcaccaaaggatccgaaactcagggaattgctggatgtgggcaacattggtcggttagagcaaaggatgatcacggtggtgtacgggccagacctcgtaaacatttcccacctgaatttggttgctttccaggaggaggtcgctaaagaatggactaatgaagtcttcagcctggccacgaacctcctggctcagaatatgtcccgagacgcttttttagagaaagcttacaccaagctcaaactgcaggtgacacccgagggacgcatcccgctgaaaaatatttatagactgttcagcgcagaccggaagagagtggagaccgctctggaagcttgtagccttccatcttctcgggtggagaaggcgaacgaggcagcaaagtcagaacagagttgcggtaaggccccccccaagcatttccacctgcacttcataaaacagaacaaaatgctcgaaccctag

SEQ ID NO: 322294 - DNA, 699 bp, Artificial Sequence
  derived and/or modified sequence
gctggggcccagcccggggtgcacgccctgcagctgaagcctgtgtgtgtgtctgacagcctgaagaagggcaccaagtttgtgaagtgggatgatgacagcaccatcgtgacccccatcatcctgaggacagacccccagggcttcttcttctactggacagaccagaacaaggagacagagctgctggacctgagcctggtgaaggatgcccgctgtggcagacatgccaaggcccccaaggaccccaagctgcgggagctgctggatgtgggcaacatcggccgcctggagcagaggatgatcaccgtggtgtatggccctgacctggtgaacatcagccacctgaacctggtggccttccaggaggaggtggccaaggagtggaccaatgaggtgttcagcctggccaccaacctgctggcccagaacatgagcagagatgccttcctggagaaggcctacaccaagctgaagctgcaggtgaccccagagggccgcatccccctgaagaacatctaccgcctcttctctgctgacaggaagagggtggagacagccctggaggcctgcagcctgcccagcagccgggtggagaaggccaatgaggccgccaagtctgagcagagctgtgggaaggccccacccaagcacttccacctgcacttcatcaagcagaacaagatgctggagccctag

SEQ ID NO: 322295 - DNA, 699 bp, Artificial Sequence
  derived and/or modified sequence
gccggcgcccagcccggcgtgcacgccctgcagctgaagcccgtgtgtgtctcagatagcctcaaaaagggaacaaagtttgtgaagtgggatgatgactctactatagtgacccctataatcctgcgtactgacccacagggttttttcttctattggactgatcagaacaaagagacggagctgcttgacctgagtctggttaaggacgctcgatgtgggcgccacgctaaagcacctaaagacccgaaactcagagaattactagacgtaggcaatatcggccgcctggagcagcgtatgatcactgtggtctacggtcctgacttggttaacatttcccatctgaacctggtggcttttcaagaggaggttgctaaggaatggacaaatgaggtgttttcgttggcaacaaatcttttagcgcagaatatgagccgcgatgcattcctagagaaggcttatactaaactgaagttgcaagtcactccggaaggcaggattcccttaaagaatatataccggttgttttctgccgataggaaacgcgtcgaaaccgccctagaagcctgttctcttccctcttccagggttgaaaaggctaatgaggcagctaagagcgaacagtcatgcggcaaggctccccccaagcactttcatctgcacttcatcaaacaaaacaagatgcttgaaccatag

SEQ ID NO: 322296 - DNA, 697 bp, Artificial Sequence
  derived and/or modified sequence
gccggggctcaacccggagtgcacgccttgcaactcaagcccgtgtgcgtgtccgacagcctcaagaagggcaccaaattcgtcaagtgggatgatgactcaactattgttactccaattattttgaggactgaccctcagggatttttcttttactggacagatcaaaacaaggagacagagctactggatctcagccttgtcaaagatgccagatgtgggagacacgccaaagctcccaaggaccccaaattacgtgaacttttggatgtggggaacatcgggcgcctggagcagcgcatgatcacagtggtgtatgggcctgacctcgtgaacatctcccatttgaatctcgtggctttccaagaagaagtggccaaggaatggacaaatgaggttttcagtttggcaacaaacctgctggcccaaaacatgtccagggatgcatttctggaaaaagcctatactaaacttaagctgcaagtcactccagaagggcgtattcctctcaaaaacatatatcgcttgttttcagcagatcggaagcgagttgaaactgctttagaggcttgtagtcttccatcttcaagggtggaaaaagctaatgaggctgcgaaaagtgagcagagctgtggaaaggctcccccaaaacattttcaccttcattttataaagcaaaataaaatgcttgaacctg

SEQ ID NO: 322297 - DNA, 699 bp, Artificial Sequence
  derived and/or modified sequence
gcaggagcccagccaggtgtgcacgcccttcagttgaagcctgtgtgcgttagcgattctcttaaaaaaggaaccaagttcgtcaagtgggacgacgatagtaccattgttacccctatcatcctccgcaccgacccccaagggttcttcttctattggaccgaccagaataaggaaactgagctacttgatctcagtctggtgaaagatgctagatgcgggaggcacgcgaaggcccctaaggatccgaaactccgggagctattagacgtgggcaatattgggaggctggagcagaggatgattaccgttgtatatggcccagatctggtaaacatctcacacctgaatttggtagcattccaggaagaggtggccaaagagtggactaacgaggtgttttctctcgcgactaatcttttagcacaaaatatgagtcgtgacgcgttcctcgagaaggcttatacaaagctaaaacttcaagtaaccccagaagggaggattcctctaaaaaatatctatagactgttcagtgccgataggaaacgtgtcgaaactgcactcgaggcatgtagcctgccatcttcgagagtggagaaggccaatgaggctgccaaatcagagcagtcctgcggtaaagcccctccaaaacactttcatctgcacttcattaaacagaataagatgttagaaccctag

SEQ ID NO: 322298 - DNA, 699 bp, Artificial Sequence
  derived and/or modified sequence
gccggcgcccagcccggcgtgcacgccctgcagctgaagcccgtgtgcgtgagcgacagcctgaagaagggcaccaagttcgtgaagtgggacgacgacagcaccatcgtgacccccatcatcctgagaaccgacccccagggcttcttcttctactggaccgaccagaacaaggagaccgagctgctggacctgagcctggtgaaggacgccagatgcggcagacacgccaaggcccccaaggaccccaagctgagagagctgctggacgtgggcaacatcggcagactggagcagagaatgatcaccgtggtgtacggccccgacctggtgaacatcagccacctgaacctggtggccttccaggaggaggtggccaaggagtggaccaacgaggtgttcagcctggccaccaacctgctggcccagaacatgagcagagacgccttcctggagaaggcctacaccaagctgaagctgcaggtgacccccgagggcagaatccccctgaagaacatctacagactgttcagcgccgacagaaagagagtggagaccgccctggaggcctgcagcctgcccagcagcagagtggagaaggccaacgaggccgccaagagcgagcagagctgcggcaaggccccccccaagcacttccacctgcacttcatcaagcagaacaagatgctggagccctag

SEQ ID NO: 322299 - protein, 223 aa, Artificial Sequence
  derived and/or modified sequence
MRRPDKHFDPFTEGIVDGIVANTLSVKIISGQFLSDKKVGTYVEVDMFGLPVDTRRKAFKTKTSQGNAVNPVWEEEPIVFKKVVLPTLACLRIAVYEEGGKFIGHRILPVQAIRPGYHYICLRNERNQPLTLPAVFVYIEVKDYVPDTYADVIEALSNPIRYVNLMEQRAKQLAALTLEDEEEVKKEGGFLHDEIMRLTRNTLEKLMALPLTHVVPIQSKMLS

SEQ ID NO: 322300 - protein, 196 aa, Artificial Sequence
  derived and/or modified sequence
IISGQFLSDKKVGTYVEVDMFGLPVDTRRKAFKTKTSQGNAVNPVWEEEPIVFKKVVLPTLACLRIAVYEEGGKFIGHRILPVQAIRPGYHYICLRNERNQPLTLPAVFVYIEVKDYVPDTYADVIEALSNPIRYVNLMEQRAKQLAALTLEDEEEVKKEGGFLHDEIMRLTRNTLEKLMALPLTHVVPIQSKMLS

SEQ ID NO: 322301 - DNA, 672 bp, Artificial Sequence
  derived and/or modified sequence
atgcgacgcccagataagcactttgacccttttacagagggaattgtagatggtatagtagcaaacacattatcagttaagataattagcggccagttcttgagcgacaaaaaagtggggacctatgtagaggttgatatgttcgggctccctgttgatacaaggcggaaggcattcaagacaaagacctctcagggcaatgctgttaaccctgtgtgggaagaggaacctattgtcttcaaaaaggtggtactgccaaccttggcatgcttgagaatcgctgtttacgaggaaggaggtaagtttattggacatagaatccttcctgtgcaggccataagaccaggataccattatatctgtcttagaaacgaacgcaaccagcccctgacattgcctgccgtgtttgtgtatatcgaagtgaaagactatgtccctgatacctacgccgacgtaatagaagccctctctaatcccattcggtacgtcaacctcatggaacagagagccaagcaactagcggccttaactttggaagatgaggaggaggtcaagaaggagggcggcttcctgcatgacgagattatgaggctaacacggaatactctggagaaacttatggctttgcccctcactcacgtcgtgccgatacagtcaaagatgctgtcatag

SEQ ID NO: 322302 - DNA, 591 bp, Artificial Sequence
  derived and/or modified sequence
ataattagtgggcagtttctctctgataagaaggtaggaacttacgtagaggttgatatgtttggcctccctgttgacactagaagaaaagcattcaaaactaagacatcccaggggaacgctgttaatccggtatgggaggaggagcctatagtgtttaaaaaagttgtcctacccaccctggcctgcctccgcatcgcagtgtacgaggaaggcggcaagtttattggacataggatccttcctgtgcaggccatacggccaggatatcattacatatgtttgcgcaacgaacgaaatcagcctctcaccctccctgcggtgttcgtctacattgaggtaaaggactatgtgcccgatacatatgccgacgttattgaggccctgagtaacccaataagatacgtgaatttaatggagcaaagagccaaacagctcgcagctcttaccctagaagatgaggaagaagtcaaaaaggagggtgggttcctgcacgatgagattatgcgccttacaaggaatacacttgaaaagttaatggcattgcccttaactcatgtcgtcccaatccagtctaagatgctatcttag

SEQ ID NO: 322303 - DNA, 672 bp, Artificial Sequence
  derived and/or modified sequence
atgaggaggccagacaagcactttgaccccttcacagagggcatcgtggatggcatcgtggccaacaccctgtctgtgaagatcatcagcggccagttcctgagtgacaagaaggtgggcacctacgtggaggtggacatgtttggcctgcctgtggacaccaggaggaaggccttcaagaccaagaccagccagggcaatgctgtgaaccctgtgtgggaggaggagcccatcgtgttcaagaaggtggtgctgcccaccctggcctgcctgagaattgctgtgtatgaggagggcggcaagttcatcggccaccgcatcctgcctgtgcaggccatccggcccggctaccactacatctgcctgagaaatgaaagaaaccagcccctgaccctgcctgctgtgtttgtgtacatcgaggtgaaggactatgtgcctgacacctatgcagatgtgattgaggccctgagcaaccccatccgctacgtgaacctgatggagcagagggccaagcagctggccgccctgaccctggaggatgaggaggaggtgaagaaggagggcggcttcctgcatgatgagatcatgaggctgaccaggaacaccctggagaagctgatggccctgcccctgacccacgtggtgcccatccagagcaagatgctgtcctag

SEQ ID NO: 322304 - DNA, 591 bp, Artificial Sequence
  derived and/or modified sequence
atcatcagcggccagttcctgagtgacaagaaggtgggcacctacgtggaggtggacatgtttggcctgcctgtggacaccaggaggaaggccttcaagaccaagaccagccagggcaatgctgtgaaccctgtgtgggaggaggagcccatcgtgttcaagaaggtggtgctgcccaccctggcctgcctgagaattgctgtgtatgaggagggcggcaagttcatcggccaccgcatcctgcctgtgcaggccatccggcccggctaccactacatctgcctgagaaatgaaagaaaccagcccctgaccctgcctgctgtgtttgtgtacatcgaggtgaaggactatgtgcctgacacctatgcagatgtgattgaggccctgagcaaccccatccgctacgtgaacctgatggagcagagggccaagcagctggccgccctgaccctggaggatgaggaggaggtgaagaaggagggcggcttcctgcatgatgagatcatgaggctgaccaggaacaccctggagaagctgatggccctgcccctgacccacgtggtgcccatccagagcaagatgctgtcctag

SEQ ID NO: 322305 - DNA, 672 bp, Artificial Sequence
  derived and/or modified sequence
atgcggcggcccgacaagcacttcgaccccttcaccgagggcatcgtcgacgggatcgtggccaatactctgtcagtgaagatcatctccgggcagtttctcagcgacaaaaaggtcggcacatacgtcgaggtggacatgtttggattgcccgtggacacaaggagaaaagcctttaaaaccaagaccagccagggcaatgccgtaaaccccgtatgggaggaagagccaatcgtctttaagaaagtggtattgcccactttggcctgcctcagaattgcagtgtatgaggagggaggaaaatttatcggccatcgcatactgcccgttcaggcaattcggccagggtatcattatatttgtttgagaaatgagagaaaccagccgctcacacttcctgcagtgtttgtgtacatcgaagtcaaagactacgtcccagacacttacgcagacgtgatcgaagcactgtctaatccaatccgctacgtgaacctgatggaacaacgagccaagcagctcgcagccttaacattggaagatgaagaggaggtcaagaaggaagggggcttcctgcatgacgagatcatgcgccttacacgcaacacactcgaaaagttaatggctctcccccttacacacgtcgttccgattcagtctaaaatgctgtcctag

SEQ ID NO: 322306 - DNA, 591 bp, Artificial Sequence
  derived and/or modified sequence
atcatcagcggccagttcctgagcgacaagaaggtgggcacctacgtcgaagtggacatgtttgggctccccgtggacacccgtaggaaggcgtttaagacgaaaacctcacagggcaatgcagttaatcccgtgtgggaggaggagccgattgtctttaagaaggtggtactccccaccctcgcatgtctgagaatcgcggtgtacgaggaagggggtaagttcataggacaccgcatccttcccgtacaagctattcgaccagggtaccactatatttgtcttcgcaacgaacgcaaccagccgctgacactccctgctgtgttcgtctacatcgaggtgaaagactatgtaccagatacttatgctgacgtcatcgaggccctgtccaatccaattagatacgttaatttgatggaacagagggcaaagcagttagcggcactcacgcttgaggatgaggaagaggtgaagaaggagggcggttttctgcatgatgaaattatgcggctgacccggaacaccttggagaagctgatggctctgcctctcacacacgtggtgccaatccagagtaagatgctgtcttag

SEQ ID NO: 322307 - DNA, 707 bp, Artificial Sequence
  derived and/or modified sequence
attatttcaggtcagtttctttctgataagaaagttgggacttacgtggaagtagatatgtttggtttgcctgtggatacaaggaggaaggcatttaagaccaaaacatcccaaggaaatgctgtgaatcctgtctgggaagaagaacctattgtgttcaaaaaggtggttcttcctactctggcctgtttgagaatagcagtttatgaagaaggaggtaaattcattggccaccgtatcttgccagtgcaagccattcggccaggctatcactatatctgtctaaggaatgaaaggaaccagcctctgacgctgcctgctgtctttgtctacatagaagtgaaagactatgtgccagacacatatgcagatgtcatcgaagctttatcaaacccaatccgatatgtgaacctgatggaacagagagctaagcaattggctgctttgacactggaagatgaagaagaagtaaagaaagagggtggatttctgcatgatgaaattatgagactcacccgtaatacgctggaaaaactgatggccttacctcttacccatgtggtgcccatccaaagcaagatgctgtcataagttttagtagagacgggatttcaccatgttagccaggatggtctcgatctcctgacctcgggatccacccgcctcggcctcccaaagtgctgggattacaggcatgagccaccgcg

SEQ ID NO: 322308 - DNA, 672 bp, Artificial Sequence
  derived and/or modified sequence
atgcggcgaccagataaacactttgacccctttactgagggcatcgtcgatgggattgtggccaacaccctatccgtgaaaatcatctcaggtcagtttttatccgacaagaaagtggggacatatgtagaggtggatatgtttggcctgcccgttgatacccgtaggaaggctttcaagaccaaaacgtcccaaggaaacgcagttaaccccgtatgggaggaggagccaatagtctttaaaaaagttgtgttgccgaccttggcgtgtcttcggatcgccgtctacgaggaagggggaaagtttatcggccatcgcattctgcccgtgcaagctatacggccaggctaccactatatttgcctccgtaacgaacgcaatcagccgcttacgttgccagctgtattcgtctacatcgaggtgaaagactacgtgccagacacatatgcagatgtgattgaagctctctcaaatcctatccgctacgtgaatctcatggaacagagggccaagcaactagcggcactaaccctggaggatgaggaggaggtaaagaaagaggggggatttctgcatgacgaaattatgaggcttactcgcaatactttagagaaacttatggcccttcccctgacccatgtggtgcctattcaatcgaagatgctgtcttag

SEQ ID NO: 322309 - DNA, 591 bp, Artificial Sequence
  derived and/or modified sequence
attatctccggtcagttcctctctgataaaaaggtgggaacgtatgtcgaggtcgatatgttcggcctcccagtggacacccgtaggaaagcttttaaaacgaagacatcacaaggaaatgcggtcaaccctgtctgggaagaggagcccatcgtcttcaagaaggtggtccttcccactctggcttgcctacgcatcgcagtgtacgaggaaggcggaaagttcattggtcatcgcattctgcctgttcaggccatccggccaggttaccattacatatgcctcaggaatgagcggaatcagccgttaacgctgccagcagttttcgtttatatcgaggttaaagattacgttccagatacttacgctgatgtaatcgaagctttaagcaatcccattcgttatgtgaatctgatggaacagcgtgcaaaacagctggctgctctaacactggaggacgaggaagaagtgaagaaagaggggggattcctgcacgacgagatcatgcggttgacaagaaacaccctggagaaactcatggccctgcctcttacccatgtggtaccaattcagtccaagatgctttcatag

SEQ ID NO: 322310 - DNA, 672 bp, Artificial Sequence
  derived and/or modified sequence
atgagaagacccgacaagcacttcgaccccttcaccgagggcatcgtggacggcatcgtggccaacaccctgagcgtgaagatcatcagcggccagttcctgagcgacaagaaggtgggcacctacgtggaggtggacatgttcggcctgcccgtggacaccagaagaaaggccttcaagaccaagaccagccagggcaacgccgtgaaccccgtgtgggaggaggagcccatcgtgttcaagaaggtggtgctgcccaccctggcctgcctgagaatcgccgtgtacgaggagggcggcaagttcatcggccacagaatcctgcccgtgcaggccatcagacccggctaccactacatctgcctgagaaacgagagaaaccagcccctgaccctgcccgccgtgttcgtgtacatcgaggtgaaggactacgtgcccgacacctacgccgacgtgatcgaggccctgagcaaccccatcagatacgtgaacctgatggagcagagagccaagcagctggccgccctgaccctggaggacgaggaggaggtgaagaaggagggcggcttcctgcacgacgagatcatgagactgaccagaaacaccctggagaagctgatggccctgcccctgacccacgtggtgcccatccagagcaagatgctgagctag

SEQ ID NO: 322311 - DNA, 591 bp, Artificial Sequence
  derived and/or modified sequence
atcatcagcggccagttcctgagcgacaagaaggtgggcacctacgtggaggtggacatgttcggcctgcccgtggacaccagaagaaaggccttcaagaccaagaccagccagggcaacgccgtgaaccccgtgtgggaggaggagcccatcgtgttcaagaaggtggtgctgcccaccctggcctgcctgagaatcgccgtgtacgaggagggcggcaagttcatcggccacagaatcctgcccgtgcaggccatcagacccggctaccactacatctgcctgagaaacgagagaaaccagcccctgaccctgcccgccgtgttcgtgtacatcgaggtgaaggactacgtgcccgacacctacgccgacgtgatcgaggccctgagcaaccccatcagatacgtgaacctgatggagcagagagccaagcagctggccgccctgaccctggaggacgaggaggaggtgaagaaggagggcggcttcctgcacgacgagatcatgagactgaccagaaacaccctggagaagctgatggccctgcccctgacccacgtggtgcccatccagagcaagatgctgagctag

SEQ ID NO: 322312 - protein, 189 aa, Artificial Sequence
  derived and/or modified sequence
MSVLTSPRGKVEVVHCRRTESQDVYCIKSLIRKFTCKLFGKLNIIYLLEKANLAVTLCNDKEEIMAQATFLDYPNWNVAKQDDWVSVFRELDSDIPCTPLNTLFMHLFVAVDEYSVGCCKEILRTVYKAVPELHFIFLIVPSYMSLGSTLITVFDQVGNIPCLTYEEDFAVHICHRHSHYPQLHVRKAR

SEQ ID NO: 322313 - protein, 135 aa, Artificial Sequence
  derived and/or modified sequence
MSVLTSPRGKVEVVHCRRTESQDVYCIKSLIRKFTCKLFGKLNIIYLLEKANLAVTLCNDKEEIMAQATFLDYPNWNVAKQDDWVSVFRELDSDIPCTPLNTLFMHLFVAVDEYSVGCCKEILRTVYKAVPELHF

SEQ ID NO: 322314 - protein, 470 aa, Artificial Sequence
  derived and/or modified sequence
MSVLTSPRGKVEVVHCRRTESQDVYCIKSLIRKFTCKLFGKLNIIYLLEKANLAVTLCNDKEEIMAQATFLDYPNWNVAKQDDWVSVFRELDSDIPCTPLNTLFMHLFVAVDEYSVGCCKEILRTVYKAVPELHFIFLIVPSYMSLGSTLITVFDQVGNIPCLTYEEDFAVHICHRHSHYPQLHVRKARVEDHDDLMPIFMRYDTILKETYGEYFLAELIEAQDEENHAVVCEVEGTAVGFMSVCSRVNMQLLHECFDLGPFHGLCFPHPDDVLESPQDLSVRRSQDAELRSSSQGSQKIVEELQEPVSPDTMENIQGNIAREAASEEALTAVQSGNVSEPEDIEKLSDISTGYAQYHHVSSRSLASLVLPEEPVHFRPIYRGASAAFCIQLFCIDEKYEARSLDFMNFVFSLFSDKNFCVISLPHLTPEFFLIQNFVKMVPFNTCTLEQDLYVFHRAGLLKNICLGRSS

SEQ ID NO: 322315 - DNA, 679 bp, Artificial Sequence
  derived and/or modified sequence
gcgtggagtgcggcgtcctggagctgcggatgaggtgggtaacgccgtgctgactagcagcgacgcaaggactgcggtgcagggcgtccagggcgcatccccaggataaaaaatgtcagtactcacttctccaagaggaaaggtagaagttgttcattgccgaagaacagaatcacaggatgtttattgtatcaaaagccttattagaaaatttacctgcaagctgtttgggaagctaaatatcatctatcttctagaaaaggccaaccttgctgttaccctctgcaatgacaaggaggagatcatggcccaggccaccttcctggactaccccaactggaatgttgccaagcaggatgactgggtgtcagtgttccgggagctcgacagtgacatcccatgcacacccctgaatacgttgttcatgcacctctttgtggccgtggatgagtattctgttggctgttgcaaagagattcttcgaaccgtgtataaggcagtgccagagctgcacttcatatttctcatcgtgccatcctacatgagcctaggctcaactctcataactgtttttgaccaagtggggaacatcccgtgtctgacgtatgaggaagactttgcagtgcatatatgtcacaggcacagccactatcctcagctgcacgttcgcaaagccagg

SEQ ID NO: 322316 - DNA, 2017 bp, Artificial Sequence
  derived and/or modified sequence
ggcagcgcgtggagtgcggcgtcctggagctgcggatgagtggacttttttctctcttttggggacaggataaaaaatgtcagtactcacttctccaagaggaaaggtagaagttgttcattgccgaagaacagaatcacaggatgtttattgtatcaaaagccttattagaaaatttacctgcaagctgtttgggaagctaaatatcatctatcttctagaaaaggccaaccttgctgttaccctctgcaatgacaaggaggagatcatggcccaggccaccttcctggactaccccaactggaatgttgccaagcaggatgactgggtgtcagtgttccgggagctcgacagtgacatcccatgcacacccctgaatacgttgttcatgcacctctttgtggccgtggatgagtattctgttggctgttgcaaagagattcttcgaaccgtgtataaggcagtgccagagctgcacttcatatttctcatcgtgccatcctacatgagcctaggctcaactctcataactgtttttgaccaagtggggaacatcccgtgtctgacgtatgaggaagactttgcagtgcatatatgtcacaggcacagccactatcctcagctgcacgttcgcaaagccagggtggaagaccatgacgatctcatgccaatatttatgcgctatgacacaattctgaaggaaacttacggtgaatacttcctggccgaactaatagaggcccaagatgaagagaatcatgctgttgtgtgtgaggtggaaggcacagctgttgggttcatgagtgtgtgctcaagagtgaacatgcaactgctgcatgagtgctttgacttgggccctttccacggactctgtttcccacatcctgatgacgttctggaatcaccacaagacctaagtgtccgaagaagtcaagatgctgagctcaggagtagcagccaaggttcccaaaaaatagtcgaggagttgcaggaacctgtctctccagataccatggaaaacatccagggaaatattgccagagaagctgcatccgaggaagctttaacagcagtccaaagtggaaatgttagtgaaccggaggacatagaaaaactcagtgacatctccactggatatgcacagtatcaccatgtcagcagtaggagcttggcatcgctcgtactgcctgaagagcccgtccacttccgccccatctacaggggagcctcagctgctttttgtattcagctgttttgtattgatgagaaatatgaagcaaggtcgctggattttatgaattttgttttcagtcttttttctgataagaacttctgtgtaatttctctgccccatctcacccccgagttcttcctcatccagaacttcgtgaaaatggtccctttcaacacctgcaccctcgagcaggacctctacgtcttccaccgggctggattgctcaaaaacatttgtctgggaaggagttcatagcatcaccagagtgtcaaagggctctgtggcatgcaagagtttcagacccacggccagagtggacttttcttccttgtgctcagagctagctcggagcaccgtagccacattgcagcccacagggaagggtggaatgagaaatggaagaggggaagcactttcctcttaggggacatgaatcacctctgttcatattatgtgatcaggaacttggttgcatggccctacttagctgcaagggagcctggaagatatgttgctggtaggttgggcatgtgtccagtaaaaaactcagttgattccttaattaaaaagaagaggaaaaaggatactatgggaacattatatctagtttttatcttgtgtatgtatagaagttctaaaaagttacacaggatttcagtaaccttatatgcctctgggaaacaggactgggaattgtaggtgaagatggtgactgactttgcattatgtctatctgttatgtttgatttttttgttttaattaataaacttttttttttttga

SEQ ID NO: 322317 - DNA, 1946 bp, Artificial Sequence
  derived and/or modified sequence
gataaaaaatgtcagtactcacttctccaagaggaaaggtagaagttgttcattgccgaagaacagaatcacaggatgtttattgtatcaaaagccttattagaaaatttacctgcaagctgtttgggaagctaaatatcatctatcttctagaaaaggccaaccttgctgttaccctctgcaatgacaaggaggagatcatggcccaggccaccttcctggactaccccaactggaatgttgccaagcaggatgactgggtgtcagtgttccgggagctcgacagtgacatcccatgcacacccctgaatacgttgttcatgcacctctttgtggccgtggatgagtattctgttggctgttgcaaagagattcttcgaaccgtgtataaggcagtgccagagctgcacttcatatttctcatcgtgccatcctacatgagcctaggctcaactctcataactgtttttgaccaagtggggaacatcccgtgtctgacgtatgaggaagactttgcagtgcatatatgtcacaggcacagccactatcctcagctgcacgttcgcaaagccagggtggaagaccatgacgatctcatgccaatatttatgcgctatgacacaattctgaaggaaacttacggtgaatacttcctggccgaactaatagaggcccaagatgaagagaatcatgctgttgtgtgtgaggtggaaggcacagctgttgggttcatgagtgtgtgctcaagagtgaacatgcaactgctgcatgagtgctttgacttgggccctttccacggactctgtttcccacatcctgatgacgttctggaatcaccacaagacctaagtgtccgaagaagtcaagatgctgagctcaggagtagcagccaaggttcccaaaaaatagtcgaggagttgcaggaacctgtctctccagataccatggaaaacatccagggaaatattgccagagaagctgcatccgaggaagctttaacagcagtccaaagtggaaatgttagtgaaccggaggacatagaaaaactcagtgacatctccactggatatgcacagtatcaccatgtcagcagtaggagcttggcatcgctcgtactgcctgaagagcccgtccacttccgccccatctacaggggagcctcagctgctttttgtattcagctgttttgtattgatgagaaatatgaagcaaggtcgctggattttatgaattttgttttcagtcttttttctgataagaacttctgtgtaatttctctgccccatctcacccccgagttcttcctcatccagaacttcgtgaaaatggtccctttcaacacctgcaccctcgagcaggacctctacgtcttccaccgggctggattgctcaaaaacatttgtctgggaaggagttcatagcatcaccagagtgtcaaagggctctgtggcatgcaagagtttcagacccacggccagagtggacttttcttccttgtgctcagagctagctcggagcaccgtagccacattgcagcccacagggaagggtggaatgagaaatggaagaggggaagcactttcctcttaggggacatgaatcacctctgttcatattatgtgatcaggaacttggttgcatggccctacttagctgcaagggagcctggaagatatgttgctggtaggttgggcatgtgtccagtaaaaaactcagttgattccttaattaaaaagaagaggaaaaaggatactatgggaacattatatctagtttttatcttgtgtatgtatagaagttctaaaaagttacacaggatttcagtaaccttatatgcctctgggaaacaggactgggaattgtaggtgaagatggtgactgactttgcattatgtctatctgttatgtttgatttttttgttttaattaataaacttttttttttt

SEQ ID NO: 322318 - DNA, 569 bp, Artificial Sequence
  derived and/or modified sequence
agctgcggatgaggtgggtaacgccgtgctgactagcagcgacgcaaggactgcggtgcagggcgtccagggcgcatccccaggtcagcctccggaactgggatgaccaggcgaggacgagtggctctgtcgagccgtggcgccctgcaagggagataaaaaatgtcagtactcacttctccaagaggaaaggtagaagttgttcattgccgaagaacagaatcacaggatgtttattgtatcaaaagccttattagaaaatttacctgcaagctgtttgggaagctaaatatcatctatcttctagaaaaggccaaccttgctgttaccctctgcaatgacaaggaggagatcatggcccaggccaccttcctggactaccccaactggaatgttgccaagcaggatgactgggtgtcagtgttccgggagctcgacagtgacatcccatgcacacccctgaatacgttgttcatgcacctctttgtggccgtggatgagtattctgttggctgttgcaaagagattcttcgaaccgtgtataaggcagtgccagagctgcacttcat

SEQ ID NO: 322319 - DNA, 570 bp, Artificial Sequence
  derived and/or modified sequence
atgagcgtgctgaccagccccagaggcaaggtggaggtggtgcactgcagaagaaccgagagccaggacgtgtactgcatcaagagcctgatcagaaagttcacctgcaagctgttcggcaagctgaacatcatctacctgctggagaaggccaacctggccgtgaccctgtgcaacgacaaggaggagatcatggcccaggccaccttcctggactaccccaactggaacgtggccaagcaggacgactgggtgagcgtgttcagagagctggacagcgacatcccctgcacccccctgaacaccctgttcatgcacctgttcgtggccgtggacgagtacagcgtgggctgctgcaaggagatcctgagaaccgtgtacaaggccgtgcccgagctgcacttcatcttcctgatcgtgcccagctacatgagcctgggcagcaccctgatcaccgtgttcgaccaggtgggcaacatcccctgcctgacctacgaggaggacttcgccgtgcacatctgccacagacacagccactacccccagctgcacgtgagaaaggccagatag

SEQ ID NO: 322320 - DNA, 1413 bp, Artificial Sequence
  derived and/or modified sequence
atgagcgtgctgaccagccccagaggcaaggtggaggtggtgcactgcagaagaaccgagagccaggacgtgtactgcatcaagagcctgatcagaaagttcacctgcaagctgttcggcaagctgaacatcatctacctgctggagaaggccaacctggccgtgaccctgtgcaacgacaaggaggagatcatggcccaggccaccttcctggactaccccaactggaacgtggccaagcaggacgactgggtgagcgtgttcagagagctggacagcgacatcccctgcacccccctgaacaccctgttcatgcacctgttcgtggccgtggacgagtacagcgtgggctgctgcaaggagatcctgagaaccgtgtacaaggccgtgcccgagctgcacttcatcttcctgatcgtgcccagctacatgagcctgggcagcaccctgatcaccgtgttcgaccaggtgggcaacatcccctgcctgacctacgaggaggacttcgccgtgcacatctgccacagacacagccactacccccagctgcacgtgagaaaggccagagtggaggaccacgacgacctgatgcccatcttcatgagatacgacaccatcctgaaggagacctacggcgagtacttcctggccgagctgatcgaggcccaggacgaggagaaccacgccgtggtgtgcgaggtggagggcaccgccgtgggcttcatgagcgtgtgcagcagagtgaacatgcagctgctgcacgagtgcttcgacctgggccccttccacggcctgtgcttcccccaccccgacgacgtgctggagagcccccaggacctgagcgtgagaagaagccaggacgccgagctgagaagcagcagccagggcagccagaagatcgtggaggagctgcaggagcccgtgagccccgacaccatggagaacatccagggcaacatcgccagagaggccgccagcgaggaggccctgaccgccgtgcagagcggcaacgtgagcgagcccgaggacatcgagaagctgagcgacatcagcaccggctacgcccagtaccaccacgtgagcagcagaagcctggccagcctggtgctgcccgaggagcccgtgcacttcagacccatctacagaggcgccagcgccgccttctgcatccagctgttctgcatcgacgagaagtacgaggccagaagcctggacttcatgaacttcgtgttcagcctgttcagcgacaagaacttctgcgtgatcagcctgccccacctgacccccgagttcttcctgatccagaacttcgtgaagatggtgcccttcaacacctgcaccctggagcaggacctgtacgtgttccacagagccggcctgctgaagaacatctgcctgggcagaagcagctag

SEQ ID NO: 322321 - DNA, 408 bp, Artificial Sequence
  derived and/or modified sequence
atgagcgtgctgaccagccccagaggcaaggtggaggtggtgcactgcagaagaaccgagagccaggacgtgtactgcatcaagagcctgatcagaaagttcacctgcaagctgttcggcaagctgaacatcatctacctgctggagaaggccaacctggccgtgaccctgtgcaacgacaaggaggagatcatggcccaggccaccttcctggactaccccaactggaacgtggccaagcaggacgactgggtgagcgtgttcagagagctggacagcgacatcccctgcacccccctgaacaccctgttcatgcacctgttcgtggccgtggacgagtacagcgtgggctgctgcaaggagatcctgagaaccgtgtacaaggccgtgcccgagctgcacttctag

SEQ ID NO: 322322 - DNA, 570 bp, Artificial Sequence
  derived and/or modified sequence
atgtccgtgcttacaagcccgcgcggcaaagtggaagtggtgcactgtagaagaacagaaagccaggatgtatactgcattaaatccctgatacggaagttcacatgcaaactgtttggcaaattgaacataatttacctcctagagaaagcaaatctcgcggtaaccctgtgtaatgataaggaagagatcatggcacaggctacatttcttgattaccctaattggaacgtcgccaaacaggacgattgggtgagcgtttttagagagctggatagcgacattccatgtacacctcttaacactctgttcatgcatctattcgttgccgtagatgagtattcagttggatgctgtaaggaaatacttaggactgtgtataaggcagtgcctgaactccatttcatttttttaatcgtcccaagttatatgtcactgggctctaccctgattaccgtgttcgatcaagttggtaatatcccttgcctcacttacgaggaagattttgccgtgcatatttgccacagacatagccattaccctcagttgcatgtgcgcaaagctcggtag

SEQ ID NO: 322323 - DNA, 1413 bp, Artificial Sequence
  derived and/or modified sequence
atgagcgtgctcacgagcccaaggggaaaggtcgaggtcgttcactgtcgacgaactgagtctcaggatgtgtactgcatcaagtcgctgatccggaaattcacatgtaaactgttcgggaagctgaacatcatatacttgctggaaaaagcaaacttggctgtcacgttgtgcaacgataaagaggaaataatggcacaggctacttttctcgactatccaaattggaacgtggccaagcaggacgactgggtgtccgtcttcagggagctagacagcgacatcccatgtactccacttaacacactatttatgcatctcttcgtggcagtcgacgaatatagtgtgggatgctgtaaggaaatcttgagaacagtttacaaagcagtgcccgagctacatttcatatttttaattgttccttcttatatgtcactggggagtaccctcataacagtcttcgatcaggtaggtaatataccatgcctgacgtatgaagaggactttgccgttcatatttgtcacaggcacagccactaccctcaactgcacgtgcggaaagctagggttgaggaccatgacgatctcatgccaatctttatgcgctatgacacgatcctcaaggagacctacggtgagtattttctggcagagctgatcgaagcccaagacgaagaaaatcatgctgtggtgtgtgaggtagaaggcactgctgttggatttatgtcagtctgcagcagggtgaacatgcaactcctacacgagtgctttgatctcggacctttccatgggctctgcttcccccaccctgatgatgtgctggagagcccccaagacctgtccgtccgccggtcccaggacgcagaactgaggagctcatcccaaggcagccagaagatagtggaagaactacaagagcctgtgtcgccagacactatggagaacattcagggaaacatcgctagagaggcagcttcggaagaagctctgactgcagtgcaatcaggcaatgtgtccgaacctgaagacatcgagaaactgtcggacatcagcaccgggtatgcacagtaccaccacgtgagttccaggtcgctggcatctctagtgctcccagaggagcctgtccatttcagacctatctaccggggagctagtgctgccttctgtatccagctcttttgtattgatgaaaagtatgaggccagaagtctcgacttcatgaatttcgttttttccttgttttcagataagaatttttgtgtgatctccctcccacacctcaccccagaattcttcctgattcaaaattttgtgaaaatggttcctttcaatacatgcaccctggaacaggacctgtatgtttttcacagagccgggctgctgaaaaacatttgcctggggcggtcctcctag

SEQ ID NO: 322324 - DNA, 1413 bp, Artificial Sequence
  derived and/or modified sequence
atgagcgtcctgactagtcctcgcggcaaagtggaggtcgtacattgcagaaggacagagagccaggacgtctattgcatcaaatcactgatccgaaaattcacttgcaagttgttcgggaaactgaatattatctacctccttgagaaagctaacctcgcagtgaccctatgcaatgacaaagaggaaattatggctcaggctacttttttggactacccaaattggaacgtcgctaaacaagacgattgggtgagtgtctttcgggagctggattctgatatcccttgcacaccgctgaatacgctgttcatgcacctctttgtcgctgtggatgagtatagcgtcggatgttgcaaagagatcctgaggaccgtttacaaggccgtcccagagctgcactttatcttcctgattgtgccatcttacatgagcttgggatctacgctaattacagtctttgatcaggttgggaacattccctgcctcacgtatgaggaggacttcgctgtgcacatttgccatcgacatagtcactatcctcagctgcatgtgcgaaaagccagagtggaggatcatgacgatctgatgcctatcttcatgcggtacgatacaattctgaaggagacttacggcgaatatttcttagctgagttaatcgaagctcaagatgaggagaaccatgcggttgtctgcgaggtggaaggcaccgcagtgggatttatgtctgtgtgctcaagggtcaacatgcagctgctgcacgagtgcttcgacctcggcccctttcacgggttgtgcttccctcatccggatgacgtgctggaatcaccccaggatctgtctgtaagacggtcccaggatgcagagctccgcagctcgtcccaggggtcccaaaagattgtggaggaactgcaggaacctgtgtctcccgataccatggaaaatattcaggggaatatcgctagggaggcagcctcagaagaagctctgacagccgtgcagagtggcaacgtgtctgaacctgaagatatagaaaaactgtcagacatttcaacaggctatgctcagtatcatcatgtgtcctcccgctccttggcgtcactggtgctgccagaggaacccgttcattttagacctatttataggggggccagtgccgccttttgcatccagctattctgcatagatgagaagtacgaggccaggagtcttgacttcatgaatttcgtttttagcctgtttagcgataaaaatttttgcgtcatctcactgccccacctgactcccgagttttttctcatacagaatttcgtgaagatggttccgttcaatacttgcactctggaacaggacctctacgtctttcatcgtgccggactgctgaagaatatctgtctgggaaggtccagttag

SEQ ID NO: 322325 - DNA, 408 bp, Artificial Sequence
  derived and/or modified sequence
atgtctgtcctgacaagccccagaggcaaggtagaggtggtgcattgccgccggactgagtcacaggacgtctattgcatcaaaagcctgatccggaagtttacttgcaaattgtttgggaaactgaatataatttacctgttggagaaggcaaatttagccgtcacattatgcaatgataaggaagagattatggctcaggccacattcctggattatccgaactggaatgtggccaagcaagacgattgggtgagtgtcttcagagaactggactcagatattccctgcacccccttgaacaccctgtttatgcacctcttcgtggcggtcgacgaatatagtgtgggttgttgcaaggaaattcttaggaccgtctacaaggcagtgccagaattgcacttctag

SEQ ID NO: 322326 - DNA, 570 bp, Artificial Sequence
  derived and/or modified sequence
atgtctgtgctgaccagcccccggggcaaggtggaggtggtgcactgcagaagaacagagagccaggatgtgtactgcatcaagagcctcatcaggaagttcacctgcaagctgtttgggaagctgaacatcatctacctgctggagaaggccaacctggccgtgaccctgtgcaatgacaaggaggagatcatggcccaggccaccttcctggactaccccaactggaatgtggccaagcaggatgactgggtgtctgtgttccgggagctggacagcgacatcccctgcacccccctgaacaccctcttcatgcacctgtttgtggccgtggatgagtacagcgtgggctgctgcaaggagatcctgaggacagtgtacaaggctgtgcctgagctgcacttcatcttcctgattgtgcccagctacatgagcctgggcagcaccctcatcaccgtgtttgaccaggtgggcaacatcccctgcctgacctatgaagaagattttgctgtgcacatctgccaccgccacagccactacccccagctgcacgtgaggaaggccaggtag

SEQ ID NO: 322327 - DNA, 1413 bp, Artificial Sequence
  derived and/or modified sequence
atgtctgtgctgaccagcccccggggcaaggtggaggtggtgcactgcagaagaacagagagccaggatgtgtactgcatcaagagcctcatcaggaagttcacctgcaagctgtttgggaagctgaacatcatctacctgctggagaaggccaacctggccgtgaccctgtgcaatgacaaggaggagatcatggcccaggccaccttcctggactaccccaactggaatgtggccaagcaggatgactgggtgtctgtgttccgggagctggacagcgacatcccctgcacccccctgaacaccctcttcatgcacctgtttgtggccgtggatgagtacagcgtgggctgctgcaaggagatcctgaggacagtgtacaaggctgtgcctgagctgcacttcatcttcctgattgtgcccagctacatgagcctgggcagcaccctcatcaccgtgtttgaccaggtgggcaacatcccctgcctgacctatgaagaagattttgctgtgcacatctgccaccgccacagccactacccccagctgcacgtgaggaaggcccgggtggaggaccatgatgacctgatgcccatcttcatgagatatgacaccatcctgaaggagacctatggagagtacttcctggccgagctgattgaggcccaggatgaggagaaccacgctgtggtgtgtgaggtggagggcacagctgtgggcttcatgtctgtgtgcagccgggtgaacatgcagctgctgcatgaatgttttgacctgggccccttccacggcctgtgcttcccccacccagatgatgtgctggagagcccccaggacctgtctgtgagaagaagccaggatgctgagctgcggagcagcagccagggcagccagaagatcgtggaggagctgcaggagcctgtgtccccagacaccatggagaacatccagggcaacatcgcccgggaggccgccagcgaggaggccctgacagctgtgcagagcggaaatgtgtctgagcctgaggacatcgagaagctgagtgacatcagcacaggctacgcccagtaccaccacgtgagcagccgcagcctggccagcctggtgctgcctgaggagcctgtgcacttccggcccatctacagaggagccagcgctgccttctgcatccagctgttctgcattgatgagaagtatgaggcccggagcctggacttcatgaactttgtgttcagcctcttcagtgacaagaacttctgtgtgatcagcctgccccacctgaccccagagttcttcctgatccagaactttgtgaagatggtgcccttcaacacctgcaccctggagcaggacctgtatgtgttccaccgggccggcctgctgaagaacatctgcctgggccgcagcagctag

SEQ ID NO: 322328 - DNA, 408 bp, Artificial Sequence
  derived and/or modified sequence
atgtctgtgctgaccagcccccggggcaaggtggaggtggtgcactgcagaagaacagagagccaggatgtgtactgcatcaagagcctcatcaggaagttcacctgcaagctgtttgggaagctgaacatcatctacctgctggagaaggccaacctggccgtgaccctgtgcaatgacaaggaggagatcatggcccaggccaccttcctggactaccccaactggaatgtggccaagcaggatgactgggtgtctgtgttccgggagctggacagcgacatcccctgcacccccctgaacaccctcttcatgcacctgtttgtggccgtggatgagtacagcgtgggctgctgcaaggagatcctgaggacagtgtacaaggctgtgcctgagctgcacttctag

SEQ ID NO: 322329 - DNA, 570 bp, Artificial Sequence
  derived and/or modified sequence
atgagcgtgctgaccagcccccggggcaaggtggaggtggtgcactgtcggaggacagagtcacaggatgtgtactgcattaagagcctgattaggaagtttacctgcaaactgttcgggaaactcaatataatctatcttttagaaaaggccaacttggctgtgaccttgtgcaacgacaaggaggaaatcatggcacaggctaccttcctcgactaccccaactggaatgtggccaaacaggatgattgggtatccgtgtttcgcgaactggactccgacattccttgcaccccactaaatacgctgtttatgcacctttttgtagctgtggacgaatattcagttggatgctgtaaagaaatcctgcggacggtgtacaaagccgtgcccgagctgcactttatattcctgattgtgccttcctacatgagccttggatccactctgatcacggtattcgaccaggttggcaatattccctgccttacttatgaagaagactttgccgtccatatatgtcacaggcatagtcattaccctcagctgcatgtgcgcaaggcccggtag

SEQ ID NO: 322330 - DNA, 1413 bp, Artificial Sequence
  derived and/or modified sequence
atgagcgtgctgaccagcccccggggcaaggtggaggtggtgcactgtcgtagaacggaatcacaggacgtgtattgcatcaagagtctgatccgtaagttcacctgtaagcttttcggcaagctcaatataatctacttgctcgagaaggcaaatctcgcagtcactctctgcaacgacaaggaagagattatggcccaggctaccttcttggattatcctaattggaacgtcgcaaaacaagatgactgggtgtccgttttcagggagctcgactctgacatcccctgcacgccgctgaatacgctcttcatgcatttgttcgtcgccgttgacgaatactccgtggggtgttgtaaggaaatcctgaggaccgtttataaagccgtgcccgagttgcatttcatattcttgatcgtccctagctacatgagcttggggtcaacccttatcaccgtctttgaccaggtcggcaatataccgtgtctgacctacgaggaagacttcgcagttcatatctgtcatcgccattctcattaccctcagctgcatgtccggaaagctagggtggaagatcacgacgatttgatgcccatctttatgcggtacgatactatcctgaaagaaacatacggggagtactttttggctgagctgattgaagcacaggatgaggagaaccacgccgtggtgtgtgaagtcgaaggaaccgctgtcggttttatgtccgtttgtagtagagttaatatgcagctgttacatgaatgtttcgacctgggcccctttcatggcttgtgctttccacaccccgatgacgtgttggaaagcccacaggacctgagcgtgcgtaggagccaggacgcggagcttaggagtagcagccagggatcccagaaaatcgtcgaagagctgcaggaaccggtgtctcctgatactatggaaaatattcagggtaacattgccagagaagcagcctcagaagaagccctgacagctgtgcagagcggaaatgtgtctgagccggaagacatcgaaaaactgtccgatatttccacaggatatgcgcagtatcaccacgtctcaagtcgctctcttgcttctctggtgcttccggaagaacctgtacacttcagaccgatttacaggggagcttccgctgcattttgcatccagctattctgcatcgatgagaagtacgaggcccggtcacttgactttatgaactttgtgtttagtctattttccgacaagaatttttgtgtgatcagtttgcctcatttgaccccagagtttttccttattcaaaacttcgtcaaaatggtacccttcaatacctgtactctcgagcaggacctctatgtatttcatagagccgggctgctaaaaaatatttgccttggtaggagcagctag

SEQ ID NO: 322331 - DNA, 1413 bp, Artificial Sequence
  derived and/or modified sequence
atgagcgtgctgaccagcccccggggcaaggtggaggtggtgcactgtcgcagaaccgagtctcaagatgtgtattgtatcaaatccctcattaggaaattcacatgcaagcttttcggaaaacttaatatcatctacctcctggagaaggccaacttggctgtgactctctgtaatgacaaggaggagatcatggcgcaggcaaccttcctcgattaccctaattggaatgtcgccaaacaggatgattgggtgagtgtgttccgcgagttggattccgatatcccctgcacaccgctcaacacactgttcatgcacctgtttgtagcagtcgacgaatatagtgtcggctgttgcaaggagatcctgagaacagtgtacaaggccgtgcctgagctgcacttcatctttctcatcgttcctagctacatgtctctcgggagcacattgatcacggtctttgaccaggtggggaacataccttgcctaacctatgaggaagactttgcagtgcatatctgtcatagacattcccattatccccagctgcatgtccgtaaggcaagagtcgaggatcatgatgatctcatgcctatttttatgaggtatgatacaatcttaaaagaaacttatggcgaatattttctagccgaattgatagaggcacaggacgaagagaaccatgccgttgtgtgtgaagtggagggaacagccgtggggttcatgtcagtttgttctagagtaaacatgcagctcttacatgagtgcttcgaccttggtccttttcacggtttatgtttcccccacccggatgacgtgctggagtccccgcaggatctcagtgtacgcagatcacaagatgctgagctacgctccagttctcaggggtctcagaagattgttgaagaactccaggaacctgtcagccccgatacgatggaaaacatacagggaaatatcgctcgggaagctgcgagcgaagaagccctgacagctgtacagagcgggaatgttagcgaacctgaggacattgagaagctgtccgatatttctaccgggtacgcacaatatcatcatgtgagcagcagatcactcgcttctctggtgctgcctgaagagcctgtacacttccgtcccatttacaggggtgcctcagcagccttctgcattcagctcttttgcattgatgagaagtatgaggctagatccctcgactttatgaactttgtattttctttgttcagcgataagaacttctgcgtcatttcattacctcacctcactccagaattcttcctgatacagaatttcgttaagatggtcccttttaacacttgcacgctggagcaggatctgtatgtgtttcacagggcaggccttctgaaaaatatttgtctcggtaggtcttcttag

SEQ ID NO: 322332 - DNA, 408 bp, Artificial Sequence
  derived and/or modified sequence
atgagcgtgctgaccagcccccggggcaaggtggaggtggtgcactgtcgcaggaccgaatctcaggatgtctattgtatcaaatccctgatccgaaagtttacatgcaagttgtttggaaagcttaatattatttatctattagagaaagcaaatctggctgtgacactctgtaacgataaggaggagataatggcacaggccacattccttgactatcccaactggaatgtagccaagcaggatgattgggtgagtgtcttccgtgaactggactccgacattccttgtactcccctcaatacgctttttatgcaccttttcgtagccgtcgatgaatattccgtggggtgctgcaaggagatcctgcggacggtgtacaaggccgtgcctgaattgcatttctag

SEQ ID NO: 322333 - DNA, 570 bp, Artificial Sequence
  derived and/or modified sequence
atgagcgtactcacctcacccaggggcaaggtcgaagtagtgcactgtcgtcgcacagaatcccaagatgtatactgcatcaaatctttgattaggaagtttacatgtaagctctttggtaaactgaatattatttatctgctcgagaaagccaacctggcggtgaccctgtgtaacgacaaggaggaaatcatggcccaggccacttttcttgattaccccaactggaatgtggctaagcaggatgattgggtctcggtctttcgagagctcgattccgatattccatgtaccccgctgaataccctgttcatgcacctgtttgtcgccgtcgatgagtacagtgtcggatgttgtaaggaaattctgaggaccgtctataaagcggtgcctgaactgcatttcatcttcctgatcgtaccttcatacatgagccttggatccaccctaataacagtatttgaccaggtcggcaatatcccctgcctgacttacgaagaggattttgctgtccacatttgccatcgacactctcattacccccagctccatgtccgcaaggctagatag

SEQ ID NO: 322334 - DNA, 1413 bp, Artificial Sequence
  derived and/or modified sequence
atgtcagtgctgacgagtcctcgtggaaaagttgaagtcgtccactgtaggcggacagaatcacaggatgtatattgcataaagtccctcatcagaaaatttacgtgcaagctcttcggaaaactcaatataatctacctcctggaaaaggcaaacctggccgtgacactgtgtaacgataaagaggaaatcatggcacaggccacatttttagattaccctaactggaacgtggcaaagcaggatgactgggtatccgtcttcagggaactggattccgatattccttgtactcctttaaatacactctttatgcatctcttcgtcgccgtggacgaatactctgtcggatgctgcaaagagatcttaaggaccgtctataaagccgtgcctgaactgcacttcatcttcctgatcgtgccaagttatatgtcactggggagcacattgattacggtgttcgaccaggttggcaatatcccttgtctgacatacgaggaggatttcgcggtacacatatgccaccgccactctcactaccctcagctccacgtgcgcaaggccagagtcgaggaccatgatgaccttatgcccatcttcatgcgctatgatactattcttaaggagacgtacggtgaatactttctggccgaattaattgaagctcaagacgaggaaaaccatgctgtggtttgcgaggtggaaggcaccgctgtgggttttatgtccgtatgtagtcgagtgaacatgcaactgctgcacgagtgctttgatttaggcccttttcacgggctctgttttccgcaccccgatgatgtattagagagcccacaggatttgtcagtgcggaggagccaggacgctgaactgcgttccagttcgcaaggatcacaaaaaattgtggaagaactgcaggaacctgtgtctccagacacaatggaaaacattcagggaaacatcgctcgagaggccgcttccgaggaagccttaaccgccgtccagagtggtaacgtctctgaaccagaggatatcgaaaagctcagtgacattagcaccgggtatgcccagtatcaccacgtaagctcccggtccttagctagtttagtgttgccagaggagcccgtacactttcggcctatataccgtggcgcatcggccgcattctgtatccagctattctgtattgatgagaagtatgaggcacggagcctagatttcatgaattttgtattttccctcttttccgacaagaatttttgtgtaatctcactccctcacctcacccccgagttcttcttgattcagaactttgttaagatggtcccattcaatacatgcaccttagagcaagacttatatgtctttcacagggcaggtcttctgaagaacatatgtcttggcagatcctcttag

SEQ ID NO: 322335 - DNA, 1413 bp, Artificial Sequence
  derived and/or modified sequence
atgtctgtactgacgagtcccagggggaaggtcgaggtcgtacactgtaggaggacggagagccaggacgtctactgtattaagagtctaatccgcaagttcacttgtaaactgttcggcaaactgaatattatatacctcctagaaaaggctaatctcgccgttactctgtgtaatgacaaggaggaaatcatggcccaggccactttcctcgattacccgaactggaatgtggccaagcaggacgattgggttagcgtgttccgtgagctcgattcggacataccgtgtaccccgcttaatactcttttcatgcatctcttcgtcgctgtcgatgaatactctgtcggttgttgcaaggagatcttgcgcacagtctacaaggccgttcctgagctccacttcatttttctgattgtgccaagctacatgagcctcggctctaccctgatcacggtttttgatcaggtggggaatatcccctgtcttacttatgaagaggacttcgcagtgcacatttgccaccgtcattctcactatcctcaattgcacgtccggaaggctagggtggaagatcacgacgatcttatgccgattttcatgcggtacgacactattcttaaggagacctatggcgagtacttcctggcagaactgatcgaagcacaggacgaagaaaaccacgccgtggtctgcgaagtggagggaacagccgtgggtttcatgagcgtctgctcgagagtcaatatgcagttactccatgaatgctttgatctaggtccatttcatggcctctgtttcccacacccggacgacgtgctcgagtctccacaggacttaagtgtacgtcgtagtcaagatgcagagctacgtagcagctctcagggctcgcagaagatcgtggaggagctccaggagcccgttagccctgacaccatggagaacattcaaggcaacatcgctcgcgaggccgcttcagaggaggcattgactgcggtccagtccggcaacgtgtccgagcccgaggacatcgaaaagcttagtgacatctctacaggatacgcacagtaccaccatgtatcatccagatcactggcctcccttgtgctcccagaggagcccgtgcatttccgtccaatttatcgtggcgctagcgccgctttctgtatccagttattttgcatcgatgaaaagtatgaagccaggtccctggactttatgaatttcgtcttttccttgttcagtgacaagaacttctgcgtgataagtctgccacatctcacacctgagtttttccttatccaaaacttcgtgaagatggtgcctttcaatacgtgcacactggagcaggatctgtacgtctttcatcgcgctggcctgttaaagaacatttgtttgggaagatccagctag

SEQ ID NO: 322336 - DNA, 408 bp, Artificial Sequence
  derived and/or modified sequence
atgtcagtcctcacctctccacggggtaaagtggaggtggttcattgcaggcgcactgagtcccaagatgtttactgcataaagtcactgatccgcaaattcacttgcaagcttttcggcaaactgaacataatctatctgctggagaaagcgaaccttgctgtgacgctgtgtaatgacaaagaggagattatggcccaggccaccttcctagactatcccaattggaatgtggccaaacaggatgactgggtcagcgtgtttagggagcttgatagcgacataccgtgcactcctctcaacaccctgttcatgcacctttttgtggctgtggacgaatatagcgtggggtgctgcaaagaaatcttgaggacggtgtataaggctgtgcccgaattgcacttttag

SEQ ID NO: 322337 - protein, 187 aa, Artificial Sequence
  derived and/or modified sequence
MSGGGHGGVCFLCCILLQGRKGVWLRLRKILFCVLGLYIAIPFLIKLCPGIQAKLIFLNFVRVPYFIDLKKPQDQGLNHTCNYYLQPEEDVTIGVWHTVPAVWWKNAQGKDQMWYEDALASSHPIILYLHGNAGTRGGDHRVELYKVLSSLGYHVVTFDYRGWGDSVGTPSERGMTYDALHVFDWIK

SEQ ID NO: 322338 - protein, 113 aa, Artificial Sequence
  derived and/or modified sequence
MASSRRGLLLLLLLTAHLGPSEAQHWSHGWYPGGKRALSSAQDPQNALRPPAGSPVQTAHGLPSDALAPLDDSMPWEGRTTAQWSLHRKRHLARTLLTAAREPRPAPPSSNKV

SEQ ID NO: 322339 - DNA, 758 bp, Artificial Sequence
  derived and/or modified sequence
gagaactcccctgaccatccatctatcctcccatccattggcctgaattcaggtctctgttcccctccaactttcttccacttctggaaactccttgaaggaaagatggatggacctggacaagtgggagggccctcagagctggcaaggcaggtagcctctgtgccccaggctcagggagaaggctcgtcccctggagcatcatcccctgctgggccaggatcccccaggatctggacccctgtatgcttgggatgaggagcggtggcagagagggaagggcataaggagataccaaagctgcccctgagatgccagttttccaaagtggccctggaggaagtagggggatgtgggggtgaggtaagtctccttgaatgctgtaccctgtccattagagcagccatggccagctccaggcgaggcctcctgctcctgctgctgctgactgcccaccttggaccctcagaggctcagcactggtcccatggctggtaccctggaggaaagcgagccctcagctcagcccaggatccccagaatgcccttaggcccccagcaggcagcccagtccagactgcccatggcctcccaagtgatgccctggctcccctggacgacagcatgccctgggagggcaggaccacggcccagtggtcccttcacaggaagcgacacctggcacggacactgctgaccgcagcccgagagccccgccccgccccgccatcctccaataaagtgtgaggttctccgaa

SEQ ID NO: 322340 - protein, 140 aa, Artificial Sequence
  derived and/or modified sequence
MASVDFKTYVDQACRAAEEFVNVYYTTMDKRRRLLSRLYMGTATLVWNGNAVSGQESLSEFFEMLPSSEFQISVVDCQPVHDEATPSQTTVLVVICGSVKFEGNKQRDFNQNFILTAQASPSNTVWKIASDCFRFQDWAS

SEQ ID NO: 322341 - DNA, 423 bp, Artificial Sequence
  derived and/or modified sequence
atggcctctgtcgattttaaaacctatgtggaccaggcctgccgcgcagccgaggaatttgtcaacgtttactacactacgatggacaagcggagaaggctcctatcgaggctttacatgggtactgccactcttgtatggaatggtaacgctgtgtccggccaagagtccctttcggagttcttcgagatgctgcctagctctgagttccagatcagcgtcgttgactgccagcccgtgcacgacgaagctactccttctcagactaccgtgcttgtggtgatctgcggaagcgtcaagtttgaggggaataagcagcgcgacttcaatcagaacttcatactgacagcccaggcctccccctctaatactgtctggaagatcgcctccgattgctttagattccaggactgggctagctag

SEQ ID NO: 322342 - DNA, 423 bp, Artificial Sequence
  derived and/or modified sequence
atggcctctgtggacttcaagacctacgtggaccaggcctgcagagctgctgaggagtttgtgaatgtgtactacaccaccatggacaagagaagaaggctgctgagccggctgtacatgggcacagccaccctggtgtggaatggaaatgctgtgtctggccaggagagcctgtctgagttctttgagatgctgcccagcagcgagttccagatctctgtggtggactgccagcctgtgcatgatgaggccacccccagccagaccaccgtgctggtggtgatctgtggctctgtgaagtttgagggcaacaagcagagggacttcaaccagaacttcatcctgacagcccaggccagccccagcaacacagtgtggaagatcgccagtgactgcttccgcttccaggactgggccagctag

SEQ ID NO: 322343 - DNA, 423 bp, Artificial Sequence
  derived and/or modified sequence
atggccagcgtggacttcaagacctacgtggaccaggcctgccgggctgcagaagaattcgtaaacgtctactatacaactatggacaagaggagacggctgctgagccggctgtacatgggcacggcaactctggtgtggaacgggaatgcggtgtctggacaggagtccctaagcgagtttttcgagatgctgcccagttccgaattccaaatatcagttgtggactgccaacctgtccacgacgaagccactccctctcaaactacagtcctggttgtcatatgcggtagcgtgaaattcgaaggcaacaaacagagagactttaaccagaactttatcctcaccgcccaggcctcaccaagtaatacagtttggaagatagcatcagactgctttaggtttcaggattgggccagctag

SEQ ID NO: 322344 - DNA, 1123 bp, Artificial Sequence
  derived and/or modified sequence
ggctgacttcgctgcccgtcacgggaatgcgggagagggcggcgccggggcgctcgcgtctgcgtggagaccggctggccgcgcgcgggaagccgcggaactgcgccggaaagtcccccggctctggggccccggtgacccagagtaagcctccaagaaggaggaggaggagagaaaggcggctcttcccgtgcccctaccagaggcttcggtgggcccaccttgtgacctccgcggccggcccctcagtggaactgcgtcccacgcggggggcgtcccgaccgtgggggccgcggcccgcgctgaccctggacgtcgccgcgcagcccctggttccccaaggcagaggaaataccctggtggagccctccttccatagaaccagagatggcatctgtggatttcaagacctatgtggatcaggcctgcagagctgctgaggagtttgtcaatgtctactacaccaccatggataagcggcggcgtttgctgtcccgcctgtacatgggcacagccaccctggtctggaatggcaatgctgtttcaggacaagaatccttgagtgagttttttgaaatgttgccttccagcgagttccaaatcagcgtggtagactgccagcctgttcatgatgaagccacaccaagccagaccacggtccttgttgtcatctgtggatcagtgaagtttgaggggaacaaacaacgggacttcaaccagaacttcatcctgaccgcccaggcctcacccagcaacacagtgtggaagatcgcaagtgactgcttccgcttccaggactgggccagctagtgggggtggcagaggtctctttgcttcattcagccctagctctgtagagaaatgcaaacctcgactctcaaggatgtgaggaacacaagttcatttctgttgttgcggagacactgcagactccactgtgccgaggttgaactcttttttgttgctcaagttctaggagtccctttcctgaatatatacttgtttgtcatagtttccttttcaaagtagtaaacttttctatttttctacttgcccagtagagactctgattctggaaattctgacaaataatttaataatacacatgttgcttctttccctg

SEQ ID NO: 322345 - DNA, 423 bp, Artificial Sequence
  derived and/or modified sequence
atggcttccgttgactttaagacgtacgtggaccaggcatgccgggctgccgaggagtttgtgaacgtgtactataccacgatggacaagcgcagaagactgctaagtcgcctgtatatgggtacggccacactagtgtggaatgggaatgctgtgtcaggccaggaaagcctgtctgagttctttgagatgctgccctcgtctgagttccagattagcgttgtcgactgtcaaccagtgcacgacgaggcaaccccaagccaaaccacggttctcgtggtcatctgtgggagcgtcaagttcgagggtaacaagcaaagagactttaatcagaacttcattctcaccgcccaggcaagcccttcaaataccgtttggaagatagcaagtgactgtttccgcttccaagactgggccagctag

SEQ ID NO: 322346 - DNA, 423 bp, Artificial Sequence
  derived and/or modified sequence
atggccagcgtggacttcaagacctacgtggaccaggcctgcagagccgccgaggagttcgtgaacgtgtactacaccaccatggacaagagaagaagactgctgagcagactgtacatgggcaccgccaccctggtgtggaacggcaacgccgtgagcggccaggagagcctgagcgagttcttcgagatgctgcccagcagcgagttccagatcagcgtggtggactgccagcccgtgcacgacgaggccacccccagccagaccaccgtgctggtggtgatctgcggcagcgtgaagttcgagggcaacaagcagagagacttcaaccagaacttcatcctgaccgcccaggccagccccagcaacaccgtgtggaagatcgccagcgactgcttcagattccaggactgggccagctag

SEQ ID NO: 322347 - protein, 343 aa, Artificial Sequence
  derived and/or modified sequence
MLGAVKMEGHEPSDWSSYYAEPEGYSSVSRARDPKTYRRSYTHAKPPYSYISLITMAIQQSPNKMLTLSEIYQWIMDLFPFYRQNQQRWQNSIRHSLSFNDCFLKVPRSPDKPGKGSFWTLHPDSGNMFENGCYLRRQKRFKCEKQLALKEAAGAAGSGKKAAAGAQASQAQLGEAAGPASETPAGTESPHSSASPCQEHKRGGLGELKGTPAAALSPPEPAPSPGQQQQAAAHLLGPPHHPGLPPEAHLKPEHHYAFNHPFSINNLMSSEQQHHHSHHHHQPHKMDLKAYEQVMHYPGYGSPMPGSLAMGPVTNKTGLDASPLAADTSYYQGVYSRPIMNSS

SEQ ID NO: 322348 - DNA, 1128 bp, Artificial Sequence
  derived and/or modified sequence
agtatgctgggagcggtgaagatggaagggcacgagccgtccgactggagcagctactatgcagagcccgagggctactcctccgtgagccgcgcccgcgaccccaagacctacaggcgcagctacacgcacgcaaagccgccctactcgtacatctcgctcatcaccatggccatccagcagagccccaacaagatgctgacgctgagcgagatctaccagtggatcatggacctcttccccttctaccggcagaaccagcagcgctggcagaactccatccgccactcgctctccttcaacgactgtttcctgaaggtgccccgctcgcccgacaagcccggcaagggctccttctggaccctgcaccctgactcgggcaacatgttcgagaacggctgctacctgcgccgccagaagcgcttcaagtgcgagaagcagctggcgctgaaggaggccgcaggcgccgccggcagcggcaagaaggcggccgccggagcccaggcctcacaggctcaactcggggaggccgccgggccggcctccgagactccggcgggcaccgagtcgcctcactcgagcgcctccccgtgccaggagcacaagcgagggggcctgggagagctgaaggggacgccggctgcggcgctgagccccccagagccggcgccctctcccgggcagcagcagcaggccgcggcccacctgctgggcccgccccaccacccgggcctgccgcctgaggcccacctgaagccggaacaccactacgccttcaaccacccgttctccatcaacaacctcatgtcctcggagcagcagcaccaccacagccaccaccaccaccaaccccacaaaatggacctcaaggcctacgaacaggtgatgcactaccccggctacggttcccccatgcctggcagcttggccatgggcccggtcacgaacaaaacgggcctggacgcctcgcccctggccgcagatacctcctactaccagggggtgtactcccggcccattatgaactcctcttaagaagacgacggcttcaggcccggctaactctggcaccccggatcgaggacaagtgagagagcaagtgggggtcgagactttggggagacggtg

SEQ ID NO: 322349 - DNA, 1032 bp, Artificial Sequence
  derived and/or modified sequence
atgctgggcgcagtaaagatggagggacacgaaccttccgattggagttcctactatgctgaaccggagggatattcttccgtgtccagagcacgagatccaaagacctaccgaaggagctatacccacgcaaagccaccgtattcttacatatccctgatcactatggccatacagcagagcccgaataagatgctgacactttccgaaatctaccagtggatcatggatctgttccccttctaccggcagaatcaacagaggtggcagaattctatcaggcattctctgtctttcaatgactgctttcttaaggtgcctcggtccccggacaagccagggaagggctcattctggactctccacccagacagtggcaatatgttcgagaatgggtgttatttgcgacgacagaagagatttaaatgtgaaaagcagctggcgctcaaggaggccgccggggctgctggatctgggaagaaagccgccgctggcgcccaggcctcacaggcccagctgggggaagctgccggcccagcaagtgaaacgcccgccggtacagaaagtccacattcttctgcttctccctgtcaggaacacaagagaggcgggttaggcgagctcaaagggaccccagcagctgctctctctcccccagaacctgcaccgtctcctggacagcagcaacaggccgctgcccacttactagggccccctcaccaccctggcctcccaccagaagcacacctcaaacctgaacaccactacgcattcaaccatccgttttccatcaataatttaatgagcagcgaacagcaacatcaccatagtcatcatcaccaccagccccacaaaatggacctaaaagcctatgagcaggtcatgcattaccctgggtacggaagtcccatgcctggtagtctggccatgggcccagttactaacaaaaccggcctcgatgcctctccgcttgccgccgacacttcgtactatcaaggagtctacagtcgtcctattatgaattcctcgtag

SEQ ID NO: 322350 - DNA, 1032 bp, Artificial Sequence
  derived and/or modified sequence
atgctgggcgctgtgaagatggagggccacgagcccagcgactggagcagctactatgcagagcctgagggctacagctctgtgtcccgggcccgggaccccaagacctaccgccgcagctacacccacgccaagccaccctacagctacatcagcctcatcaccatggccatccagcagagccccaacaagatgctgaccctgtctgagatctaccagtggatcatggacctcttccccttctaccggcagaaccagcagcgctggcagaacagcatccgccacagcctgtccttcaatgactgcttcctgaaggtgcccaggagcccagacaagccaggcaagggcagcttctggaccctgcacccagattctggcaacatgtttgaaaatggctgctacctgcggcggcagaagcgcttcaagtgtgagaagcagctggccctgaaggaggccgccggggccgccggcagcggcaagaaggctgctgctggggcccaggccagccaggcccagctgggggaggccgccggccctgccagcgagaccccagctggaacagagagcccccacagcagcgccagcccctgccaggagcacaagagaggaggcctgggggagctgaagggcaccccagctgctgccctgagccccccagagcccgcccccagccctggccagcagcagcaggccgccgcccacctgctgggccccccccaccaccctggcctgcccccagaggcccacctgaagccagagcaccactacgccttcaaccaccccttcagcatcaacaacctgatgagcagcgagcagcagcaccaccacagccaccaccaccaccagccccacaagatggacctgaaggcctatgagcaggtgatgcactacccaggctacggcagccccatgcctggcagcctggccatgggccctgtgaccaacaagacaggcctggatgccagccccctggccgctgacaccagctactaccagggcgtgtacagccggcccatcatgaacagcagctag

SEQ ID NO: 322351 - DNA, 1032 bp, Artificial Sequence
  derived and/or modified sequence
atgctgggcgccgtgaagatggagggccacgagcccagcgactggagtagttattatgccgaacccgaaggctattcaagcgtgtccagagctagagacccaaaaacctatcgcagatcatatacccacgcgaagcctccttacagctacatcagcctgattacgatggcgatccagcagtcgccgaacaagatgctaaccctctctgagatttaccagtggatcatggacctgttcccattctatagacaaaatcagcaacgctggcaaaactcaatcagacactcccttagcttcaacgattgtttcctaaaggtgccaagaagtccagacaagccaggaaaaggatccttctggacactgcaccccgactccggtaatatgtttgaaaatgggtgttatctcagaagacagaagcgttttaagtgtgaaaaacagctcgccctgaaagaggcagctggggcagcaggctctgggaaaaaggcggccgcaggtgcccaggcctcccaggcgcaactgggtgaagcagccggacctgcgtcggagacgcctgccggaactgaatcaccccacagttccgcttcaccgtgccaggagcacaagcgcggagggcttggtgaactgaaaggtactccagccgctgccctgagcccgccggagccagctcccagtcccggccagcagcaacaagccgccgcccacctgttgggcccgccgcaccaccccgggctgccaccagaggcacatcttaagcctgagcaccattacgcatttaaccaccccttctccatcaacaacctgatgagtagcgagcagcagcatcaccactcacaccatcaccaccagcctcacaagatggatttgaaggcttatgaacaagtcatgcattaccctggatacggttcccctatgccgggcagcctggctatgggccctgtgacaaataaaactgggctggacgccagtcctcttgccgcagacacctcatattaccaaggtgtctacagcaggcctattatgaacagctcttag

SEQ ID NO: 322352 - DNA, 1032 bp, Artificial Sequence
  derived and/or modified sequence
atgctcggggctgtgaaaatggagggacacgaacctagcgattggagtagctactacgctgaacccgagggatactcttctgtatcaagagctagagacccaaagacataccggaggtcctatactcacgcgaaaccaccgtattcctatatttcactgatcacgatggctatccaacagtccccaaacaaaatgctcactttgtccgaaatataccagtggatcatggatctctttcccttctacaggcaaaaccaacagaggtggcaaaatagtatccggcactctctgagtttcaatgactgttttctgaaagtgccgaggtctccagacaagcctggtaagggcagtttctggacgcttcacccagacagcggaaatatgttcgaaaacggctgctacctgagaaggcaaaaacgatttaagtgcgagaagcagctggcactcaaggaagcagcgggagcggcaggcagcggcaagaaagcggctgccggagctcaagcctcccaggctcagcttggagaagctgcaggcccagcctccgagacaccggcaggcacagaaagtccccactcctctgcttctccctgccaagagcataagaggggtggtctgggcgaactgaaaggtactcccgcagctgccctcagtcctccagaacccgcaccgagcccaggacaacagcagcaagctgccgctcacttactgggccctccccaccacccaggcctccccccagaggctcacctgaagcctgagcatcattacgcgttcaaccatccattctccataaacaacctcatgagctctgaacagcaacaccaccattctcaccatcaccatcagcctcataagatggatcttaaggcttacgagcaggtgatgcattatccagggtatggaagccccatgcctgggagcctggccatgggaccagtgaccaacaagaccgggctggatgccagccctcttgccgctgacacaagctattatcagggggtctactctcggcctatcatgaattcttcatag

SEQ ID NO: 322353 - DNA, 1032 bp, Artificial Sequence
  derived and/or modified sequence
atgctgggcgccgtgaagatggagggccacgagcccagcgactggagcagctactacgccgagcccgagggctacagcagcgtgagcagagccagagaccccaagacctacagaagaagctacacccacgccaagcccccctacagctacatcagcctgatcaccatggccatccagcagagccccaacaagatgctgaccctgagcgagatctaccagtggatcatggacctgttccccttctacagacagaaccagcagagatggcagaacagcatcagacacagcctgagcttcaacgactgcttcctgaaggtgcccagaagccccgacaagcccggcaagggcagcttctggaccctgcaccccgacagcggcaacatgttcgagaacggctgctacctgagaagacagaagagattcaagtgcgagaagcagctggccctgaaggaggccgccggcgccgccggcagcggcaagaaggccgccgccggcgcccaggccagccaggcccagctgggcgaggccgccggccccgccagcgagacccccgccggcaccgagagcccccacagcagcgccagcccctgccaggagcacaagagaggcggcctgggcgagctgaagggcacccccgccgccgccctgagcccccccgagcccgcccccagccccggccagcagcagcaggccgccgcccacctgctgggccccccccaccaccccggcctgccccccgaggcccacctgaagcccgagcaccactacgccttcaaccaccccttcagcatcaacaacctgatgagcagcgagcagcagcaccaccacagccaccaccaccaccagccccacaagatggacctgaaggcctacgagcaggtgatgcactaccccggctacggcagccccatgcccggcagcctggccatgggccccgtgaccaacaagaccggcctggacgccagccccctggccgccgacaccagctactaccagggcgtgtacagcagacccatcatgaacagcagctag

SEQ ID NO: 322354 - protein, 125 aa, Artificial Sequence
  derived and/or modified sequence
MAGPSLACCLLGLLALTSACYIQNCPLGGKRAAPDLDVRKCLPCGPGGKGRCFGPNICCAEELGCFVGTAEALRCQEENYLPSPCQSGQKACGSGGRCAVLGLCCSPDGCHADPACDAEATFSQR

SEQ ID NO: 322355 - DNA, 378 bp, Artificial Sequence
  derived and/or modified sequence
atggccggcccgtctctggcatgttgcctcctgggactactcgccctgacctcagcgtgttatatacaaaactgccccctgggggggaagagagctgctccagacctggatgtgagaaaatgtctgccttgtgggccaggaggaaagggccggtgctttggccccaacatttgttgcgccgaggaactggggtgtttcgtgggaacggccgaggccctcagatgccaagaagaaaactacctcccctctccctgccagagtggccagaaggcttgcggatcaggtggcaggtgtgcggtcctggggctgtgctgtagccccgatggttgccacgctgatcccgcttgcgatgcggaagccacgttctctcagcgttag

SEQ ID NO: 322356 - DNA, 378 bp, Artificial Sequence
  derived and/or modified sequence
atggccggccccagcctggcctgctgcctgctgggcctgctggccctgaccagcgcctgctacatccagaactgccccctgggcggcaagagagctgccccagacctggatgtgaggaagtgcctgccctgtggccctgggggcaagggccgctgcttcggccccaacatctgctgtgccgaggagctgggctgctttgtgggcacagctgaggccctgcgctgccaggaggagaactacctgcccagcccctgccagagcggccagaaggcctgtggcagcggcggccgctgtgctgtgctgggcctgtgctgcagcccagatggctgccacgccgaccctgcctgtgatgctgaggccaccttcagccagaggtag

SEQ ID NO: 322357 - DNA, 378 bp, Artificial Sequence
  derived and/or modified sequence
atggccggccccagcctggcctgctgcctgctgggcctgctggccctcacttccgcttgctacatccaaaattgccctttaggtggcaaaagggccgcccctgacctggatgtcaggaaatgtttaccatgtgggccaggcggcaagggccggtgctttggtccaaatatctgctgcgccgaagagctgggatgcttcgtggggaccgcagaagcacttcggtgccaagaggagaactatctgccgtcaccttgccaaagcggacagaaagcctgtggaagcggtggtcgatgtgctgttctaggtctctgttgctccccagatggatgccatgccgaccctgcgtgcgatgcggaggccactttctctcagcggtag

SEQ ID NO: 322358 - DNA, 513 bp, Artificial Sequence
  derived and/or modified sequence
accagtcacggaccctggacccagcgcacccgcaccatggccggccccagcctcgcttgctgtctgctcggcctcctggcgctgacctccgcctgctacatccagaactgccccctgggaggcaagagggccgcgccggacctcgacgtgcgcaagtgcctcccctgcggccccgggggcaaaggccgctgcttcgggcccaatatctgctgcgcggaagagctgggctgcttcgtgggcaccgccgaagcgctgcgctgccaggaggagaactacctgccgtcgccctgccagtccggccagaaggcgtgcgggagcgggggccgctgcgcggtcttgggcctctgctgcagcccggacggctgccacgccgaccctgcctgcgacgcggaagccaccttctcccagcgctgaaacttgatggctccgaacaccctcgaagcgcgccactcgcttcccccatagccaccccagaaatggtgaaaataaaataaagcaggtttttctcctcta

SEQ ID NO: 322359 - DNA, 378 bp, Artificial Sequence
  derived and/or modified sequence
atggccggaccttctctggcctgttgtctcttgggcctgcttgccctgacttctgcttgttatatccagaactgccccctgggcggaaagagggccgctcctgatttggacgtccggaagtgcctgccctgtgggccaggaggtaagggaaggtgctttggcccaaatatatgttgtgccgaggagcttgggtgtttcgtaggtacagccgaggccctgcgctgccaggaggaaaattacttacctagcccctgccagagtgggcagaaagcctgtggcagtggtggccgatgtgccgtcctggggctctgctgttctccggatggttgtcatgctgatccagcctgcgacgcagaggcgacatttagccagagatag

SEQ ID NO: 322360 - DNA, 378 bp, Artificial Sequence
  derived and/or modified sequence
atggccggccccagcctggcctgctgcctgctgggcctgctggccctgaccagcgcctgctacatccagaactgccccctgggcggcaagagagccgcccccgacctggacgtgagaaagtgcctgccctgcggccccggcggcaagggcagatgcttcggccccaacatctgctgcgccgaggagctgggctgcttcgtgggcaccgccgaggccctgagatgccaggaggagaactacctgcccagcccctgccagagcggccagaaggcctgcggcagcggcggcagatgcgccgtgctgggcctgtgctgcagccccgacggctgccacgccgaccccgcctgcgacgccgaggccaccttcagccagagatag

SEQ ID NO: 322361 - protein, 254 aa, Artificial Sequence [sequence omitted]

SEQ ID NO: 322362 - DNA, 765 bp, Artificial Sequence
  derived and/or modified sequence
atggcctggcagggcctggtgctggccgcctgcctgctgatgttccccagcaccaccgccgactgcctgagcagatgcagcctgtgcgccgtgaagacccaggacggccccaagcccatcaaccccctgatctgcagcctgcagtgccaggccgccctgctgcccagcgaggagtgggagagatgccagagcttcctgagcttcttcacccccagcaccctgggcctgaacgacaaggaggacctgggcagcaagagcgtgggcgagggcccctacagcgagctggccaagctgagcggcagcttcctgaaggagctggagaagagcaagttcctgcccagcatcagcaccaaggagaacaccctgagcaagagcctggaggagaagctgagaggcctgagcgacggcttcagagagggcgccgagagcgagctgatgagagacgcccagctgaacgacggcgccatggagaccggcaccctgtacctggccgaggaggaccccaaggagcaggtgaagagatacggcggcttcctgagaaagtaccccaagagaagcagcgaggtggccggcgagggcgacggcgacagcatgggccacgaggacctgtacaagagatacggcggcttcctgagaagaatcagacccaagctgaagtgggacaaccagaagagatacggcggcttcctgagaagacagttcaaggtggtgaccagaagccaggaggaccccaacgcctacagcggcgagctgttcgacgcctag

SEQ ID NO: 322363 - DNA, 765 bp, Artificial Sequence
  derived and/or modified sequence
atggcctggcagggtctagtactggccgcctgccttctgatgtttcccagcacaactgcagattgcctctctagatgtagtttatgcgctgtaaagacacaggatggacccaaaccaattaaccccctgatttgctccctgcagtgtcaggccgcgttgctccccagcgaggagtgggagcggtgtcagtcttttttatccttttttactccaagcacccttggccttaacgacaaggaagatcttggcagtaagtccgttggcgaggggccttacagcgaacttgctaaactatccggaagcttcttgaaagaactggagaaaagcaagtttttgccatccataagtacaaaagaaaacacactgtccaagagtcttgaggagaaacttaggggactgagtgatggattccgcgagggagccgaaagtgagcttatgcgggacgcacaactgaacgatggtgctatggagaccggaactctgtatctagccgaagaggaccccaaagaacaggtcaagcgctatggtggtttcctcagaaaataccctaaaagatcttcagaggttgcaggcgaaggagacggggattctatgggccacgaagacctgtacaaaagatacgggggctttctcagacgtatccgcccaaagcttaagtgggacaaccagaaacgctacggcggatttcttcgacgacagttcaaggtggtgaccaggtcccaagaggaccccaacgcctacagcggtgagctttttgatgcttag

SEQ ID NO: 322364 - DNA, 765 bp, Artificial Sequence
  derived and/or modified sequence
atggcctggcagggcctggtgctggccgcctgcctgctgatgttccccagcaccacagctgactgcctgagccgctgcagcctgtgtgctgtgaagacccaggacggccccaagcccatcaaccccctcatctgcagcctgcagtgccaggccgccctgctgcccagcgaggagtgggagcgctgccagagcttcctgtccttcttcacccccagcaccctgggcctgaatgacaaggaggacctgggcagcaagtctgtgggggagggcccctacagcgagctggccaagctgagcggcagcttcctgaaggagctggagaagagcaagttcctgcccagcatcagcaccaaggagaacaccctgagcaagagcctggaggagaagctgcggggcctgagtgatggcttccgggagggcgctgagagcgagctgatgagagatgcccagctgaatgatggagccatggagaccggcaccctgtacctggccgaggaggaccccaaggagcaggtgaagagatatggaggcttcctgaggaagtaccccaagaggagcagcgaggtggccggggagggagatggagacagcatgggccatgaagatctctacaagagatatggaggcttcctgcggcgcatccggcccaagctgaagtgggacaaccagaagagatatggaggcttcctgcggcggcagttcaaggtggtgaccaggagccaggaggaccccaatgcctacagcggggagctgtttgatgcctag

SEQ ID NO: 322365 - DNA, 765 bp, Artificial Sequence
  derived and/or modified sequence
atggcctggcagggcctggtgctggccgcctgcctgctgatgttcccttccaccacggcagactgtctgtcgaggtgttccctgtgtgccgtgaagacgcaagacggcccaaaaccgataaacccactaatctgcagccttcaatgccaagcagcgctgctgccttccgaggagtgggaacgctgtcagtcatttctgagcttctttacgccctctaccctcggcctcaacgataaggaagatctggggtcaaaaagcgttggagagggaccatactctgaacttgcgaagctgtccggcagcttcctcaaagagctggagaagtccaagttcttgcccagcattagcacgaaggagaatacactctccaagtcgctcgaggaaaaactacgcggcttaagcgacggattcagagagggagcggaatctgagctgatgagagatgcccaacttaatgatggtgccatggaaacaggaaccctgtatttggctgaagaggaccccaaagagcaggtcaagcgatatggaggattcctgaggaagtacccaaagagatcttctgaagtagcaggcgaaggtgatggggactccatgggccatgaagacctgtataagaggtatggcggcttccttcggcggatacgaccgaaacttaagtgggataaccagaaaagatacggaggattcctgcgacgacaattcaaagtggtcacaagatcacaggaggacccaaacgcctacagtggcgagctgtttgatgcgtag

SEQ ID NO: 322366 - DNA, 765 bp, Artificial Sequence
  derived and/or modified sequence
atggcttggcaaggcctcgtgctggccgcatgtctcctgatgttcccttcaacaactgccgactgcctgtccaggtgcagcttgtgcgccgtgaaaacacaggatggcccaaaacccatcaacccacttatctgctcacttcagtgccaggccgctttgctgccgagtgaagaatgggagcgatgtcagagtttcctgtctttttttacgccttctactcttggattgaatgacaaggaggatctcggcagtaaaagcgtgggcgagggcccttacagcgaattggcaaaactgagcgggtccttcttaaaagaattggaaaaaagtaaatttttgccgtccatctcgaccaaggagaacaccctgtctaaaagcctagaagagaaactgagaggcctgtccgacggcttcagggagggggcagaatcagagttaatgagggacgcacagctcaatgacggagctatggagacaggtactctctacctagccgaggaagacccgaaggaacaggtaaagaggtatggcggatttctccggaagtatcccaaaaggagcagtgaggttgcgggtgagggcgacggagacagcatggggcacgaggacctgtacaaaaggtatggtggcttcttgaggagaatcaggcctaaactgaagtgggataaccagaaacggtacgggggattccttcgcaggcaatttaaagtggtgactcggagccaagaagatcccaacgcatatagtggcgagctgttcgatgcctag

SEQ ID NO: 322367 - DNA, 765 bp, Artificial Sequence
  derived and/or modified sequence
atggcatggcaaggactggtattggcggcatgcttgctgatgttcccatcaacaacggcagactgcctgtctcgatgctctctgtgcgccgtgaagacccaggatgggccgaagccgattaaccctctgatctgtagtctgcagtgccaagctgccttgctgccttctgaggagtgggagaggtgccagtcctttctcagtttttttacaccgtccacactgggtctcaacgacaaggaagatttgggttctaaatccgtgggagaaggtccctatagcgaactggccaaattatctgggtcctttctgaaggaactagagaaaagcaaatttcttccctctatcagcactaaggaaaacacactgtccaaatctctggaggagaagctgagaggtctctctgacggattccgcgagggtgccgagtcagaattaatgagggatgcacaacttaatgatggcgcaatggaaaccggcacattgtacttggctgaagaggacccaaaggagcaggttaaacgatatggaggattcctccggaaataccctaaacgctcaagtgaagtcgcaggtgaaggggatggtgactctatgggccacgaggatctatacaaacggtacggagggtttctgcggagaattaggcctaaactgaagtgggacaatcaaaagcgctatggcggtttcctgcgccgccagtttaaagtggttactagatcgcaggaggatccaaacgcctactcaggtgagctgtttgatgcttag

SEQ ID NO: 322368 - DNA, 765 bp, Artificial Sequence
  derived and/or modified sequence
atggcatggcagggcctcgtacttgctgcgtgcctgctcatgttcccaagcactactgctgattgcttgtccagatgttctttgtgtgctgtaaagacccaagatggacccaagccaattaatcccctcatttgttccctccaatgccaggccgcgcttctgccttcagaggagtgggaacgctgtcagagtttcttgtccttctttaccccatcaacactggggctgaacgacaaagaagatttggggtcaaaatcagtcggggaagggccatactctgaactggcaaaactgtctgggtcattcctgaaggagctcgagaagtccaaattcctcccctctatatctactaaagagaacactctctcaaaaagcctggaggaaaagctccgtggcttatctgatggtttccgagagggggctgagtcagagctaatgagggatgcccagctcaacgatggcgcaatggagaccggtacactctacctggccgaagaggatccaaaggagcaagtaaaaagatatggaggatttctgaggaaataccccaagagatcctcagaggtggcgggcgaaggcgatggagatagtatgggacacgaggacctgtataagcggtacggcggtttcttacggcggatacggcctaaattgaagtgggacaaccagaaacgctatggcggtttccttcggcgccaattcaaggtcgttacaagaagtcaggaggaccccaacgcatactccggagagctgttcgacgcctag

SEQ ID NO: 322369 - DNA, 765 bp, Artificial Sequence
  derived and/or modified sequence
atggcctggcagggcctggtgctggccgcctgcctgctgatgttcccatctaccactgccgattgcctctctcgttgcagcttatgcgccgttaaaacacaggacggacccaagcctataaatcctctgatctgtagcttacagtgccaggcggcattactgccatctgaggagtgggaacggtgccagagctttctctcttttttcaccccttctactttgggtctgaacgacaaggaggaccttgggagtaagagcgtgggtgaaggaccttacagtgaattggcaaaactgagcggctcatttctgaaggagctcgagaagagcaagttcctgccaagcatctcaacgaaagaaaacaccctgtccaaatccctggaagagaagctccgagggctgagtgacggctttcgcgagggggctgagtcagagctaatgcgagacgcacagctgaacgacggagcaatggaaactggcacattgtacctcgcggaggaagaccccaaggagcaggttaaaagatacgggggcttcctgagaaagtaccccaagcgctcttcagaagtggctggagagggagacggtgacagtatgggtcacgaagatctgtacaaaaggtacggcggattcctccgccgcattcggccgaagctcaaatgggacaatcaaaagcgctatggtgggtttcttagacgccaatttaaggtggtcaccaggtctcaggaggatcccaatgcatattctggcgaactgttcgatgcctag

SEQ ID NO: 322370 - DNA, 765 bp, Artificial Sequence
  derived and/or modified sequence
atggcctggcagggcctggtgctggccgcctgcctgctgatgttccctagcaccaccgctgattgtttaagcaggtgctcgctctgtgccgttaagactcaggatggaccaaagcctatcaaccccctaatctgctctcttcagtgccaggccgctttgttgccttccgaggaatgggagcgctgccagagcttcttgtcttttttcaccccctccaccttgggcctaaatgacaaagaggatctcggctcgaagagtgtgggggaggggccgtatagtgaattagctaagcttagcggtagtttccttaaggagctggagaagagcaagttcttacccagcatctctacgaaagagaatactctttcaaagtcgctcgaagagaaacttcgaggactgagtgacggctttagggagggcgctgagtccgaacttatgagagatgcccagcttaacgatggggccatggagactggaactctatacctcgccgaggaggaccccaaagagcaggtcaagcgttatgggggtttcctgagaaagtacccaaaacggtcttccgaagtggctggcgaaggcgatggtgatagcatgggtcacgaggatctctacaagcggtatggtgggtttctcaggagaatacgcccgaagctcaagtgggataaccaaaagcgctatggtggctttttgagaagacagttcaaggttgtaacaaggtcacaggaagaccctaacgcatattcaggcgagctcttcgacgcctag

SEQ ID NO: 322371 - DNA, 765 bp, Artificial Sequence
  derived and/or modified sequence
atggcttggcagggccttgtgctagccgcttgcttgttgatgtttcccagcaccactgccgactgcttgagccgttgcagtctctgtgctgtgaaaacacaggacggacccaagcccattaatccactgatctgcagcctgcagtgccaggcggctttactgccttccgaggagtgggagaggtgtcagtccttcctttccttcttcaccccttcgaccctgggcctgaacgacaaagaggatctgggcagtaagagtgtcggcgagggaccatattcggaactcgctaaattgagcggctcatttctgaaagaactagagaaatccaagttcctgccctctatcagcacaaaggaaaacaccctaagtaagtcactcgaagagaagttgcgtggactgagcgacggatttagggagggagccgagtctgagcttatgcgcgatgcacagctgaatgacggtgcaatggaaacaggaacattgtacctggcagaagaagatcccaaggagcaggtcaagaggtatggcggatttctgcgtaaatatccaaagaggagcagcgaggtcgcaggagagggtgacggtgacagcatgggacacgaagatctgtacaagcggtacggaggctttctgcggagaatccgcccaaagctcaagtgggataaccagaagagatatgggggattcctgcgcaggcaattcaaagtagttacccggtcccaggaggacccaaacgcctactcgggagagttgttcgatgcctag

SEQ ID NO: 322372 - DNA, 765 bp, Artificial Sequence
  derived and/or modified sequence
atggcgtggcagggactggtgctggccgcatgtctcctgatgttcccttctaccacggccgattgtctcagtagatgtagtttatgcgcggtcaagactcaggacggacccaaaccaataaatccactcatttgtagtttacagtgccaggccgcactgctcccctctgaagagtgggagagatgccagagcttcctcagtttctttacgccatctactctgggtctcaacgataaggaggacctggggtctaaaagtgtgggcgaagggccatattcagagctcgccaagctcagtgggagcttccttaaggagctggaaaagtccaaattcttgccatctataagcaccaaagaaaatacattgagtaagtcacttgaggagaaattgcgagggctgtctgatggcttccgggagggggctgagtccgaattaatgcgcgacgctcagttaaatgatggtgccatggagactggtaccttgtatctggcggaagaagatcccaaggagcaagtgaaacgttatggtggctttctccgtaaatacccaaaacgatcctctgaagtggccggtgaaggggacggagatagtatgggacacgaggacctgtataaacgatatggagggtttctgcgaagaattcgacctaaacttaaatgggacaatcagaaaagatatggagggttcttacgcagacagtttaaagtagtcacacgttctcaggaggaccctaacgcctacagtggggagttgtttgatgcctag

SEQ ID NO: 322373 - DNA, 2555 bp, Artificial Sequence
  derived and/or modified sequence
atttgaaggggctttggtggtgttcacagctgcctctttggcacctcctcccaagccggagtcaaggaggcccctgagccttggaccagccactgccacctccgacctgctcggccagaagctgcccagggacaaagcagagtgcaggtcatttatcttcaggctttgagatctgcgtggggggagctgttgcagcagcccaagccgcaggaattgctgagacaggatggcctggcaggggctggtcctggctgcctgcctcctcatgttcccctccaccacagcggactgcctgtcgcggtgctccttgtgtgctgtaaagacccaggatggtcccaaacctatcaatcccctgatttgctccctgcaatgccaggctgccctgctgccctctgaggaatgggagagatgccagagctttctgtcttttttcaccccctccacccttgggctcaatgacaaggaggacttggggagcaagtcggttggggaagggccctacagtgagctggccaagctctctgggtcattcctgaaggagctggagaaaagcaagtttctcccaagtatctcaacaaaggagaacactctgagcaagagcctggaggagaagctcaggggtctctctgacgggtttagggagggagcagagtctgagctgatgagggatgcccagctgaacgatggtgccatggagactggcacactctatctcgctgaggaggaccccaaggagcaggtcaaacgctatgggggctttttgcgcaaataccccaagaggagctcagaggtggctggggagggggacggggatagcatgggccatgaggacctgtacaaacgctatgggggcttcttgcggcgcattcgtcccaagctcaagtgggacaaccagaagcgctatggcggttttctccggcgccagttcaaggtggtgactcggtctcaggaagatccgaatgcttactctggagagctttttgatgcataagcacctcttttcatggagtagagtcaggagaaacccctgacaccttttcaggttggagtgcattcattcatcctcttatatgtgccccttccccatgctcagctcagcattgtgtacaaaatatccaagcccagcctatctctcttctgcgtgggagtatgttatttctctggggtctgtgatggggaagggtggatgtcccttccccacaataggcttagtgcttggctcagacacctagactctaaaactatcagcagcggcagcagcagcagcagcagcagtttgtgatctgtccttccaacctgttcacgtgactcctcaattccagggaaccagagcgatgtgttctttgtacctgtaggtctatgatgtccaaacttaacagatcacatgcccctcttagaagaaatatgagcatgctccctcatgcagatagtatacacatcataaacaaagagtagaactttaaaagaaggtaaataatcatacacagaaatcctaacattatattcccaaatctcaaaagatctcctgtgcacctgactttggagacgatgctttaggtaaaaagcttaaacattgccttatattggatcaggaacccttacagtagagggtccagtcttctagtgggtttaatgtttagtcagtgtactctgagtcctcattgttcagaaaagcacctcttgaagaactgacttcctgaactcccagtcatgttggtaccctggacagtgcctaactccttacagaagggagtgaaaacctctttcggaaatgattgagagcagcctcttgaatgcttaaatgatcaaggagggagaaaggcaaaccaatttgttctgtgcaacaaactcaaaatgtggaccagttccctcagccctcattaaactaattaaactgatgggtatcatgcttctactccatggtgaactgaagcagagtcaagctgatgaagttaagcacaaccatgttcttgagcagctgaattggctgccaagagtccaagccatctggcccaacatacgcactgggcattgggtaagggactccagaagcagcagctagaaagagaaaaagccctcttcaatccccataatgcttctttcctcttaatgtctcaaaataaaaccagaaagaggaataaaatgattaagtgcttgaggccaaatgagttcccttgattcaaataaccctgaatcagaggcagagacctcctgatgtcttggtttccatcaaagccctccctgtctgtctgtctctcttttgctctctcattcccaggcactctcttttggtttgtgggtccaggagatgaggctggataggagaggaaaaggcttgagtctggataatttgtataagatgctgctgagcacatctcttcatgcgcagtccccaggtatctgatgatgttctgaaatggatagattgttttagagttattttgtgtcctttaaaaaaatcccatttatgcaatttacttggaatttgcttagcctttaataggcttgtgtaatttcctgctcctccagtacaataaataaaagaaagatgctga

SEQ ID NO: 322374 - DNA, 2526 bp, Artificial Sequence
  derived and/or modified sequence
aaaaggggggaagaggcaccagaactgccatttgaaggggctttggtggtgttcacagctgcctctttggcacctcctcccaagccggagtcaaggaggcccctgagccttggaccagccactgccacctccgacctgctcggccagaagctgcccagggacaaagcagagtgcagcaggaattgctgagacaggatggcctggcaggggctggtcctggctgcctgcctcctcatgttcccctccaccacagcggactgcctgtcgcggtgctccttgtgtgctgtaaagacccaggatggtcccaaacctatcaatcccctgatttgctccctgcaatgccaggctgccctgctgccctctgaggaatgggagagatgccagagctttctgtcttttttcaccccctccacccttgggctcaatgacaaggaggacttggggagcaagtcggttggggaagggccctacagtgagctggccaagctctctgggtcattcctgaaggagctggagaaaagcaagtttctcccaagtatctcaacaaaggagaacactctgagcaagagcctggaggagaagctcaggggtctctctgacgggtttagggagggagcagagtctgagctgatgagggatgcccagctgaacgatggtgccatggagactggcacactctatctcgctgaggaggaccccaaggagcaggtcaaacgctatgggggctttttgcgcaaataccccaagaggagctcagaggtggctggggagggggacggggatagcatgggccatgaggacctgtacaaacgctatgggggcttcttgcggcgcattcgtcccaagctcaagtgggacaaccagaagcgctatggcggttttctccggcgccagttcaaggtggtgactcggtctcaggaagatccgaatgcttactctggagagctttttgatgcataagcacctcttttcatggagtagagtcaggagaaacccctgacaccttttcaggttggagtgcattcattcatcctcttatatgtgccccttccccatgctcagctcagcattgtgtacaaaatatccaagcccagcctatctctcttctgcgtgggagtatgttatttctctggggtctgtgatggggaagggtggatgtcccttccccacaataggcttagtgcttggctcagacacctagactctaaaactatcagcagcggcagcagcagcagcagcagcagtttgtgatctgtccttccaacctgttcacgtgactcctcaattccagggaaccagagcgatgtgttctttgtacctgtaggtctatgatgtccaaacttaacagatcacatgcccctcttagaagaaatatgagcatgctccctcatgcagatagtatacacatcataaacaaagagtagaactttaaaagaaggtaaataatcatacacagaaatcctaacattatattcccaaatctcaaaagatctcctgtgcacctgactttggagacgatgctttaggtaaaaagcttaaacattgccttatattggatcaggaacccttacagtagagggtccagtcttctagtgggtttaatgtttagtcagtgtactctgagtcctcattgttcagaaaagcacctcttgaagaactgacttcctgaactcccagtcatgttggtaccctggacagtgcctaactccttacagaagggagtgaaaacctctttcggaaatgattgagagcagcctcttgaatgcttaaatgatcaaggagggagaaaggcaaaccaatttgttctgtgcaacaaactcaaaatgtggaccagttccctcagccctcattaaactaattaaactgatgggtatcatgcttctactccatggtgaactgaagcagagtcaagctgatgaagttaagcacaaccatgttcttgagcagctgaattggctgccaagagtccaagccatctggcccaacatacgcactgggcattgggtaagggactccagaagcagcagctagaaagagaaaaagccctcttcaatccccataatgcttctttcctcttaatgtctcaaaataaaaccagaaagaggaataaaatgattaagtgcttgaggccaaatgagttcccttgattcaaataaccctgaatcagaggcagagacctcctgatgtcttggtttccatcaaagccctccctgtctgtctgtctctcttttgctctctcattcccaggcactctcttttggtttgtgggtccaggagatgaggctggataggagaggaaaaggcttgagtctggataatttgtataagatgctgctgagcacatctcttcatgcgcagtccccaggtatctgatgatgttctgaaatggatagattgttttagagttattttgtgtcctttaaaaaaatcccatttatgcaatttacttggaatttgcttagcctttaataggcttgtgtaatttcctgctcctccagtacaataaataaaagaaagatgctgatg

SEQ ID NO: 322375 - DNA, 2472 bp, Artificial Sequence
  derived and/or modified sequence
agaccagtgagagactgctctttggactctccctttctgcacagtcctggcttaaacaggtggtcatttatcttcaggctttgagatctgcgtggggggagctgttgcagcagcccaagccgcaggaattgctgagacaggatggcctggcaggggctggtcctggctgcctgcctcctcatgttcccctccaccacagcggactgcctgtcgcggtgctccttgtgtgctgtaaagacccaggatggtcccaaacctatcaatcccctgatttgctccctgcaatgccaggctgccctgctgccctctgaggaatgggagagatgccagagctttctgtcttttttcaccccctccacccttgggctcaatgacaaggaggacttggggagcaagtcggttggggaagggccctacagtgagctggccaagctctctgggtcattcctgaaggagctggagaaaagcaagtttctcccaagtatctcaacaaaggagaacactctgagcaagagcctggaggagaagctcaggggtctctctgacgggtttagggagggagcagagtctgagctgatgagggatgcccagctgaacgatggtgccatggagactggcacactctatctcgctgaggaggaccccaaggagcaggtcaaacgctatgggggctttttgcgcaaataccccaagaggagctcagaggtggctggggagggggacggggatagcatgggccatgaggacctgtacaaacgctatgggggcttcttgcggcgcattcgtcccaagctcaagtgggacaaccagaagcgctatggcggttttctccggcgccagttcaaggtggtgactcggtctcaggaagatccgaatgcttactctggagagctttttgatgcataagcacctcttttcatggagtagagtcaggagaaacccctgacaccttttcaggttggagtgcattcattcatcctcttatatgtgccccttccccatgctcagctcagcattgtgtacaaaatatccaagcccagcctatctctcttctgcgtgggagtatgttatttctctggggtctgtgatggggaagggtggatgtcccttccccacaataggcttagtgcttggctcagacacctagactctaaaactatcagcagcggcagcagcagcagcagcagcagtttgtgatctgtccttccaacctgttcacgtgactcctcaattccagggaaccagagcgatgtgttctttgtacctgtaggtctatgatgtccaaacttaacagatcacatgcccctcttagaagaaatatgagcatgctccctcatgcagatagtatacacatcataaacaaagagtagaactttaaaagaaggtaaataatcatacacagaaatcctaacattatattcccaaatctcaaaagatctcctgtgcacctgactttggagacgatgctttaggtaaaaagcttaaacattgccttatattggatcaggaacccttacagtagagggtccagtcttctagtgggtttaatgtttagtcagtgtactctgagtcctcattgttcagaaaagcacctcttgaagaactgacttcctgaactcccagtcatgttggtaccctggacagtgcctaactccttacagaagggagtgaaaacctctttcggaaatgattgagagcagcctcttgaatgcttaaatgatcaaggagggagaaaggcaaaccaatttgttctgtgcaacaaactcaaaatgtggaccagttccctcagccctcattaaactaattaaactgatgggtatcatgcttctactccatggtgaactgaagcagagtcaagctgatgaagttaagcacaaccatgttcttgagcagctgaattggctgccaagagtccaagccatctggcccaacatacgcactgggcattgggtaagggactccagaagcagcagctagaaagagaaaaagccctcttcaatccccataatgcttctttcctcttaatgtctcaaaataaaaccagaaagaggaataaaatgattaagtgcttgaggccaaatgagttcccttgattcaaataaccctgaatcagaggcagagacctcctgatgtcttggtttccatcaaagccctccctgtctgtctgtctctcttttgctctctcattcccaggcactctcttttggtttgtgggtccaggagatgaggctggataggagaggaaaaggcttgagtctggataatttgtataagatgctgctgagcacatctcttcatgcgcagtccccaggtatctgatgatgttctgaaatggatagattgttttagagttattttgtgtcctttaaaaaaatcccatttatgcaatttacttggaatttgcttagcctttaataggcttgtgtaatttcctgctcctccagtacaataaataaaagaaagatgctgatg

SEQ ID NO: 322376 - DNA, 183 bp, Artificial Sequence
  derived and/or modified sequence
atggctaaaccttatgagttcaactggcagaaagaggtgccaagttttctgcaggaaggcgctgtgtttgataggtatgaggaggaaagctttgtcttcgagccaaactgtctgttcaaggtcgatgaatttggcttcttcctcacttggagaagcgaagggaaggagggtcaggtcctatag

SEQ ID NO: 322377 - DNA, 246 bp, Artificial Sequence
  derived and/or modified sequence
atggccaagccttacgaatttaattggcagaaggaggtgcctagcttcctgcaggagggagctgtgttcgatagatacgaggaggaaagctttgtcttcgaaccaaattgcctattcaaggtcgacgagtttggttttttcttaacctggagatcagaggggaaggagggccaggtgttagagtgtagcctgataaatagcatcaggtcaggcgccattccgaaagatcccaagattctcgcctag

SEQ ID NO: 322378 - DNA, 183 bp, Artificial Sequence
  derived and/or modified sequence
atggccaagccctatgagttcaactggcagaaggaggtgcccagcttcctgcaggagggcgctgtgtttgacagatatgaggaggagagctttgtgtttgagcccaactgcctcttcaaggtggatgaatttggcttcttcctgacctggaggtctgagggcaaggagggccaggtgctgtag

SEQ ID NO: 322379 - DNA, 246 bp, Artificial Sequence
  derived and/or modified sequence
atggccaagccctatgagttcaactggcagaaggaggtgcccagcttcctgcaggagggcgctgtgtttgacagatatgaggaggagagctttgtgtttgagcccaactgcctcttcaaggtggatgaatttggcttcttcctgacctggaggtctgagggcaaggagggccaggtgctggagtgcagcctcatcaacagcatccgcagcggggccatccccaaggaccccaagatcctggcctag

SEQ ID NO: 322380 - DNA, 183 bp, Artificial Sequence
  derived and/or modified sequence
atggccaagccctacgagttcaactggcagaaggaggtgcccagcttcctccaggaaggtgccgtgttcgacaggtacgaagaagagtcattcgtgtttgaaccgaactgtctatttaaagttgatgagtttggtttttttctgacttggaggtccgagggcaaggagggtcaggtcttgtag

SEQ ID NO: 322381 - DNA, 246 bp, Artificial Sequence
  derived and/or modified sequence
atggccaagccctacgagttcaactggcagaaggaggtgcccagcttcctgcaggagggggcagtatttgaccggtatgaggaggagagtttcgtgttcgaacccaattgcttgtttaaggtcgacgagttcgggtttttcctgacgtggaggtccgaaggcaaagagggccaggttttggaatgcagcctcatcaatagtatacgctcgggagccatacccaaagaccctaagattctcgcttag

SEQ ID NO: 322382 - DNA, 183 bp, Artificial Sequence
  derived and/or modified sequence
atggccaaaccatatgaatttaactggcagaaggaagttccaagttttctccaggagggtgccgtgttcgacagatatgaggaagagagcttcgtctttgaaccaaattgcttgtttaaggtcgatgagttcggattctttctgacctggcgatcagaaggcaaggaagggcaagttctttag

SEQ ID NO: 322383 - DNA, 246 bp, Artificial Sequence
  derived and/or modified sequence
atggcaaagccctatgaattcaattggcaaaaggaggtgccttcatttcttcaagagggagccgtgtttgacaggtacgaggaggaatccttcgtgttcgagccaaattgtctatttaaagtggatgagtttggcttcttccttacctggcggagcgaggggaaagagggtcaggtgctcgagtgttccctcatcaattccattagatccggtgccataccaaaagaccctaagatactggcctag

SEQ ID NO: 322384 - DNA, 183 bp, Artificial Sequence
  derived and/or modified sequence
atggccaagccctacgagttcaactggcagaaggaggtgcccagcttcctgcaggagggcgccgtgttcgacagatacgaggaggagagcttcgtgttcgagcccaactgcctgttcaaggtggacgagttcggcttcttcctgacctggagaagcgagggcaaggagggccaggtgctgtag

SEQ ID NO: 322385 - DNA, 246 bp, Artificial Sequence
  derived and/or modified sequence
atggccaagccctacgagttcaactggcagaaggaggtgcccagcttcctgcaggagggcgccgtgttcgacagatacgaggaggagagcttcgtgttcgagcccaactgcctgttcaaggtggacgagttcggcttcttcctgacctggagaagcgagggcaaggagggccaggtgctggagtgcagcctgatcaacagcatcagaagcggcgccatccccaaggaccccaagatcctggcctag

SEQ ID NO: 322386 - protein, 60 aa, Artificial Sequence
  derived and/or modified sequence
MAKPYEFNWQKEVPSFLQEGAVFDRYEEESFVFEPNCLFKVDEFGFFLTWRSEGKEGQVL

SEQ ID NO: 322387 - protein, 110 aa, Artificial Sequence
  derived and/or modified sequence
MAKPYEFNWQKEVPSFLQEGAVFDRYEEESFVFEPNCLFKVDEFGFFLTWRSEGKEGQVLECSLINSIRSGAIPKDPKILAALEAVGKSENDLEGRIVCVCSGTDLVNIS

SEQ ID NO: 322388 - DNA, 342 bp, Artificial Sequence
  derived and/or modified sequence
atggcaaagccttacgagttcaattggcagaaagaagtgccctcgttcctccaggagggtgccgtctttgatcgctacgaggaagaatcctttgtattcgaacctaattgcttgttcaaggtggatgaattcggcttctttctgacctggaggtctgagggcaaggagggacaagttttagagtgcagcctcattaactctatcagaagcggcgccattccaaaagacccaaagatccttgccgccctcgaggctgttggaaaatctgagaacgacctagaagggcgtattgtgtgcgtctgctctggaacagacttggtcaacatttccttcacgtattag

SEQ ID NO: 322389 - DNA, 333 bp, Artificial Sequence
  derived and/or modified sequence
atggcgaaaccttacgagttcaattggcaaaaggaagtgccctcatttttacaggaaggtgcagtgtttgacaggtatgaggaagagtcttttgtgttcgagccaaattgtctgttcaaagtagatgagtttgggttcttcctcacctggcggtcggaagggaaggaaggtcaagtcctagagtgcagtcttataaacagtatacgcagcggggctatcccaaaagaccctaagatcctcgctgcactcgaggccgtggggaagtctgagaatgatctcgaaggaagaattgtgtgcgtgtgctctggaaccgaccttgtcaacatttcatag

SEQ ID NO: 322390 - DNA, 342 bp, Artificial Sequence
  derived and/or modified sequence
atggccaagccctatgagttcaactggcagaaggaggtgcccagcttcctgcaggagggcgctgtgtttgacagatatgaggaggagagctttgtgtttgagcccaactgcctcttcaaggtggatgaatttggcttcttcctgacctggaggtctgagggcaaggagggccaggtgctggagtgcagcctcatcaacagcatccgcagcggggccatccccaaggaccccaagatcctggccgccctggaggccgtgggcaagtcagaaaatgacctggagggcagaattgtgtgtgtgtgcagcggcacagacctggtgaacatctccttcacctactag

SEQ ID NO: 322391 - DNA, 333 bp, Artificial Sequence
  derived and/or modified sequence
atggccaagccctatgagttcaactggcagaaggaggtgcccagcttcctgcaggagggcgctgtgtttgacagatatgaggaggagagctttgtgtttgagcccaactgcctcttcaaggtggatgaatttggcttcttcctgacctggaggtctgagggcaaggagggccaggtgctggagtgcagcctcatcaacagcatccgcagcggggccatccccaaggaccccaagatcctggccgccctggaggccgtgggcaagtcagaaaatgacctggagggcagaattgtgtgtgtgtgcagcggcacagacctggtgaacatctcctag

SEQ ID NO: 322392 - DNA, 342 bp, Artificial Sequence
  derived and/or modified sequence
atggccaagccctacgagttcaactggcagaaggaggtgcccagctttcttcaagaaggggcagtctttgatcgctatgaagaggaatcctttgtgtttgagcctaactgcctctttaaagtagacgaatttggtttcttcctgacatggcgctcagagggaaaggagggccaggtgttggaatgtagtctcattaatagcatcaggtcaggtgctatacccaaagatcctaaaatcctggctgccctggaggccgtcggaaaatccgagaacgatctggagggtagaattgtgtgcgtgtgctcaggcactgacctggtcaacattagctttacttattag

SEQ ID NO: 322393 - DNA, 333 bp, Artificial Sequence
  derived and/or modified sequence
atggccaagccctacgagttcaactggcagaaggaggtgcccagcttcctccaggaaggggctgtatttgaccggtacgaggaagagagcttcgtgttcgaaccaaactgcttattcaaagtcgacgagtttggattcttcctcacttggcgcagcgagggaaaagaaggccaggtgttggaatgttcgctgattaactctatcaggtcaggtgccattccaaaggaccctaagatcctggcagctctagaagctgtgggcaaatccgagaacgacctggagggcaggatcgtctgtgtgtgttcaggtactgaccttgttaacatctcctag

SEQ ID NO: 322394 - DNA, 614 bp, Artificial Sequence
  derived and/or modified sequence
gggaggaggaagcggctggccgctgaggggcggcggggcccggagcgggggacgcgcagggcccggcggtgggcgggcgggtcggcgctgccccgtgggctcgctggggagccacggcggagacccccgccctcaactgaggaaaagacaatttctctctgattcagaatcctgaaaatgtgatctcccttaaaaagaggacagtgctgctgtgagtttgacgaagtggacatcacctgcagtcagtccagagctgcccagtcttgaatataatcatggccaaaccttatgaatttaactggcagaaggaagttccctcctttttgcaagaaggagcagtttttgacagatacgaggaggaatcctttgtgtttgaacccaactgcctcttcaaagtggatgagtttggcttctttctgacatggagaagtgaaggcaaggaaggacaggtgctagaatgctccctcatcaacagtattcggtcgggagccataccaaaggatcccaaaatcttggctgctcttgaagctgttggaaaatcagaaaatgatctggaagggcggatagtttgtgtctgcagtggcacagatctagtgaacattagttttacctac

SEQ ID NO: 322395 - DNA, 595 bp, Artificial Sequence
  derived and/or modified sequence
ctgtgacaagcgtttgctgtatttgttgttcgacttagggtagttgaaagagtctctctcagccactctctctggatattttgttgtggctgtgggcactgtttgcccagcctctcactttgtagcggaggggtgggactctgcgtgaaaggaccagcgttatagtccctggcttctccggctaattcatcccgaggctcctgccccttcccattctggaaggggcgagcttatcctagacctgtgactgcctctgaagttctccacctgcctcaggcgtgctctccagtgcctgtttctgactgagtgaggttgaaatcctactgactccttttcagaggacagtgctgctgtgagtttgacgaagtggacatcacctgcagtcagtccagagctgcccagtcttgaatataatcatggccaaaccttatgaatttaactggcagaaggaagttccctcctttttgcaagaaggagcagtttttgacagatacgaggaggaatcctttgtgtttgaacccaactgcctcttcaaagtggatgagtttggcttctttctgacatggagaagtgaaggcaaggaaggacaggtgct

SEQ ID NO: 322396 - DNA, 484 bp, Artificial Sequence
  derived and/or modified sequence
acacgcacacgcacacacgggcgcgcacacacacgcgcgtacacactgggtctccaggcagcggccgtcgccgcatccccggcagcagctccaggcaaagtgacaggaaaagacaatttctctctgattcagaatcctgaaaatgtgatctcccttaaaaagaggacagtgctgctgtgagtttgacgaagtggacatcacctgcagtcagtccagagctgcccagtcttgaatataatcatggccaaaccttatgaatttaactggcagaaggaagttccctcctttttgcaagaaggagcagtttttgacagatacgaggaggaatcctttgtgtttgaacccaactgcctcttcaaagtggatgagtttggcttctttctgacatggagaagtgaaggcaaggaaggacaggtgctagaatgctccctcatcaacagtattcggtcgggagccataccaaaggatcccaaaatcttggctg

SEQ ID NO: 322397 - DNA, 505 bp, Artificial Sequence
  derived and/or modified sequence
gcgggggacgcgcagggcccggcggtgggcgggcgggtcggcgctgccccgtgggctcgctggggagccacggcggagacccccgccctcaactgagaggacagtgctgctgtgagtttgacgaagtggacatcacctgcagtcagtccagagctgcccagtcttgaatataatcatggccaaaccttatgaatttaactggcagaaggaagttccctcctttttgcaagaaggagcagtttttgacagatacgaggaggaatcctttgtgtttgaacccaactgcctcttcaaagtggatgagtttggcttctttctgacatggagaagtgaaggcaaggaaggacaggtgctagaatgctccctcatcaacagtattcggtcgggagccataccaaaggatcccaaaatcttggctgctcttgaagctgttggaaaatcagaaaatgatctggaagggcggatagtttgtgtctgcagtggcacagatctagtgaacattagt

SEQ ID NO: 322398 - DNA, 342 bp, Artificial Sequence
  derived and/or modified sequence
atggccaagccctatgagtttaattggcagaaggaagtgccaagctttctacaagagggagctgtcttcgacagatatgaagaggaatccttcgttttcgagccaaattgcctatttaaagtggacgaattcggtttcttcctgacatggcggtcagaagggaaagagggccaggttctggaatgctctcttataaactccatccggtcaggggcaattcccaaggacccaaaaattctggccgcactagaagctgtgggcaagtctgaaaatgacctggaaggccgtattgtctgtgtctgttctggaactgatctagttaacatttccttcacgtattag

SEQ ID NO: 322399 - DNA, 333 bp, Artificial Sequence
  derived and/or modified sequence
atggcaaaaccttatgaatttaactggcagaaggaggtgcctagctttttacaggaaggggctgtgttcgacaggtacgaggaagagagcttcgtcttcgaacccaactgtctcttcaaagtggacgaattcggctttttcctgacatggagatcagagggtaaggaagggcaagtcctagagtgcagcctgatcaactcaattcggagcggcgctataccgaaggatcccaaaatactggccgctcttgaagccgtcggtaagagcgagaacgatctcgaaggaaggatcgtttgcgtgtgctcagggacagaccttgtgaacatctcttag

SEQ ID NO: 322400 - DNA, 342 bp, Artificial Sequence
  derived and/or modified sequence
atggccaagccctacgagttcaactggcagaaggaggtgcccagcttcctgcaggagggcgccgtgttcgacagatacgaggaggagagcttcgtgttcgagcccaactgcctgttcaaggtggacgagttcggcttcttcctgacctggagaagcgagggcaaggagggccaggtgctggagtgcagcctgatcaacagcatcagaagcggcgccatccccaaggaccccaagatcctggccgccctggaggccgtgggcaagagcgagaacgacctggagggcagaatcgtgtgcgtgtgcagcggcaccgacctggtgaacatcagcttcacctactag

SEQ ID NO: 322401 - DNA, 333 bp, Artificial Sequence
  derived and/or modified sequence
atggccaagccctacgagttcaactggcagaaggaggtgcccagcttcctgcaggagggcgccgtgttcgacagatacgaggaggagagcttcgtgttcgagcccaactgcctgttcaaggtggacgagttcggcttcttcctgacctggagaagcgagggcaaggagggccaggtgctggagtgcagcctgatcaacagcatcagaagcggcgccatccccaaggaccccaagatcctggccgccctggaggccgtgggcaagagcgagaacgacctggagggcagaatcgtgtgcgtgtgcagcggcaccgacctggtgaacatcagctag

SEQ ID NO: 322402 - protein, 462 aa, Artificial Sequence
  derived and/or modified sequence
MTAWTMGARGLDKRGSFFKLIDTIASEIGELKQEMVRTDVNLENGLEPAETHSMVRHKDGGYSEEEDVKTCARDSGYDSLSNRLSILDRLLHTHPIWLQLSLSEEEAAEVLQAQPPGIFLVHKSTKMQKKVLSLRLPCEFGAPLKEFAIKESTYNVVLEKAMHKCILKPLKGHVEAMLKDFHMADGSWKQLKENLQLVRQRNPQELGVFAPTPDFVDVEKIKVKFMTMQKMYSPEKKVMLLLRVCKLIYTVMENNSGRMYGADDFLPVLTYVIAQCDMLELDTEIEYMMELLDPSLLHGEGGYYLTSAYGALSLIKNFQEEQAARLLSSETRDTLRQWHKRRTTNRTIPSVDDFQNYLRVAFQEVNSGCTGKTLLVRPYITTEDVCQICAEKFKVGDPEEYSLFLFVDETWQQLAEDTYPQKIKAELHSRPQPHIFHFVYKRIKNDPYGIIFQNGEEDLTTS

SEQ ID NO: 322403 - protein, 442 aa, Artificial Sequence
  derived and/or modified sequence
NEVYNLTQEFFRHDKPVNAESQNSVGVFTREEVRNRIRNDPDDPEATKRLKLAMIQQYLKVESCESSSHSMDEVSLSAFGEWTEIPGAHHIIPSGFMRVVELLAEGIPAHVIQLGKPVRCIHWDQASARPRGPEIEPRGEGDHNHDTGEGGQGGEEPRGGRWDEDEQWSVVVECEDCELIPADHVIVTVSLGVLKRQYTSFFRPGLPTEKVAAIHRLGIGTTDKIFLEFEEPFWGPECNSLQFVWEDEAESHTLTYPPELWYRKICGFDVLYPPERYGHVLSGWICGEEALVMEKCDDEAVAEICTEMLRQFTGNPNIPKPRRILRSAWGSNPYFRGSYSYTQVGSSGADVEKLAKPLPYTESSKTAHGSSTKQQPGHLFSSKCPEQPLDANRGAVKPMQVLFSGEATHRKYYSTTHGALLSGQREAARLIEMYRDLFQQGT

SEQ ID NO: 322404 - DNA, 1329 bp, Artificial Sequence
  derived and/or modified sequence
aacgaggtgtacaacctgacccaggagttcttcagacacgacaagcccgtgaacgccgagagccagaacagcgtgggcgtgttcaccagagaggaggtgagaaacagaatcagaaacgaccccgacgaccccgaggccaccaagagactgaagctggccatgatccagcagtacctgaaggtggagagctgcgagagcagcagccacagcatggacgaggtgagcctgagcgccttcggcgagtggaccgagatccccggcgcccaccacatcatccccagcggcttcatgagagtggtggagctgctggccgagggcatccccgcccacgtgatccagctgggcaagcccgtgagatgcatccactgggaccaggccagcgccagacccagaggccccgagatcgagcccagaggcgagggcgaccacaaccacgacaccggcgagggcggccagggcggcgaggagcccagaggcggcagatgggacgaggacgagcagtggagcgtggtggtggagtgcgaggactgcgagctgatccccgccgaccacgtgatcgtgaccgtgagcctgggcgtgctgaagagacagtacaccagcttcttcagacccggcctgcccaccgagaaggtggccgccatccacagactgggcatcggcaccaccgacaagatcttcctggagttcgaggagcccttctggggccccgagtgcaacagcctgcagttcgtgtgggaggacgaggccgagagccacaccctgacctacccccccgagctgtggtacagaaagatctgcggcttcgacgtgctgtacccccccgagagatacggccacgtgctgagcggctggatctgcggcgaggaggccctggtgatggagaagtgcgacgacgaggccgtggccgagatctgcaccgagatgctgagacagttcaccggcaaccccaacatccccaagcccagaagaatcctgagaagcgcctggggcagcaacccctacttcagaggcagctacagctacacccaggtgggcagcagcggcgccgacgtggagaagctggccaagcccctgccctacaccgagagcagcaagaccgcccacggcagcagcaccaagcagcagcccggccacctgttcagcagcaagtgccccgagcagcccctggacgccaacagaggcgccgtgaagcccatgcaggtgctgttcagcggcgaggccacccacagaaagtactacagcaccacccacggcgccctgctgagcggccagagagaggccgccagactgatcgagatgtacagagacctgttccagcagggcacctag

SEQ ID NO: 322405 - DNA, 1329 bp, Artificial Sequence
  derived and/or modified sequence
aacgaagtgtacaatctcacccaggaattctttcggcacgacaagcccgtaaatgcggagagtcaaaatagcgttggcgtgttcactagagaagaggtccgcaatcgcatcagaaacgatcctgatgacccagaggcgactaaacgtttgaagctcgccatgatccagcagtacctgaaagtagaaagctgtgaatcgtcatcacacagtatggatgaggtgtctctgtccgcattcggggagtggacagaaatacccggggcccaccatatcatcccatctgggttcatgagggtcgtggagctgctggccgagggcatccccgcccatgtgattcagctgggtaaaccagttcgatgcatccactgggaccaggcttcggcccggccaagggggcctgaaattgaaccgcgaggagaaggtgaccacaatcacgatacaggtgagggagggcagggaggtgaagaaccccggggcggaagatgggacgaggatgaacaatggtcggtcgttgtcgagtgtgaggactgtgagttaatcccagctgatcacgttatagtgactgtgtccctgggcgtgctgaaaagacaatacacatccttttttcgccctggcttgcctactgagaaggtcgcagctatccatcggctggggatcgggacaacagataagatcttcctcgagttcgaagagcctttctgggggccagagtgcaacagcctgcagttcgtctgggaggatgaggctgaatcccatacgctcacataccccccagaactgtggtaccgtaagatctgcggttttgacgtgttataccctcccgagcgatatgggcatgtgctgtccgggtggatatgtggcgaggaggccctcgttatggagaaatgcgacgatgaagccgtagcagagatctgcactgagatgctgagacaattcacaggtaatccaaatatccccaagccacggcggatacttcggtcagcatggggttccaacccttattttaggggatcctatagctatactcaggtgggctcttctggagctgacgttgaaaagctggccaaaccattgccctataccgaatcttctaagaccgcccacgggagttctacaaaacagcagcccggacacctcttttcgtcaaagtgccctgagcagcctcttgacgcaaatcgaggagccgtcaagccaatgcaagttctgttctccggggaagccactcacagaaagtattactctaccacacacggcgcgctgctttccgggcagcgagaggccgcaagactcatcgaaatgtaccgagacttgtttcaacagggcacttag

SEQ ID NO: 322406 - DNA, 1329 bp, Artificial Sequence
  derived and/or modified sequence
aatgaggtgtacaacctgacccaggagttcttcagacatgacaagcctgtgaatgctgagagccagaacagcgtgggcgtcttcacccgggaggaggtgaggaaccgcatcagaaatgaccctgatgatcctgaggccaccaagaggctgaagctggccatgatccagcagtacctgaaggtggagagctgtgagagcagcagccacagcatggatgaggtgtccctgagcgcctttggagagtggacagagatccctggggcccaccacatcatccccagcggcttcatgagggtggtggagctgctggccgagggcatcccagcccacgtgatccagctgggcaagcctgtgcgctgcatccactgggaccaggccagcgcccggccccggggccctgagattgagcccagaggagagggggaccacaaccacgacacaggagagggcggccagggcggggaggagccccggggcggccgctgggatgaagatgagcagtggagcgtggtggtggagtgtgaggactgtgagctgatcccagctgaccacgtgattgtgacagtgtccctgggcgtgctgaagaggcagtacaccagcttcttccggcccggcctgcccacagagaaggtggccgccatccaccggctgggcatcggcaccacagacaagatcttcctggagtttgaggagcccttctggggccctgagtgcaacagcctgcagtttgtgtgggaggatgaagctgagagccacaccctgacctacccacctgagctgtggtacaggaagatctgtggctttgatgtgctgtacccacctgagagatatggccacgtgctgagcggctggatctgtggggaggaggccctggtgatggagaagtgtgatgatgaggccgtggccgagatctgcacagagatgctgcggcagttcaccggcaaccccaacatccccaagccccggcgcatcctgcggagcgcctggggcagcaacccctacttccggggcagctacagctacacccaggtgggcagcagtggagcagatgtggagaagctggccaagcccctgccctacacagagagcagcaagacagcccacggcagcagcaccaagcagcagcccggccacctgttcagcagcaaatgtcctgagcagcccctggatgccaacagaggagctgtgaagcccatgcaggtgctcttcagcggggaggccacccacaggaagtactacagcaccacccatggagccctgctgagcggccagcgggaggccgcccggctgattgagatgtacagagacctcttccagcagggcacctag

SEQ ID NO: 322407 - DNA, 1329 bp, Artificial Sequence
  derived and/or modified sequence
aacgaggtgtacaacctgacccaggagttcttccggcacgacaagccagtaaacgcagaatctcagaactcagtgggggtgttcacacgggaggaagtgagaaacagaatccgaaatgatcccgatgatcctgaagcgactaagcgacttaagcttgcaatgatccagcagtacctgaaggttgagtcttgtgagtcgtccagtcactcgatggacgaagtgtccctgtcggctttcggggagtggactgaaatcccgggcgcccatcacattataccaagcggctttatgcgagtggttgaattactggccgagggaatcccggcccacgttatccagctgggaaagcctgtgcgctgcatccattgggaccaagccagtgcgaggccgcgaggccctgaaattgaacctaggggcgaaggagaccataatcacgacacaggggagggcggtcagggaggggaggagccgcgtggcgggcgctgggacgaagatgagcagtggtccgtcgtggtggaatgcgaagactgtgagttgattccagctgaccatgtgattgtcaccgtctccttaggagtgctgaaacgacaatacacctctttcttcagacctggtcttcctacggaaaaggtcgccgcgattcaccgcttggggattgggactaccgacaagattttcctggagttcgaggagccgttttggggccccgagtgcaacagcctgcagttcgtctgggaggatgaagccgaaagtcatactttgacatacccccccgaattatggtaccggaagatctgtggctttgacgtgctctatccccccgaacgatatggtcatgtgctcagtggctggatctgcggggaagaggctctggtgatggaaaagtgcgatgacgaggccgttgccgaaatttgtactgagatgctgaggcagttcactgggaatcctaatattcccaaaccgagacgaatcctcaggtccgcctggggcagcaacccctactttagaggctcatattcctacacccaagtcgggagcagtggagcggatgtagagaagctggctaaacccctgccctacaccgagtcttctaagaccgcccacggctctagcactaagcaacaaccaggacacctgttcagcagtaaatgccctgagcagccgctcgatgccaaccgcggggccgtgaagcccatgcaggtgctcttctccggcgaggcaactcaccgtaagtactatagtactacacatggtgccctgctctccggccaacgggaggcggcacgtttgatcgagatgtacagggatcttttccagcaaggtacttag

SEQ ID NO: 322408 - DNA, 1329 bp, Artificial Sequence
  derived and/or modified sequence
aacgaggtgtataacctcacccaggagttcttccggcacgacaaacccgtcaatgcagaatcacagaattcagtcggagtatttactcgggaggaagtgcgtaatcggattcggaacgaccctgatgaccctgaagcaactaagaggctcaaactggccatgatccagcagtacctgaaggtagagagttgtgagtcaagtagtcatagcatggacgaggttagtctgtccgcatttggcgagtggaccgagattcctggtgctcatcatattattccatcaggatttatgagggtggtggagctattggccgagggcatcccggcacatgtgatacagctcggtaagcccgtgaggtgtattcactgggaccaggcgagtgctagacccagaggcccagagatcgaacctcggggtgaaggcgatcacaaccatgacacgggtgaaggtgggcagggtggcgaagagccacgcggtgggcgttgggatgaagacgagcagtggagtgtggttgtggagtgcgaggattgcgagctgatcccggctgatcacgtcatagtcactgtgagcctgggagtcctgaagcgccaatatactagctttttccgacccggtctgcccacagagaaggttgcagccatccatcgcctgggaattggcaccaccgataagatttttctggagttcgaggagccattttgggggcctgaatgtaactccctgcaatttgtgtgggaggatgaagccgagtcccacacactgacgtaccctcctgagctgtggtaccgcaagatctgcggtttcgacgtcctgtatccccctgaacggtacggccacgttctgtccgggtggatttgcggtgaagaggcattagtaatggagaaatgtgatgatgaggccgtagctgagatatgtacagagatgttacgtcagtttactggcaaccctaatattcccaaaccccgacgaattctgagatcagcgtggggcagcaacccttatttccgcggaagctatagttacactcaggtgggttcctcaggagctgacgtcgaaaaactcgcaaagcctctgccgtacacagaatcatccaagaccgcccatggtagcagtactaagcaacaacccggacacctattttcatctaagtgtcctgaacaaccccttgacgcaaacaggggcgcagtgaagcccatgcaggttcttttcagtggggaagcaactcataggaagtactactcaacgactcacggagctctgctaagtggccaacgggaagccgcacgcctgattgagatgtatcgagacctctttcagcaggggacatag

SEQ ID NO: 322409 - DNA, 1669 bp, Artificial Sequence
  derived and/or modified sequence
aacgaggtctataacttgacccaggagttcttccggcacgataaaccagtcaatgctgaaagtcaaaatagcgtgggggtgttcacccgagaggaggtgcgtaaccgcatcaggaatgaccctgacgacccagaggctaccaagcgcctgaagctcgccatgatccagcagtacctgaaggtggagagctgtgagagcagctcacacagcatggacgaggtgtccctgagcgccttcggggagtggaccgagatccccggcgctcaccacatcatcccctcgggcttcatgcgggttgtggagctgctggcggagggcatccctgcccacgtcatccagctagggaaacctgtccgctgcattcactgggaccaggcctcagcccgccccagaggccctgagattgagccccggggtgagggcgaccacaatcacgacactggggagggtggccagggtggagaggagccccgggggggcaggtgggatgaggatgagcagtggtcggtggtggtggagtgcgaggactgtgagctgatcccggcggaccatgtgattgtgaccgtgtcgctaggtgtgctaaagaggcagtacaccagtttcttccggccaggcctgcccacagagaaggtggctgccatccaccgcctgggcattggcaccaccgacaagatctttctggaattcgaggagcccttctggggccctgagtgcaacagcctacagtttgtgtgggaggacgaagcagagagccacaccctcacctacccacctgagctctggtaccgcaagatctgcggctttgatgtcctctacccgcctgagcgctacggccatgtgctgagcggctggatctgcggggaggaggccctcgtcatggagaagtgtgatgacgaggcagtggccgagatctgcacggagatgctgcgtcagttcacagggaaccccaacattccaaaacctcggcgaatcttgcgctcggcctggggcagcaacccttacttccgcggctcctattcatacacgcaggtgggctccagcggggcggatgtggagaagctggccaagcccctgccgtacacagagagctcaaagacagcgcatggaagctccacaaagcagcagcctggtcaccttttctcttccaagtgcccagaacagcccctggatgctaacaggggcgccgtaaagcccatgcaggtgctgttttccggtgaggccacccaccgcaagtactattccaccacccacggtgctctgctgtccggccagcgtgaggctgcccgcctcattgagatgtaccgagacctcttccagcaggggacctgagggctgtcctcgctgctgagaagagccactaactcgtgacctccagcctgccccttgctgccgtgtgctcctgccttcctgatcctctgtagaaaggatttttatcttctgtagagctagccgccctgactgccttcagacctggccctgtagcttttctttttctccaggctgggccgtgagcaggtgggccgttgagttacctctgtgctggatcccgtgcccccacttgcctaccctctgtcctgccttgttattgtaagtgccttcaatactttgcattttgggataataaaaaaggctccctcccctgcccctcagcttctctctggttttctca

SEQ ID NO: 322410 - DNA, 618 bp, Artificial Sequence
  derived and/or modified sequence
atgctggctcttcgcgtggcaagaggatcatggggcgcactgcggggggccgcctgggcaccgggcactcggcctagcaagcggagagcatgctgggctctgctgccacctgtgccatgttgcctgggctgtctcgccgaaagatggcgcctccggcccgccgccctgggtctcaggctccccggtatcggccaacgcaatcattgtagcggcgccggaaaggctgctcctcggcctgctgcgggggccggtgccgctgccgaggcaccagggggccagtggggacctgcaagcaccccctcactgtatgaaaatccttggactattcctaacatgttaagtatgacacgtataggcctggctcctgtactgggctacctgataatcgaagaagacttcaatattgcactcggtgtgtttgctttggccggcctgacagacctgttggatggtttcatagccagaaattgggccaaccagcgcagcgcgctgggttcagctttggatccgctcgcagacaaaatactgatttcaattctatacgtttccctaacctacgccgatctcattccagctaacacgtgtcaggtatttcagtctctattatgccattgttag

SEQ ID NO: 322411 - DNA, 618 bp, Artificial Sequence
  derived and/or modified sequence
atgctggccctgcgggtggcccggggctcctggggcgccctgcggggagctgcctgggcccctggcacccggcccagcaagaggcgggcctgctgggccctgctgccccctgtgccctgctgcctgggctgcctggccgagcgctggaggctgcggcctgctgccctgggcctgcggctgcccggcatcggccagaggaaccactgcagcggggccggcaaggccgcccccaggcctgctgctggagctggagctgctgctgaggcccctgggggccagtggggccctgccagcacccccagcctgtatgagaacccctggaccatccccaacatgctgtccatgacccgcatcggcctggcccctgtgctgggctacctgatcatcgaggaggacttcaacatcgccctgggcgtgtttgccctggccggcctgacagacctgctggatggcttcatcgccaggaactgggccaaccagaggtctgccctgggcagcgccctggaccccctggccgacaagatcctgatcagcatcctgtatgtgtccctgacctatgctgacctgatcccagccaacacctgccaggtgttccagagcctgctgtgccactgctag

SEQ ID NO: 322412 - DNA, 618 bp, Artificial Sequence
  derived and/or modified sequence
atgctggccctgcgggtggcccggggcagctggggcgccctgcggggggctgcatgggcacccgggactagaccctccaagcggagagcttgctgggccttgctcccccccgtgccctgttgtctgggttgcttggccgagcgctggaggctgcggccagctgcccttggcctcaggctgcctggcattgggcagagaaaccattgttccggcgcgggaaaggcggccccaagacccgctgctggcgccggcgcggcagccgaggcgccaggtggacagtggggccctgcctcaacaccatcgctctacgaaaatccatggacaatcccaaacatgctatcaatgaccaggatagggctggcacccgtcctcgggtacctgatcatagaagaagatttcaacatagctctgggcgtatttgccttggctgggttaacagacttgctcgacggctttattgcacgaaactgggctaaccagcgtagcgcccttggctcagctcttgatcccttagctgataaaattctgatcagcattctgtatgtctctttaacttacgcagatttgattcctgccaacacatgtcaggtcttccaatcactgctgtgtcactgctag

SEQ ID NO: 322413 - DNA, 618 bp, Artificial Sequence
  derived and/or modified sequence
atgctggccctccgggtagctcggggtagttggggcgcacttcgcggtgcagcgtgggctcccggaacaagacctagtaagagaagggcctgctgggcacttctgccgccagtgccctgctgcctgggctgcctggccgagcgctggcgcttgaggcctgcggctctcggcctgcgcttgccagggattggacagcggaatcactgtagcggagccggtaaggccgctcccagaccagccgcaggagccggagccgcagcagaagctccgggagggcagtggggaccagcttctaccccctctttatatgagaatccctggaccattcccaacatgctgtcaatgacaaggatcggactcgctcccgtcctgggttatttgatcatcgaagaggactttaacattgccctcggagtgttcgcccttgcgggattgactgatttgctcgatggatttattgccaggaattgggctaaccagcgcagcgccttaggatctgctttggaccccctcgcagacaaaatcctgatttcgattctctatgtgtcacttacgtatgccgatttgatcccagcaaatacttgtcaggttttccagagcctgctgtgccattgctag

SEQ ID NO: 322414 - DNA, 1150 bp, Artificial Sequence
  derived and/or modified sequence
ctgagtggttgccgggtctccatggagaagcggctcgccagtgtcccaggctgctgagctctcgccgcccgagaccccgcggcgcggccgcagggccatgctagccttgcgcgtggcgcgcggctcgtggggggccctgcgcggcgccgcttgggctccgggaacgcggccgagtaagcgacgcgcctgctgggccctgctgccgcccgtgccctgctgcttgggctgcctggccgaacgctggaggctgcgtccggccgctcttggcttgcggctgcccgggatcggccagcggaaccactgttcgggcgcggggaaggcggctcccaggccagcggccggagcgggcgccgctgccgaagccccgggcggccagtggggcccggcgagcacccccagcctgtatgaaaacccatggacaatcccgaatatgttgtcaatgacgagaattggcttggccccagttctgggctatttgattattgaagaagattttaatattgcactaggagtttttgctttagctggactaacagatttgttggatggatttattgctcgaaactgggccaatcaaagatcagctttgggaagtgctcttgatccacttgctgataaaatacttatcagtatcttatatgttagcttgacctatgcagatcttattccagcgaacacttgccaagtatttcaatccttgctatgccactgctaggttaaaaccaacattcatcagcaaggtgaatacagcagtccagttaatcttggtggcagcttctttggcagctccagttttcaactatgctgacagcatttatcttcagatactatggtgttttacagctttcaccacagctgcatcagcttatagttactatcattatggccggaagactgttcaggtgataaaagactgatgaaagtcatccctcactgttagtaaggaagcagtatacatcaatgggaacagggcccatggaaatgtacaggagtttccctattttggtgttcagcttgaaaaaggacttgtcagaatcaactgtgtcatcaaaatttaagtaatgtgcattgaaaataaggttgatcatgggaatatgcagaatttccaatgtatttttaaatacaaataaaattgtaatttagaattttt

SEQ ID NO: 322415 - DNA, 618 bp, Artificial Sequence
  derived and/or modified sequence
atgctggccctgagagtggccagaggcagctggggcgccctgagaggcgccgcctgggcccccggcaccagacccagcaagagaagagcctgctgggccctgctgccccccgtgccctgctgcctgggctgcctggccgagagatggagactgagacccgccgccctgggcctgagactgcccggcatcggccagagaaaccactgcagcggcgccggcaaggccgcccccagacccgccgccggcgccggcgccgccgccgaggcccccggcggccagtggggccccgccagcacccccagcctgtacgagaacccctggaccatccccaacatgctgagcatgaccagaatcggcctggcccccgtgctgggctacctgatcatcgaggaggacttcaacatcgccctgggcgtgttcgccctggccggcctgaccgacctgctggacggcttcatcgccagaaactgggccaaccagagaagcgccctgggcagcgccctggaccccctggccgacaagatcctgatcagcatcctgtacgtgagcctgacctacgccgacctgatccccgccaacacctgccaggtgttccagagcctgctgtgccactgctag

SEQ ID NO: 322416 - protein, 133 aa, Artificial Sequence
  derived and/or modified sequence
MAAANKGNKPRVRSIRFAAGHDAEGSHSHVHFDEKLHDSVVMVTQESDSSFLVKVGFLKILHRYEITFTLPPVHRLSKDVREAPVPSLHLKLLSVVPVPEDRHHGTPMLLDGVKCVGAELEYDSEHSDWHGFD

SEQ ID NO: 322417 - protein, 127 aa, Artificial Sequence
  derived and/or modified sequence
  misc_feature (1)..(1): Xaa can be any naturally occurring amino acid
XNKPRVRSIRFAAGHDAEGSHSHVHFDEKLHDSVVMVTQESDSSFLVKVGFLKILHRYEITFTLPPVHRLSKDVREAPVPSLHLKLLSVVPVPEDRHHGTPMLLDGVKCVGAELEYDSEHSDWHGFD

SEQ ID NO: 322418 - DNA, 1116 bp, Artificial Sequence
  derived and/or modified sequence
gctcggcgttgagctcctgcagccgccgccgctgcagtggtcgtccctgccctccccggccccggggtgcaccccgcaaggctcccgctggtgtccctggagcatgggaggctgctgagcgtgagtggcggtgtctggcaggagctgcgtggcagggagggcgtccatggctgcagccaacaagggcaacaagcccagagtccggagtatccgctttgcggcaggccacgatgcagaaggatcccacagccacgtccactttgatgagaagctgcatgactcggtggtcatggtcacccaggagagtgacagcagctttctggtcaaggttggcttcctgaagatcctgcacaggtatgagattaccttcactctgcccccagtgcacaggctgagcaaggatgtccgcgaggcacctgtccccagcctgcacctcaagctcctcagcgtggtgcccgtccctgaagaccggcaccacggcacgcccatgctgctggatggtgtcaagtgtgtgggcgccgagctggaatacgactcagagcacagcgactggcacggctttgactgaggcccgaggccccgcctgccccgggcccctcagccttaaaccccgccttgtccccccgacatgctgcgtgatggtgtggcttcctcgcccctctctggggtgggtgtgggggtggagtggccttgcccacgcctctcacctctgccttcatttgtgctgccaccctgcccctccctcgtcctcctctcccacttcctcctctctgtgtgcctcagtctcctgccggaagaaatgggttgagcccgaaaggaggctgtctgaggaagggagagggagggcctggggtgggtcccccactccccaccccaagccacagggactcccaccagggtctgggagaggacggagctggctctgtggcgtcgtggccccattactgctgccttgcttcagccacctctcctgcccctccctagtccccactgctgtccaccatgagtaggagggaggtgcagtccccagcccccacccctcaggtctgtgttacttggtttttaagcgactggttgggatagaaccctaaagaaataaacttccagtggataccg

SEQ ID NO: 322419 - DNA, 933 bp, Artificial Sequence
  derived and/or modified sequence
gcaacaagcccagagtccggagtatccgctttgcggcaggccacgatgcagaaggatcccacagccacgtccactttgatgagaagctgcatgactcggtggtcatggtcacccaggagagtgacagcagctttctggtcaaggttggcttcctgaagatcctgcacaggtatgagattaccttcactctgcccccagtgcacaggctgagcaaggatgtccgcgaggcacctgtccccagcctgcacctcaagctcctcagcgtggtgcccgtccctgaagaccggcaccacggcacgcccatgctgctggatggtgtcaagtgtgtgggcgccgagctggaatacgactcagagcacagcgactggcacggctttgactgaggcccgaggccccgcctgccccgggcccctcagccttaaaccccgccttgtccccccgacatgctgcgtgatggtgtggcttcctcgcccctctctggggtgggtgtgggggtggagtggccttgcccacgcctctcacctctgccttcatttgtgctgccaccctgcccctccctcgtcctcctctcccacttcctcctctctgtgtgcctcagtctcctgccggaagaaatgggttgagcccgaaaggaggctgtctgaggaagggagagggagggcctggggtgggtcccccactccccaccccaagccacagggactcccaccagggtctgggagaggacggagctggctctgtggcgtcgtggccccattactgctgccttgcttcagccacctctcctgcccctccctagtccccactgctgtccaccatgagtaggagggaggtgcagtccccagcccccacccctcaggtctgtgttacttggtttttaagcgactggttgggatagaaccctaaagaaataaacttccagtggataccgga

SEQ ID NO: 322420 - DNA, 402 bp, Artificial Sequence
  derived and/or modified sequence
atggccgccgccaacaagggcaacaagcccagagtgagaagcatcagattcgccgccggccacgacgccgagggcagccacagccacgtgcacttcgacgagaagctgcacgacagcgtggtgatggtgacccaggagagcgacagcagcttcctggtgaaggtgggcttcctgaagatcctgcacagatacgagatcaccttcaccctgccccccgtgcacagactgagcaaggacgtgagagaggcccccgtgcccagcctgcacctgaagctgctgagcgtggtgcccgtgcccgaggacagacaccacggcacccccatgctgctggacggcgtgaagtgcgtgggcgccgagctggagtacgacagcgagcacagcgactggcacggcttcgactag

SEQ ID NO: 322421 - DNA, 384 bp, Artificial Sequence
  derived and/or modified sequence
tgaaacaagcccagagtgagaagcatcagattcgccgccggccacgacgccgagggcagccacagccacgtgcacttcgacgagaagctgcacgacagcgtggtgatggtgacccaggagagcgacagcagcttcctggtgaaggtgggcttcctgaagatcctgcacagatacgagatcaccttcaccctgccccccgtgcacagactgagcaaggacgtgagagaggcccccgtgcccagcctgcacctgaagctgctgagcgtggtgcccgtgcccgaggacagacaccacggcacccccatgctgctggacggcgtgaagtgcgtgggcgccgagctggagtacgacagcgagcacagcgactggcacggcttcgactag

SEQ ID NO: 322422 - DNA, 402 bp, Artificial Sequence
  derived and/or modified sequence
atggcagctgccaataaggggaataaaccaagagtgcgctcaatccggtttgccgccggccacgatgcagaaggcagccactcccacgtccattttgacgagaaattgcatgacagcgtggtgatggtcacccaggagtccgatagctcgtttctcgtcaaggtggggttcctcaagattttgcatcgctatgagattacgtttaccttgcctcctgtccaccggctgtcaaaggacgtgcgtgaggcccctgttccaagcctccacctgaaattgctgagcgtcgttcctgtgcccgaggaccgacaccatggaacacccatgctcctggacggcgtgaaatgtgtgggcgccgagctggaatatgacagtgagcattctgactggcacgggttcgactag

SEQ ID NO: 322423 - DNA, 384 bp, Artificial Sequence
  derived and/or modified sequence
tgaaacaaaccccgagttcgctctatccggttcgcagctggccatgatgccgaggggagccactcacacgtgcacttcgacgaaaaattgcacgactctgtggtaatggttacgcaagagtctgactccagctttctggtgaaagtgggattcctgaagatccttcaccgatatgagattaccttcaccctcccccctgtccacaggctgagtaaggacgtgagggaggcccctgtaccatccctgcacctgaaactgctatcagtcgttccggtgcccgaggatagacaccacggtacccccatgctgctcgatggggtaaagtgtgttggggcggagcttgagtatgatagcgagcactccgactggcatggatttgactag

SEQ ID NO: 322424 - DNA, 402 bp, Artificial Sequence
  derived and/or modified sequence
atggctgctgccaacaagggcaacaagccccgggtgcgcagcatccgctttgctgctggccatgatgctgagggcagccacagccacgtgcactttgatgagaagctgcatgattctgtggtgatggtgacccaggagagtgacagcagcttcctggtgaaggtgggcttcctgaagatcctgcacagatatgagatcaccttcaccctgccccctgtgcaccggctgagcaaggatgtgcgggaggcccctgtgcccagcctgcacctgaagctgctgtctgtggtgcctgtgcctgaggacagacaccacggcacccccatgctgctggatggagtgaagtgtgtgggcgctgagctggagtatgacagcgagcacagcgactggcacggctttgattag

SEQ ID NO: 322425 - DNA, 384 bp, Artificial Sequence
  derived and/or modified sequence
tgaaacaagccccgggtgcgcagcatccgctttgctgctggccatgatgctgagggcagccacagccacgtgcactttgatgagaagctgcatgattctgtggtgatggtgacccaggagagtgacagcagcttcctggtgaaggtgggcttcctgaagatcctgcacagatatgagatcaccttcaccctgccccctgtgcaccggctgagcaaggatgtgcgggaggcccctgtgcccagcctgcacctgaagctgctgtctgtggtgcctgtgcctgaggacagacaccacggcacccccatgctgctggatggagtgaagtgtgtgggcgctgagctggagtatgacagcgagcacagcgactggcacggctttgattag

SEQ ID NO: 322426 - DNA, 402 bp, Artificial Sequence
  derived and/or modified sequence
atggccgccgccaacaagggcaacaagccccgggtgcggagcatccgctttgctgcaggccatgacgccgagggatcccacagccatgttcatttcgatgaaaagcttcacgattcggtggtgatggtgacacaggagtcagacagcagcttcctggtgaaggtgggttttctgaagatattgcatcgctacgaaattacctttactctaccaccagtacatcgtctctccaaggacgtgcgggaggcacccgtgccctctttgcatttgaagctgttaagcgtcgtcccagttcctgaggacaggcaccatggcacccctatgctcctcgacggcgtcaaatgcgtgggcgcagagctggagtatgatagtgagcactcagactggcatggcttcgactag

SEQ ID NO: 322427 - DNA, 384 bp, Artificial Sequence
  derived and/or modified sequence
tgaaacaagccccgggtgcggagcatccggttcgccgccggccacgatgccgagggcagccactcccacgttcacttcgatgaaaaattgcatgactccgtggtgatggtgacacaggagtccgatagttcatttttagtcaaagtggggttcttaaagattctgcaccgatacgaaattacctttacgttgcctcctgttcacaggctatcgaaagacgtcagggaggcacctgtacccagtttgcacctcaaactgctctctgttgtgccagtcccagaggaccgacaccatgggacgcctatgttgctggacggcgttaagtgtgtaggcgctgagcttgaatatgactctgaacactctgactggcatggattcgactag

SEQ ID NO: 322428 - DNA, 402 bp, Artificial Sequence
  derived and/or modified sequence
atggctgccgctaacaaaggaaataaaccaagagtacggtctataagattcgccgctggacatgatgcagaggggagccattctcacgtacacttcgatgaaaaactccatgactctgtggtgatggtgactcaagagtctgacagttctttcctcgtgaaagtaggctttctcaaaatccttcacagatatgagattaccttcactctgccccctgtccataggctttctaaagatgttagagaggcccctgtgccctcgctgcatcttaaacttttaagcgtggtcccagtcccagaagatcgccaccacgggacacccatgcttctcgatggcgttaagtgtgttggcgcagagctagagtatgacagtgagcatagtgactggcacgggttcgattag

SEQ ID NO: 322429 - DNA, 384 bp, Artificial Sequence
  derived and/or modified sequence
tagaataagccgagagttcggtctatccggtttgctgccggacatgatgccgagggctcacacagtcatgtgcatttcgatgaaaagctgcacgactccgtcgtgatggtcacacaagaatccgactcttctttcctggtgaaagttggattcctcaagatccttcacagatatgaaatcactttcacgttgcccccagtgcataggctatctaaagacgtaagggaggcccctgtgccatccttacacctgaagctgctgtccgtggtccccgtgccagaagatcggcatcacggcacaccaatgctgctggatggcgtgaagtgtgttggcgcagagctggaatatgattccgaacatagtgattggcacgggttcgattag

SEQ ID NO: 322430 - protein, 121 aa, Artificial Sequence
  derived and/or modified sequence
  misc_feature (1)..(1): Xaa can be any naturally occurring amino acid
XSPPIAEQIIRSLKLIMGLDGTTQGLQRVQQLAKNTRYFRQRLQEMGFIIYGNENASVVPLLLYMPGKVAAFARHMLEKKIGVVVVGFPATPLAEARARFCVSAAHTREMLDTVICCVMKI

SEQ ID NO: 322431 - DNA, 990 bp, Artificial Sequence
  derived and/or modified sequence
atggcaaatcctggcggaggtgctgtgtgcaacggcaagctgcataaccacaaaaaacaaagtaacgggtctcagtcccgaaattgcacgaaaaacggcattgtaaaggaagctcagcagaatggcaaaccacacttttacgataagctcatcgtggaatccttcgaagaggccccgctgcacgtgatggtctttacatacatgggatatgggatcggaacattattcgggtacttacgcgactttctgagaaactggggtatcgaaaaatgtaacgcggcggtggagcggaaggaacagaaggactttgtgcccctataccaggattttgagaatttttacaccagaaacctttacatgaggatacgggataactggaataggccaatatgttccgccccaggacctctttttgatttaatggagcgcgtgtctgacgactataactggacattccggttcacaggaagagttatcaaagatgtgatcaacatgggctcttataactttttaggtctggcggctaagtacgacgagtctatgcggaccattaaagatgttctggaggtatacggcaccggtgttgcttctacgagacacgagatggggaccctggacaaacacaaagaactggaggaccttgtggccaagttcttgaacgtagaagccgccatggttttcggtatgggtttcgccaccaactctatgaacatcccggctttggtgggcaaaggatgcctcattctgtccgacgaattgaaccacacaagtcttgtgctgggagcaagattaagtggcgccacaatcagaattttcaaacacaacaacactcagtcattagagaaattgttaagggacgctgtgatttacgggcagcctcgaacaaggcgcgcttggaaaaaaattttgatccttgtggaaggcgtgtatcgcacctcttggattatttacggcttcacgcggatcgttctcttcatgcttcacccatag

SEQ ID NO: 322432 - DNA, 366 bp, Artificial Sequence
  derived and/or modified sequence
taaagccctcccattgccgagcagatcatcagatcgctgaaattaatcatgggcctggacggaaccacacaagggctgcagcgggtgcaacagttggcgaaaaacacccgatacttccgccagcgcctccaggaaatgggtttcatcatttatggaaacgagaacgcgagcgtggtccctctgctattatatatgccaggcaaggtcgccgccttcgctaggcacatgctcgaaaagaaaatcggggtagtggttgtgggcttcccggcaacccccctggccgaggctagggctaggttctgcgtctcagcggcccacacacgagagatgcttgacactgtgatctgctgtgtgatgaagatctag

SEQ ID NO: 322433 - DNA, 420 bp, Artificial Sequence
  derived and/or modified sequence
atggccaaccccggcggcggggcagtatgcaacggcaagctgcacaatcacaagaaacagagtaacgggtcccaaagccgtaattgtacgaagaacgggatcgttaaagaagcccaacagaatggcaagccacacttttatgacaagctaatagtcgagtctttcgaagaggcgccccttcacgtaatggtcttcacctatatggggtatggaattgggaccctgtttggctatctcagggacttcctccggaactgggggatagaaaagtgcaacgccgcagttgaacggaaagagcaaaaagacttcgtcccgttatatcaggatttcgagaacttttatacgcgaaacctttacatgcggattagagataactggaacagaccaatatgcagcgcacccggacccctgttcgattag

SEQ ID NO: 322434 - DNA, 648 bp, Artificial Sequence
  derived and/or modified sequence
aattgcacaaagaatggtatcgtcaaagaggcccagcagaatggaaagccacacttttatgacaagttgattgtcgagagttttgaggaggccccgctccatgtaatggttttcacatacatgggttatggcattggcaccctctttggatatctccgagatttcctgcgtaattggggcatcgaaaagtgtaacgccgccgtggaaaggaaggagcagaaagatttcgtgccactttatcaggactttgaaaatttctacaccaggaacctgtacatgagaattagagacaattggaatcgtccgatctgttccgccccgggccccctgttcgatctgatggagagggtcagcgacgactataactggacctttcgcttcacggggcgggttatcaaggatgttatcaacatggggagctacaactttctgggcctcgccgccaagtacgacgagtctatgcgcaccataaaggacgtcttggaggtatatggcaccggagtggcatcaactcgacatgaaatgggggagtttacatctagttggcagaacgcactgtgcgtcggcggggtgctgcaggccgactcagtgccccaggggccaccatggtcatggaaaatgggaagacattcatcccttttagaatag

SEQ ID NO: 322435 - DNA, 990 bp, Artificial Sequence
  derived and/or modified sequence
atggccaaccctgggggcggcgctgtgtgcaatggcaagctgcacaaccacaagaagcagagcaatggcagccagagcaggaactgcaccaagaatggcatcgtgaaggaggcccagcagaatggcaagccccacttctatgacaagctgattgtggagagctttgaggaggcccccctgcacgtgatggtgttcacctacatgggctacggcatcggcaccctgtttggctacctgcgggacttcctgaggaactggggcatcgagaagtgcaatgctgctgtggagaggaaggagcagaaggactttgtgcccctgtaccaggactttgagaacttctacaccaggaacctgtacatgaggatccgggacaactggaaccggcccatctgcagcgcccctggccccctgtttgacctgatggagcgggtgtctgatgactacaactggaccttccgcttcaccggccgggtcatcaaggatgtgatcaacatgggcagctacaacttcctgggcctggccgccaagtatgatgagagcatgaggaccatcaaggatgtgctggaggtgtatggaactggagtggccagcaccaggcatgagatgggcaccctggacaagcacaaggagctggaggacctggtggccaagttcctgaatgtggaggccgccatggtgtttggcatgggctttgccaccaacagcatgaacatcccagccctggtgggcaagggctgcctgatcctgagtgatgagctgaaccacaccagcctggtgctgggcgcccggctgagcggggccaccatccgcatcttcaagcacaacaacacccagagcctggagaagctgctgagagatgctgtgatctacggccagcccaggacccggcgggcctggaagaagatcctgatcctggtggagggcgtgtaccgcacctcctggatcatctacggcttcacccgcatcgtgctcttcatgctgcacccctag

SEQ ID NO: 322436 - DNA, 366 bp, Artificial Sequence
  derived and/or modified sequence
tgaagcccccccatcgccgagcagatcatccgcagcctgaagctgatcatgggcctggatggcaccacccagggcctgcagagggtgcagcagctggccaagaacacccgctacttccggcagaggctgcaggagatgggcttcatcatctatggaaatgaaaatgcctctgtggtgcccctgctgctgtacatgcctgggaaggtggccgcctttgcccggcacatgctggagaagaagattggagtggtggtggtgggcttccctgccacccccctggccgaggcccgggcccgcttctgtgtgtctgctgcccacacccgggagatgctggacaccgtcatctgctgcgtgatgaagatctag

SEQ ID NO: 322437 - DNA, 420 bp, Artificial Sequence
  derived and/or modified sequence
atggccaaccctgggggcggcgctgtgtgcaatggcaagctgcacaaccacaagaagcagagcaatggcagccagagcaggaactgcaccaagaatggcatcgtgaaggaggcccagcagaatggcaagccccacttctatgacaagctgattgtggagagctttgaggaggcccccctgcacgtgatggtgttcacctacatgggctacggcatcggcaccctgtttggctacctgcgggacttcctgaggaactggggcatcgagaagtgcaatgctgctgtggagaggaaggagcagaaggactttgtgcccctgtaccaggactttgagaacttctacaccaggaacctgtacatgaggatccgggacaactggaaccggcccatctgcagcgcccctggccccctgtttgattag

SEQ ID NO: 322438 - DNA, 648 bp, Artificial Sequence
  derived and/or modified sequence
aactgcaccaagaatggaattgtgaaggaggcccagcagaatggcaagccccacttctatgacaagctgattgtggagagctttgaggaggcccccctgcacgtgatggtgttcacctacatgggctatggaattggcaccctgtttggctacctgcgggacttcctgaggaactggggcattgaaaaatgtaatgctgctgtggagaggaaggagcagaaggactttgtgcccctgtaccaggactttgagaacttctacaccaggaacctgtacatgaggatccgggacaactggaaccggcccatctgcagcgcccctggccccctgtttgacctgatggagcgggtgtctgatgactacaactggaccttccgcttcaccggccgggtcatcaaggatgtgatcaacatgggcagctacaacttcctgggcctggccgccaagtatgatgagagcatgaggaccatcaaggatgtgctggaggtgtatggcaccggggtggccagcaccaggcatgagatgggagagttcaccagctcctggcagaatgccctgtgtgtgggcggcgtgctgcaggccgacagcgtgccccagggccccccctggagctggaagatgggccgccacagcagcctgctggagtag

SEQ ID NO: 322439 - DNA, 990 bp, Artificial Sequence
  derived and/or modified sequence
atggccaaccccggcggcggcgccgtgtgcaacggcaagctgcacaaccacaagaaacagagtaacgggtcccagtcacgaaactgcactaagaatggcatcgtgaaggaggcacagcagaacggtaagccccatttttatgacaaacttatcgtagagagtttcgaagaagcacctctgcatgttatggtgttcacgtatatggggtacggaattgggacgttgtttgggtaccttcgcgattttctgcggaattggggcattgagaaatgtaatgctgctgtggaaaggaaggaacagaaggacttcgtgcccctttatcaggacttcgaaaacttctacacgaggaatttatacatgaggatccgagacaattggaacaggccgatttgttccgccccggggcccctgtttgacctgatggagcgggtctccgatgattacaattggacatttagattcactgggagggttataaaggatgtaattaatatggggtcgtacaactttttgggactggctgccaaatacgacgagagcatgagaactattaaagatgtgttagaggtctacggaacaggggtggccagcactaggcacgagatgggtacactggacaagcacaaagagctggaggatttagtggctaagttccttaacgttgaagccgctatggtcttcggtatgggatttgcgacaaactcaatgaacatcccagcgctggttggcaagggatgtctcattttatccgatgagctgaatcacacctccctcgtgctgggcgccagactgagcggggccaccatacggatattcaaacacaataacacccagtccctcgagaagctccttcgggacgctgtcatctacgggcagccgcgcacacgtcgcgcttggaagaaaatcctgatcctggtggagggcgtgtaccgaacctcttggataatttatggcttcacacgcatcgtgctctttatgcttcacccctag

SEQ ID NO: 322440 - DNA, 366 bp, Artificial Sequence
  derived and/or modified sequence
tgaagcccccccatcgccgagcagatcatccggagcctgaagctgatcatgggactggatggaactacccagggtttgcagcgggtgcagcagttggcaaaaaatacgcggtatttccgccagcggctgcaagaaatgggattcatcatctatggaaatgaaaacgcatccgttgtgccattgctgctctatatgcctgggaaagtcgctgcctttgcccgccacatgctggagaaaaaaattggggtcgtagtggtgggttttcctgccacccctctggctgaagccagggctcggttttgtgtgtccgccgcccatacacgtgagatgttggatacagttatatgctgtgtcatgaagatctag

SEQ ID NO: 322441 - DNA, 420 bp, Artificial Sequence
  derived and/or modified sequence
atggccaaccccggcggcggcgccgtgtgcaacggcaagctgcacaaccataagaaacagtcaaatggctcgcagtctaggaactgcaccaagaacggaatcgtcaaagaggcccagcaaaacggtaagccgcacttttacgataaactgatcgtggaaagctttgaagaggcacccctgcatgttatggtgtttacgtacatgggctacgggatagggacgctgtttggatacctgagagactttctgcgtaactggggtatcgagaagtgtaatgccgctgtagaacggaaagagcagaaagatttcgtgccactttaccaggattttgaaaacttctacaccaggaacctatacatgcggatacgcgacaactggaaccgtcccatctgttccgcccctggacccttgttcgattag

SEQ ID NO: 322442 - DNA, 648 bp, Artificial Sequence
  derived and/or modified sequence
aactgcaccaagaacggcatcgtgaaggaggcccagcagaacggcaaacctcatttttacgataaattaatagtagaatccttcgaagaagctccacttcacgtaatggtgttcacatacatgggatacggaattgggaccctgttcggatacctgagggattttctgaggaactggggaatagaaaaatgtaacgccgcggtggaaaggaaagagcagaaagatttcgtgccgttgtatcaggatttcgagaacttttacacccgtaatttgtacatgagaatccgggacaattggaatcgacccatctgctcagcccccggccccctttttgatctgatggagagagtttccgatgactataattggacttttagatttacaggaagagtcatcaaagacgtgattaatatgggatcctacaacttcctgggactagccgccaagtacgatgaatcaatgagaaccataaaagatgtgctcgaggtctatggcacaggtgttgcgtcaacacggcatgagatgggggagttcaccagttcgtggcagaacgcactgtgtgttggaggcgtattgcaagctgactctgtcccccaggggcctccctggtcctggaagatgggccgtcatagttcactcctggagtag

SEQ ID NO: 322443 - DNA, 990 bp, Artificial Sequence
  derived and/or modified sequence
atggcaaatccaggcggtggcgctgtctgtaatggcaaattacataaccataaaaagcagtcaaatggatcccagtccagaaactgtaccaagaacgggatcgttaaagaggcgcagcagaatgggaagcctcacttttacgataagctgatcgtggagtcctttgaggaggcccctttacatgttatggtgtttacctacatgggatacgggatcgggacgctttttggatacctgcgggacttcctaaggaattggggaatcgagaaatgcaacgcggcagtggagcgcaaagagcagaaagactttgtgcccctgtaccaggacttcgagaacttctacacccgcaacctctatatgcgaattcgcgacaactggaatcggccaatatgtagcgctcccggacctcttttcgacttaatggagagggtgtccgacgattacaattggacgttcagattcacagggagggtaattaaggatgtcatcaatatgggctcctataactttttgggcctggctgcgaagtacgacgagtcaatgcgaaccattaaggacgtgttggaggtgtatggcaccggcgtggccagcacacggcatgagatgggaactctggataagcataaggagttggaggatctcgtcgcgaaattccttaatgtggaggctgcaatggtattcgggatgggctttgccacaaattcaatgaatatccccgctctggtgggcaaaggttgtctgatcttgtctgatgaactcaatcacacaagcctggtcctgggcgcaagactgtccggtgcaaccattcggatatttaagcataacaacacgcagagcctggaaaagcttttgagggacgctgtaatctacgggcagccacgcactcgcagggcctggaagaagatcttgattctggttgagggcgtgtacaggacgtcctggattatatacggcttcacacgcatcgtgctgtttatgctgcacccttag

SEQ ID NO: 322444 - DNA, 366 bp, Artificial Sequence
  derived and/or modified sequence
tgatcccctccaatcgcagaacagattatacgtagcctcaaactgattatgggcttggacggcactacacaggggctgcagagggtgcaacagcttgccaaaaatacacgctactttcgccagcggttgcaggaaatgggcttcattatctatgggaatgaaaatgcctccgtcgttcctctgctcctctatatgcctgggaaggtggctgcgttcgctcggcacatgctggaaaagaagatcggagtggttgttgtcggctttccagcgacccctctggctgaggctagagcacgcttttgcgtatcagccgctcacacccgagaaatgctagacactgtgatatgttgtgtgatgaagatctag

SEQ ID NO: 322445 - DNA, 420 bp, Artificial Sequence
  derived and/or modified sequence
atggccaaccccggagggggagcggtgtgtaacggcaaactgcacaaccataagaaacagtccaatggatctcaaagcaggaattgcacaaagaatggcattgtgaaagaagcacagcaaaacggaaaaccccatttttacgacaagctgatcgtcgaatcattcgaagaggctcccctccatgttatggtgtttacttacatgggctatggcattggtactctgttcggctatctgcgggatttcctgcggaactggggaattgaaaagtgtaatgcagccgtggaaagaaaagagcaaaaagacttcgttcctttgtatcaagatttcgagaatttttacacgcgcaatttatacatgcgaattcgagacaattggaatcgaccaatctgttccgcccctggcccactctttgattag

SEQ ID NO: 322446 - DNA, 648 bp, Artificial Sequence
  derived and/or modified sequence
aactgtacaaagaacggaatagttaaggaagcacagcagaacggaaaaccacacttttacgacaaattaattgtggagtccttcgaggaagcccctctgcacgtcatggtattcacatatatgggatatggtataggcacactgtttggctatcttagagactttcttcggaattgggggatcgaaaaatgcaatgccgctgttgaaagaaaagaacagaaagatttcgtgccgctctatcaggacttcgaaaatttttacactagaaacttgtacatgaggatcagagacaactggaataggcctatctgcagcgccccaggcccactcttcgacctgatggaacgcgtgtcagacgactacaattggacattccgctttacaggtcgtgtaattaaagatgtgatcaacatgggaagctataattttctgggactcgcagcaaaatatgacgagagtatgcggactatcaaagacgttcttgaagtctacggcacgggagtggccagcactagacacgaaatgggcgaatttaccagttcctggcagaacgctctgtgtgttggcggagtcctgcaggctgacagtgtgccgcaaggcccaccttggtcatggaaaatgggaagacacagtagcctccttgaatag

SEQ ID NO: 322447 - DNA, 1615 bp, Artificial Sequence
  derived and/or modified sequence
aaagagctttatcccatcccctcgcagactgaaaactaaagcctgcagagacctctgaaggaaaacctgtcccgggctctgtcacttcacacccatggctaaccctggaggtggtgctgtttgcaacgggaaacttcacaatcacaagaaacagagcaatggctcacaaagcagaaactgcacaaagaatggaatagtgaaggaagcccagcaaaatgggaagccacatttttatgataagctcattgttgaatcgtttgaggaagcaccccttcatgttatggttttcacttacatgggatatggaattggaaccctgtttggctatctcagagactttttaagaaactggggaatagaaaaatgcaacgcagctgtggaaagaaaagaacaaaaagattttgtgccactgtatcaagactttgaaaatttttatacaagaaacctttacatgcgaatcagagacaactggaaccggcccatctgcagtgccccagggcctctgtttgatttgatggagagggtatcagacgactataactggacgtttaggtttactggaagagtcatcaaagatgtcatcaacatgggctcctataacttccttggtcttgcagccaagtatgatgagtctatgaggacaataaaggatgttttagaggtgtatggcacaggcgtggccagcaccaggcatgaaatgggcaccttggataagcacaaggagttggaggaccttgtggctaagttcctgaatgtggaagcagctatggtctttgggatgggattcgcaactaactcaatgaatatcccagcattagttggaaagggatgcctcattttaagtgatgagttaaaccacacatcgcttgtgcttggggcccgactctcaggtgcaaccataagaatcttcaaacacaacaacacacaaagcctagagaagctcctgagagatgctgtcatctatggccagcctcgaacccgcagagcttggaaaaagattctcatcctggtggagggtgtctacaggacctcgtggattatttacgggttcactcgcatagtgctgtttatgcttcatccatgagcccaccgatagcagagcaaatcatcagatcactaaaacttatcatgggactggatgggaccactcaagggctgcagagagtacagcaacttgcgaaaaacacaagatacttcagacaaagactgcaggaaatgggattcattatctatggcaatgagaatgcttctgttgttcctctgcttctttatatgcctggtaaagtagcggcttttgcaaggcatatgctagagaaaaaaattggagtggtggtcgtgggatttccagccactcccctcgcagaagctcgggctcggttttgtgtttcagcggcacatacccgggagatgttagacacggtgagtacaccacaggccaacgggatctcagtaccagtaccttggattcaaagcaagtccttttgttgagacagcttggggttctctgggtttctcttgggttatttaggaaaacaacactgacaaaagtcactgccaaaaaacaagagctcgtcaacaacagccaacactgtgaccactcagtagatagaaatga

SEQ ID NO: 322448 - DNA, 453 bp, Artificial Sequence
  derived and/or modified sequence
tgagcccaccgatagcagagcaaatcatcagatcactaaaacttatcatgggactggatgggaccactcaagggctgcagagagtacagcaacttgcgaaaaacacaagatacttcagacaaagactgcaggaaatgggattcattatctatggcaatgagaatgcttctgttgttcctctgcttctttatatgcctggtaaagtagcggcttttgcaaggcatatgctagagaaaaaaattggagtggtggtcgtgggatttccagccactcccctcgcagaagctcgggctcggttttgtgtttcagcggcacatacccgggagatgttagacacggtgatttgctgtgtcatgaagatataacttcaaatgcattctgcaaccttatctttttcttccacaagactacatataagtcactacattttaaaataaaaccttttaagggtaa

SEQ ID NO: 322449 - DNA, 572 bp, Artificial Sequence
  derived and/or modified sequence
ccagcatggacaatctcctttacagtttcggaagcaggtttgttgccatggagttcacattttgacgggagttgagaagtataaagactgaaaactaaagcctgcagagacctctgaaggaaaacctgtcccgggctctgtcacttcacacccatggctaaccctggaggtggtgctgtttgcaacgggaaacttcacaatcacaagaaacagagcaatggctcacaaagcagaaactgcacaaagaatggaatagtgaaggaagcccagcaaaatgggaagccacatttttatgataagctcattgttgaatcgtttgaggaagcaccccttcatgttatggttttcacttacatgggatatggaattggaaccctgtttggctatctcagagactttttaagaaactggggaatagaaaaatgcaacgcagctgtggaaagaaaagaacaaaaagattttgtgccactgtatcaagactttgaaaatttttatacaagaaacctttacatgcgaatcagagacaactggaaccggcccatctgcagtgccccagggcctctgtttgattt

SEQ ID NO: 322450 - DNA, 645 bp, Artificial Sequence
  derived and/or modified sequence
aactgcacaaagaatggaatagtgaaggaagcccagcaaaatgggaagccacatttttatgataagctcattgttgaatcgtttgaggaagcaccccttcatgttatggttttcacttacatgggatatggaattggaaccctgtttggctatctcagagactttttaagaaactggggaatagaaaaatgcaacgcagctgtggaaagaaaagaacaaaaagattttgtgccactgtatcaagactttgaaaatttttatacaagaaacctttacatgcgaatcagagacaactggaaccggcccatctgcagtgccccagggcctctgtttgatttgatggagagggtatcagacgactataactggacgtttaggtttactggaagagtcatcaaagatgtcatcaacatgggctcctataacttccttggtcttgcagccaagtatgatgagtctatgaggacaataaaggatgttttagaggtgtatggcacaggcgtggccagcaccaggcatgaaatgggtgaattcacctcatcctggcagaatgccctctgtgtgggaggggtcttgcaagctgactcagtgccacaggggccaccctggtcatggaaaatgggcaggcactcttccctgttggag

SEQ ID NO: 322451 - DNA, 990 bp, Artificial Sequence
  derived and/or modified sequence
atggccaaccccggcggcggcgccgtgtgcaacggcaagctgcacaaccacaagaagcagagcaacggcagccagagcagaaactgcaccaagaacggcatcgtgaaggaggcccagcagaacggcaagccccacttctacgacaagctgatcgtggagagcttcgaggaggcccccctgcacgtgatggtgttcacctacatgggctacggcatcggcaccctgttcggctacctgagagacttcctgagaaactggggcatcgagaagtgcaacgccgccgtggagagaaaggagcagaaggacttcgtgcccctgtaccaggacttcgagaacttctacaccagaaacctgtacatgagaatcagagacaactggaacagacccatctgcagcgcccccggccccctgttcgacctgatggagagagtgagcgacgactacaactggaccttcagattcaccggcagagtgatcaaggacgtgatcaacatgggcagctacaacttcctgggcctggccgccaagtacgacgagagcatgagaaccatcaaggacgtgctggaggtgtacggcaccggcgtggccagcaccagacacgagatgggcaccctggacaagcacaaggagctggaggacctggtggccaagttcctgaacgtggaggccgccatggtgttcggcatgggcttcgccaccaacagcatgaacatccccgccctggtgggcaagggctgcctgatcctgagcgacgagctgaaccacaccagcctggtgctgggcgccagactgagcggcgccaccatcagaatcttcaagcacaacaacacccagagcctggagaagctgctgagagacgccgtgatctacggccagcccagaaccagaagagcctggaagaagatcctgatcctggtggagggcgtgtacagaaccagctggatcatctacggcttcaccagaatcgtgctgttcatgctgcacccctag

SEQ ID NO: 322452 - DNA, 366 bp, Artificial Sequence
  derived and/or modified sequence
tgaagcccccccatcgccgagcagatcatcagaagcctgaagctgatcatgggcctggacggcaccacccagggcctgcagagagtgcagcagctggccaagaacaccagatacttcagacagagactgcaggagatgggcttcatcatctacggcaacgagaacgccagcgtggtgcccctgctgctgtacatgcccggcaaggtggccgccttcgccagacacatgctggagaagaagatcggcgtggtggtggtgggcttccccgccacccccctggccgaggccagagccagattctgcgtgagcgccgcccacaccagagagatgctggacaccgtgatctgctgcgtgatgaagatctag

SEQ ID NO: 322453 - DNA, 420 bp, Artificial Sequence
  derived and/or modified sequence
atggccaaccccggcggcggcgccgtgtgcaacggcaagctgcacaaccacaagaagcagagcaacggcagccagagcagaaactgcaccaagaacggcatcgtgaaggaggcccagcagaacggcaagccccacttctacgacaagctgatcgtggagagcttcgaggaggcccccctgcacgtgatggtgttcacctacatgggctacggcatcggcaccctgttcggctacctgagagacttcctgagaaactggggcatcgagaagtgcaacgccgccgtggagagaaaggagcagaaggacttcgtgcccctgtaccaggacttcgagaacttctacaccagaaacctgtacatgagaatcagagacaactggaacagacccatctgcagcgcccccggccccctgttcgactag

SEQ ID NO: 322454 - DNA, 648 bp, Artificial Sequence
  derived and/or modified sequence
aactgcaccaagaacggcatcgtgaaggaggcccagcagaacggcaagccccacttctacgacaagctgatcgtggagagcttcgaggaggcccccctgcacgtgatggtgttcacctacatgggctacggcatcggcaccctgttcggctacctgagagacttcctgagaaactggggcatcgagaagtgcaacgccgccgtggagagaaaggagcagaaggacttcgtgcccctgtaccaggacttcgagaacttctacaccagaaacctgtacatgagaatcagagacaactggaacagacccatctgcagcgcccccggccccctgttcgacctgatggagagagtgagcgacgactacaactggaccttcagattcaccggcagagtgatcaaggacgtgatcaacatgggcagctacaacttcctgggcctggccgccaagtacgacgagagcatgagaaccatcaaggacgtgctggaggtgtacggcaccggcgtggccagcaccagacacgagatgggcgagttcaccagcagctggcagaacgccctgtgcgtgggcggcgtgctgcaggccgacagcgtgccccagggccccccctggagctggaagatgggcagacacagcagcctgctggagtag

SEQ ID NO: 322455 - protein, 354 aa, Artificial Sequence
  derived and/or modified sequence
MIQPEKLLLVTVGKTATLHCTVTSLLPVGPVLWFRGVGPGRELIYNQKEGHFPRVTTVSDLTKRNNMDFSIRISSITPADVGTYYCVKFRKGSPENVEFKSGPGTEMALGAKPSAPVVLGPAARTTPEHTVSFTCESHGFSPRDITLKWFKNGNELSDFQTNVDPTGQSVAYSIRSTARVVLDPWDVRSQVICEVAHVTLQGDPLRGTANLSEAIRVPPTLEVTQQPMRVGNQVNVTCQVRKFYPQSLQLTWSENGNVCQRETASTLTENKDGTYNWTSWFLVNISDQRDDVVLTCQVKHDGQLAVSKRLALEVTVHQKDQSSDATPGPASSLTALLLIAVLLGPIYVPWKQKT

SEQ ID NO: 322456 - DNA, 1065 bp, Artificial Sequence
  derived and/or modified sequence
atgattcaaccagagaagctgctgctggtgacagtcggcaaaacagcaaccctgcactgtacagtgacctccttgcttcccgtcggccctgtcctttggttcaggggtgtggggcccggacgcgaactgatctacaatcaaaaggagggacattttccacgcgtcacaactgtgagtgatcttactaagcgcaacaatatggatttctccatcaggatttcttccattaccccagcggatgtgggcacgtactattgcgtcaaattccgcaaaggatccccggaaaacgtggagttcaagtcagggccgggaaccgaaatggccttgggcgccaaaccaagcgcccctgttgtattgggcccagctgctcgaacaactcccgaacacactgtttccttcacctgcgagagccatgggttctcgcccagagacatcactctgaaatggtttaagaacggaaacgaactgtccgatttccaaactaatgttgaccccaccggccagagtgtggcttattctatccgatccactgctcgggttgttctcgacccatgggacgttcgttcccaggtcatatgtgaggtagcccacgtcacacttcagggcgatccactacgtgggacggcaaatctctcagaggcaatccgcgttcctccaacgcttgaagtgacgcaacaacctatgagggtcggaaaccaagtgaacgtcacctgccaggtcagaaagttttacccccagtctttacagctcacttggtcagagaacgggaatgtttgtcaaagggagaccgcctctacacttacagagaacaaagatggaacctataactggacaagctggttccttgtcaatatcagcgaccaacgagacgacgtggtcttaacatgccaagtcaagcacgacggccagctcgccgtgagcaagaggcttgcacttgaagtgactgtccatcagaaggaccaaagttcggacgccacccctggccccgcctcttccttaacggcccttctcctcatcgctgtgctcctggggcccatatacgtgccttggaaacagaagacctag

SEQ ID NO: 322457 - DNA, 1065 bp, Artificial Sequence
  derived and/or modified sequence
atgatccagcctgagaagctgctgctggtgacagtgggcaagacagccaccctgcactgcaccgtgaccagcctgctgcctgtgggccctgtgctgtggttccggggcgtgggccctggccgggagctgatctacaaccagaaggagggccacttcccccgggtgaccaccgtgtctgacctgaccaagaggaacaacatggacttcagcatccgcatcagcagcatcaccccagcagatgtgggcacctactactgtgtgaagttcaggaagggcagcccagaaaatgtggagttcaagagcggccctggaacagagatggccctgggcgccaagcccagcgcccctgtggtgctgggccctgctgcccggaccaccccagagcacacagtgtccttcacctgtgagagccacggcttcagcccccgggacatcaccctgaagtggttcaagaatggaaatgagctgagtgacttccagaccaacgtggaccccaccggccagagcgtggcctacagcatccgcagcacagcccgggtggtgctggacccctgggatgtgcgcagccaggtgatctgtgaggtggcccacgtgaccctgcagggcgaccccctgcggggcacagccaacctgtctgaggccatccgggtgccccccaccctggaggtgacccagcagcccatgagggtgggcaaccaggtgaatgtgacctgccaggtgaggaagttctacccccagagcctgcagctgacctggagcgaaaatggaaatgtgtgccagcgggagacagccagcaccctgacagagaacaaggatggcacctacaactggacctcctggttcctggtgaacatcagtgaccagagagatgatgtggtgctgacctgccaggtgaagcatgatggccagctggccgtgtccaagaggctggccctggaggtgacagtgcaccagaaggaccagagcagtgatgccaccccaggccctgccagcagcctgacagccctgctgctgattgctgtgctgctgggccccatctacgtgccctggaagcagaagacctag

SEQ ID NO: 322458 - DNA, 1065 bp, Artificial Sequence
  derived and/or modified sequence
atgatccagcccgagaagctgctgctggtgaccgtgggcaagaccgcaacgctgcattgcactgtcacgtctcttctgccagtgggtccagtgctgtggtttcgcggagtcggaccgggacgagaactgatttacaatcagaaggaggggcacttcccacgggtcaccacagtgagcgacctgacaaagagaaacaatatggattttagtataaggattagctccatcactccagccgatgtggggacatactactgtgtcaaatttagaaaaggatctcccgaaaacgtggaattcaaaagcggacctgggaccgaaatggcgctgggcgccaagcccagtgcccctgtcgtcctcggccccgccgcccgaacaacccctgaacataccgtttcatttacgtgtgaatcccacgggttcagtccacgggacatcaccttgaaatggttcaaaaatggaaatgaactctccgacttccagaccaatgtagacccaacaggccagtccgtggcctattccatcaggtccacagcacgggttgtcttggacccttgggacgtgagaagccaggtgatttgtgaggttgcacacgtgacgctgcagggtgacccactacgcggtaccgctaatctttcagaggcgatccgagtgccgcccacgttagaagtaactcagcaacctatgcgtgtgggcaatcaagtaaacgttacttgtcaggtgcgaaaattctacccccagtccctgcaattgacatggtcagaaaacggcaatgtgtgtcagagggaaacagctagtactttgaccgaaaataaggacggcacatataattggacttcttggttcttggtcaatatctccgaccagagagatgatgtggtccttacctgtcaggtgaagcatgatgggcaactcgcagtcagtaaacgcttggccctggaggtcaccgttcatcagaaggatcaatcctctgacgctacgccaggaccagcttcttccttgacggcacttctcctcatcgcagtcctattgggtcctatctatgtaccttggaagcagaaaacatag

SEQ ID NO: 322459 - DNA, 1065 bp, Artificial Sequence
  derived and/or modified sequence
atgatccagccggaaaagttactgctggttaccgtcggcaaaacggcaactctacactgtactgtgacttctctgttaccagttgggcctgtgctgtggttcagaggagtggggcctgggagggaactcatctataaccaaaaagaagggcattttccacgggtgactaccgtcagcgacctcaccaagcggaataacatggacttttcaatacgcataagtagtatcacaccagccgatgtgggcacctactactgtgttaagttccgtaagggaagcccagaaaacgttgaattcaagagcggcccaggaactgaaatggcacttggagccaaaccatctgctcccgtcgtcctcggacccgctgccagaaccacccctgagcatacggtgagtttcacttgtgagtcccacgggttctcgccaagagatatcacccttaagtggtttaagaacggtaacgagctgtccgattttcagacaaacgtcgaccccacaggccaatctgtggcgtactccatacgctctacggcgcgagtggtccttgacccttgggatgtaagatctcaagtcatctgcgaggttgcccacgttactctgcagggggaccctcttcgagggacagctaacctttctgaggcgattagagtgccacccactctggaagtgactcagcagcctatgcgggttggaaaccaagtgaacgtgacgtgccaagtcaggaaattctacccccagtctcttcagttgacgtggtccgaaaatgggaatgtatgccaaagggagaccgcaagcactctcaccgaaaacaaggatggcacctacaactggacgagctggtttctggtgaatatttcagaccaacgcgacgacgtcgttctgacttgtcaggtgaaacatgatggccaactggccgtgtcgaagcggctggcactcgaagtgacagttcatcagaaggatcaatcttctgacgccacgcccggtcctgcctccagcttaaccgccctcctactcatcgcagttctgttagggccaatatacgtcccctggaagcagaagacctag

SEQ ID NO: 322460 - DNA, 1065 bp, Artificial Sequence
  derived and/or modified sequence
atgatccagcccgagaagctgctgctggtgaccgtgggcaagaccgccaccctgcactgcaccgtgaccagcctgctgcccgtgggccccgtgctgtggttcagaggcgtgggccccggcagagagctgatctacaaccagaaggagggccacttccccagagtgaccaccgtgagcgacctgaccaagagaaacaacatggacttcagcatcagaatcagcagcatcacccccgccgacgtgggcacctactactgcgtgaagttcagaaagggcagccccgagaacgtggagttcaagagcggccccggcaccgagatggccctgggcgccaagcccagcgcccccgtggtgctgggccccgccgccagaaccacccccgagcacaccgtgagcttcacctgcgagagccacggcttcagccccagagacatcaccctgaagtggttcaagaacggcaacgagctgagcgacttccagaccaacgtggaccccaccggccagagcgtggcctacagcatcagaagcaccgccagagtggtgctggacccctgggacgtgagaagccaggtgatctgcgaggtggcccacgtgaccctgcagggcgaccccctgagaggcaccgccaacctgagcgaggccatcagagtgccccccaccctggaggtgacccagcagcccatgagagtgggcaaccaggtgaacgtgacctgccaggtgagaaagttctacccccagagcctgcagctgacctggagcgagaacggcaacgtgtgccagagagagaccgccagcaccctgaccgagaacaaggacggcacctacaactggaccagctggttcctggtgaacatcagcgaccagagagacgacgtggtgctgacctgccaggtgaagcacgacggccagctggccgtgagcaagagactggccctggaggtgaccgtgcaccagaaggaccagagcagcgacgccacccccggccccgccagcagcctgaccgccctgctgctgatcgccgtgctgctgggccccatctacgtgccctggaagcagaagacctag

SEQ ID NO: 322461 - protein, 305 aa, Artificial Sequence
  derived and/or modified sequence
MTMEKGMSSGEGLPSRSSQVSAGKITAKELETKQSYKEKRGGFVLVHAGAGYHSESKAKEYKHVCKRACQKDSPFTNAGMGSNLNLLGEIECDASIMDGKSLNFGAVGALSGIKNPVSVANRLLCEGQKGKLSAGRIPPCFLVGEGAYRWAVDHGIPSCPPNIMTTRFSLAAFKRNKRKLELAERVDTDFMQLKKRRQSSEKENDSGTLDTVGAVVVDHEGNVAAAVSSGGLALKHPGRVGQAALYGCGCWAENTGAHNPYSTAVSTSGCGEHLVRTILARECSHALQAEDAHQALLETMQNKFI

SEQ ID NO: 322462 - protein, 110 aa, Artificial Sequence
  derived and/or modified sequence
  misc_feature (1)..(1): Xaa can be any naturally occurring amino acid
XKITAKELETKQSYKEKRGGFVLVHAGAGYHSESKAKEYKHVCKRACQKAIEKLQAGALATDAVTAALVELELMWKGQFQVLCVLTNLFLDIIKNPTKTKFKTISNVKVY

SEQ ID NO: 322463 - protein, 129 aa, Artificial Sequence
  derived and/or modified sequence
MTMEKGMSSGEGLPSRSSQVSAGKITAKELETKQSYKEKRGGFVLVHAGAGYHSESKAKEYKHVCKRACQKAIEKLQAGALATDAVTAALVELEVYTHSYTSWSCIQPSIHVLLVKRQRKSPLPRISTF

SEQ ID NO: 322464 - DNA, 918 bp, Artificial Sequence
  derived and/or modified sequence
atgaccatggagaagggcatgagcagcggcgagggcctgcccagcagaagcagccaggtgagcgccggcaagatcaccgccaaggagctggagaccaagcagagctacaaggagaagagaggcggcttcgtgctggtgcacgccggcgccggctaccacagcgagagcaaggccaaggagtacaagcacgtgtgcaagagagcctgccagaaggacagccccttcaccaacgccggcatgggcagcaacctgaacctgctgggcgagatcgagtgcgacgccagcatcatggacggcaagagcctgaacttcggcgccgtgggcgccctgagcggcatcaagaaccccgtgagcgtggccaacagactgctgtgcgagggccagaagggcaagctgagcgccggcagaatccccccctgcttcctggtgggcgagggcgcctacagatgggccgtggaccacggcatccccagctgcccccccaacatcatgaccaccagattcagcctggccgccttcaagagaaacaagagaaagctggagctggccgagagagtggacaccgacttcatgcagctgaagaagagaagacagagcagcgagaaggagaacgacagcggcaccctggacaccgtgggcgccgtggtggtggaccacgagggcaacgtggccgccgccgtgagcagcggcggcctggccctgaagcaccccggcagagtgggccaggccgccctgtacggctgcggctgctgggccgagaacaccggcgcccacaacccctacagcaccgccgtgagcaccagcggctgcggcgagcacctggtgagaaccatcctggccagagagtgcagccacgccctgcaggccgaggacgcccaccaggccctgctggagaccatgcagaacaagttcatctag

SEQ ID NO: 322465 - DNA, 918 bp, Artificial Sequence
  derived and/or modified sequence
atgacaatggaaaagggaatgagctccggtgagggtctaccctcacggtcttctcaggtgtcagctggtaagattacagcaaaagagctcgagaccaagcagtcctacaaagagaaacggggtggatttgttttggtgcatgccggtgcagggtatcactccgaatcaaaagcaaaagaatacaaacacgtatgtaagcgggcatgtcagaaggattccccatttacgaacgccggcatgggcagcaatctcaatctgctgggggaaattgaatgcgatgcctctatcatggatggaaaatctctgaactttggagcagtcggcgctctgagcggcatcaagaacccagtgagcgttgccaacagactcctatgcgaaggacaaaagggcaaactctctgccggcaggatccccccgtgctttctggtgggcgagggtgcataccgctgggcagtggaccatgggattcccagctgcccaccaaacatcatgaccaccaggttctctctcgcagctttcaagcgcaacaagaggaagttggaactggcagagagggtcgacactgatttcatgcagctaaaaaagcggcgccaaagttccgagaaagagaatgatagtgggactttggatacagtaggcgcggtggtcgtcgaccatgagggaaatgtggcagcagcggttagcagtggcggcctcgcgcttaaacatcctggacgggtgggtcaagcagcactctatggctgcggatgttgggctgagaatacaggagcccacaatccatatagtactgcggtgtcaacctcaggatgcggcgagcacctggtccggacgatacttgctagagagtgtagccatgcccttcaggctgaggacgcccaccaggcactactggagactatgcagaacaaatttatatag

SEQ ID NO: 322466 - DNA, 918 bp, Artificial Sequence
  derived and/or modified sequence
atgaccatggaaaagggcatgagtagcggggaaggacttcctagtcggtcctctcaagtgtctgccggaaagatcaccgccaaagaactggaaacaaagcaatcatacaaggagaagcgaggagggtttgtgctcgttcatgccggtgcagggtatcatagcgaatctaaggctaaggagtacaagcacgtgtgtaaaagggcttgccaaaaggattccccgttcacgaatgctggaatggggtctaatcttaacctgctcggtgaaattgagtgcgacgcctccatcatggatggtaaaagcttgaacttcggagcagtgggcgctttaagtgggattaagaatcctgtgtctgtggccaacagactattatgcgagggccagaagggtaagctttccgcagggagaataccaccatgctttctagtgggggagggggcctacaggtgggccgtggaccacgggataccttcttgcccacccaacatcatgactacgcgcttttcactggcagcctttaagcggaataaacggaagctggaattagcagagagagttgatactgattttatgcaactcaaaaagcgcagacagagctccgagaaggaaaatgactctgggacactcgataccgtgggagccgtcgttgttgatcatgaggggaacgtggcagccgcggtgagtagtggcggcctggcactgaaacaccccggccgagtcggccaggccgccttgtatggctgtgggtgttgggctgaaaataccggagcacacaatccgtattccacagccgtgtcaactagcgggtgcggcgagcatctggtgcggacgatcctcgcccgtgagtgctctcacgccctgcaggcagaagatgctcaccaggcactcctggaaaccatgcagaacaagttcatctag

SEQ ID NO: 322467 - DNA, 918 bp, Artificial Sequence
  derived and/or modified sequence
atgaccatggagaagggcatgagcagtggagagggcctgcccagccgcagcagccaggtgtctgctgggaagatcacagccaaggagctggagaccaagcagagctacaaggagaagagaggaggctttgtgctggtgcacgccggggccggctaccacagcgagagcaaggccaaggagtacaagcacgtgtgcaagagggcctgccagaaggacagccccttcaccaatgccggcatgggcagcaacctgaacctgctgggggagattgaatgtgatgccagcatcatggatggcaagagcctgaactttggagctgtgggcgccctgagcggcatcaagaaccctgtgtctgtggccaaccggctgctgtgtgagggccagaagggcaagctgtctgctggccgcatccccccctgcttcctggtgggggagggcgcctaccgctgggccgtggaccacggcatccccagctgcccccccaacatcatgaccacccgcttcagcctggccgccttcaagaggaacaagaggaagctggagctggccgagcgggtggacacagacttcatgcagctgaagaagaggcggcagagcagcgagaaggaaaatgacagcggcaccctggacacagtgggcgctgtggtggtggaccacgagggcaatgtggccgctgctgtgtcctctgggggcctggccctgaagcaccctggccgggtgggccaggccgccctgtatggctgcggctgctgggccgagaacacaggagcccacaacccctacagcacagctgtgtccaccagcggctgtggggagcacctggtgaggaccatcctggcccgggagtgcagccacgccctgcaggccgaggatgcccaccaggccctgctggagaccatgcagaacaagttcatctag

SEQ ID NO: 322468 - DNA, 918 bp, Artificial Sequence
  derived and/or modified sequence
atgaccatggagaagggcatgagcagcggcgagggcctgcccagccggtccagtcaagtttccgccggtaagatcactgcgaaggaactggagactaaacagtcctacaaggagaagaggggggggtttgtactcgttcatgccggcgccggatatcacagcgagtccaaggctaaggaatacaagcacgtctgcaagagggcgtgccagaaagattcacctttcaccaacgccggcatgggctcaaacctgaatctcctgggcgagatcgaatgcgacgcgagcatcatggacggaaagagtcttaactttggagcggtcggagccctgagcgggatcaaaaaccccgtcagcgtggccaaccgattactttgcgagggtcaaaaaggcaaactgagtgcaggccgcatcccgccgtgcttcctggtcggagaaggagcctaccggtgggccgtcgatcatggtatcccatcctgcccacccaatattatgaccacccgcttcagcctagctgccttcaagagaaacaagcggaagctcgagttagccgaacgcgtagatactgatttcatgcagctgaagaaaagacgacagagcagtgagaaagagaatgacagtggcacgctggacaccgttggagccgtggtggttgaccacgaagggaacgtcgccgccgccgtgtcatctggtggcctcgcccttaagcaccctggcagggtcggacaagcggcgctgtacggttgtggatgctgggctgaaaacactggagctcacaacccctatagcacagcagtgtccacctctggatgcggggagcaccttgtaaggacaatcctggccagggaatgtagccatgcgctccaggctgaagacgcccatcaggccctgttagagaccatgcagaacaaattcatctag

SEQ ID NO: 322469 - DNA, 918 bp, Artificial Sequence
  derived and/or modified sequence
atgaccatggagaagggcatgagcagcggcgagggcctgcccagcaggagttctcaagtgagtgcgggaaagataaccgcaaaggagttggaaaccaaacagtcttacaaggagaaaagaggaggattcgtgctcgtgcacgctggcgctggatatcattcggaaagtaaagctaaggaatacaagcatgtgtgtaagcgggcctgccaaaaagactcgcccttcaccaacgcaggaatggggagtaaccttaacctgctcggcgaaatcgaatgcgatgcctcgataatggacggcaagagcttaaatttcggagccgtcggagcattaagtggtatcaaaaaccccgttagcgttgcaaatcgactgctgtgtgagggccagaagggaaaattatctgccggcagaatccctccttgtttcttggtaggcgaaggagcttacaggtgggccgttgaccacggaatccccagctgcccccccaatataatgacaacacgcttctcactggctgcctttaagcgcaacaagcgtaaactcgagcttgccgaaagagtagacactgactttatgcagcttaagaaaagacggcagagctcggaaaaagagaacgactccggcacccttgatacggttggagcagtggtggttgaccacgagggcaatgtggcagctgccgtcagcagtggagggctggccttgaagcaccctggcagggtcggccaggcagctctatatgggtgcgggtgctgggctgagaataccggggcccacaacccgtacagtaccgccgtgagcacttccgggtgcggagaacacctggtcaggactatcctagccagggagtgctcccacgcgttgcaggccgaagacgcacaccaggccctgttagagacaatgcagaacaagttcatctag

SEQ ID NO: 322470 - DNA, 918 bp, Artificial Sequence
  derived and/or modified sequence
atgaccatggagaaagggatgtcgtccggcgagggcctcccttcgcgaagctcccaggtcagcgccggtaagattacagccaaagagctggagaccaaacagagctacaaagagaaaaggggaggattcgtgcttgttcatgccggagccggataccactccgagagcaaggctaaggagtacaaacatgtctgcaaacgcgcttgccagaaagatagtccattcacaaacgcaggaatgggttccaacctgaacttgcttggggaaatcgaatgcgatgcctccataatggatgggaagagcctgaacttcggcgcagtaggtgcgttgtctggaatcaagaacccagtgtcagtggccaataggctcctgtgcgaaggccaaaagggaaaacttagtgctggaaggattcctccttgttttctggttggcgagggagcctatcgttgggccgtcgaccatgggatccctagctgcccgcctaatatcatgaccacacgtttctcgttagcagcttttaaacggaacaagagaaaactggaattagctgagcgtgtcgatacagacttcatgcagcttaagaagaggagacagtcttcggaaaaggaaaatgatagcggcacactggataccgtgggtgcagtggtcgtagaccacgaaggtaacgtcgccgcagcagtgtcgtctggaggattagctcttaaacatccgggtagggtcggccaggcagcactctacggttgcggatgttgggccgagaacacgggggcacataatccatactcaaccgctgtcagcaccagcggctgtggcgagcatttggtgcgcacaattctcgcccgtgaatgctcccatgccctgcaggccgaagacgctcaccaggcactacttgaaaccatgcaaaataagttcatatag

SEQ ID NO: 322471 - DNA, 918 bp, Artificial Sequence
  derived and/or modified sequence
atgacaatggagaaaggtatgagctctggcgaggggctgccctcccgatcctcacaagtgagcgctggtaaaattactgcaaaggagctggaaactaaacagagttacaaagagaaacggggtgggtttgtcctggtccacgccggagccggataccactcagagagtaaggccaaagaatacaaacacgtctgcaagcgtgcgtgccagaaggattccccttttaccaacgcagggatgggaagcaaccttaatctgcttggggaaatcgaatgcgacgcctctatcatggatgggaaaagcttgaatttcggagccgtgggcgcattatcagggatcaaaaacccagtctcagtagcgaaccggctgctctgtgagggtcaaaagggcaagctgagcgcagggagaatacctccatgttttcttgtcggagaaggggcatacagatgggccgtggatcacgggattccgagctgtccacccaatataatgacaaccaggttcagcctggccgctttcaaaagaaataagaggaaactggaattggccgagcgcgtggacaccgactttatgcaactaaaaaaacgtagacagagtagtgaaaaagagaatgactccgggaccctcgataccgtgggtgcagtcgttgttgatcacgaaggtaacgttgccgcagccgtgtccagtggcggtctagctcttaaacacccagggcgtgttggacaggcagctctctatgggtgtggttgttgggccgagaataccggggctcacaacccttattcgactgctgtgtctactagcggctgcggcgagcatttggtacgcacaattctagcccgtgagtgtagtcatgccctccaggccgaggacgcccaccaagccctactagagactatgcaaaacaagttcatttag

SEQ ID NO: 322472 - DNA, 1000 bp, Artificial Sequence
  derived and/or modified sequence
gctgaagcggggtaattcctctcctgcaattacttttggatggaagtatgcccctttctcagtagaagatggtaatcttggagaatgaccatggagaaggggatgagttctggagaagggctgccttccagatcatctcaggtttcggctggtaaaataacagccaaagagttggaaacaaagcagtcctataaagagaaacgaggaggctttgtgttggtgcatgcaggtgcaggttatcattctgaatccaaagccaaggagtataaacatgtatgcaaacgagcttgtcagaaggattctccttttacaaatgcaggaatgggatctaatctaaatctgttaggtgaaattgagtgtgatgccagcataatggatggaaaatccttaaattttggagcagttggagcactgagtggaatcaagaacccagtctcggttgccaacagactcttatgtgaagggcagaagggcaagctctcggctggcagaattcctccctgctttttagttggagaaggagcctacagatgggcagtagatcatggaataccctcttgccctcctaacatcatgaccacaagattcagtttagctgcatttaaaagaaacaagaggaaactagagctggcagaaagggtggacacagattttatgcaactaaagaaaagaagacaatcaagtgagaaggaaaatgactcaggcactttggacacggtaggcgctgtggttgtggaccacgaagggaatgttgctgctgctgtctccagtggaggcttggccttgaaacatccggggagagttgggcaggctgctctttatggatgtggctgctgggctgaaaatactggagctcataacccctactccacagctgtgagtacctcaggatgtggagagcatcttgtgcgcaccatactggctagagaatgttcacatgctttacaagctgaggatgctcaccaagccctgttggagactatgcaaaacaagtttatca

SEQ ID NO: 322473 - DNA, 773 bp, Artificial Sequence
  derived and/or modified sequence
tccttgcctgtgagatggcactgtgacggtgcccacctcgtggggtgtgtgagggccgagtgaaatcgtgcatttgcgctaacgatgagaaccactgcttgagggccttcctatttcttccaccatgcatctggaaatgcccatgaccttcatcgcagcagcgtatgtgcgttggtcttctccagggatgccgaaagtagacatacagggagtcgcagtacggataccaccagtgccagcctgacctcacaagagacgtcttgtgtgactggccctgccgtcacagctgggccagtaaagtaccttccaggaggctccagttgctacctgactcacaaccttctaatcccatgatcttttagttctagtttccttatcttggtctgagcaaatggctcattttaaagatgacttgcagacaaatgtagagatcatcccaggggaaagtgccccaagaaaggagagtccaagaccacctgcccctcccagttctgcggctggagtgggtgggtgcagcaaccacagccccagtgtacaggagtcaccactgtctcctcccgcattggcccagcttggaagtgcacagcaaccaagcatgaggactgagttaagcttttcggagaaaaaagacactatgatcatctggcagatcacgatcactgtttggtgccagaggtaaggagtttgcttgttgtgtttgcttggaggcgacagttggcaatgacagcctgggagaagcaccggcagttaacagcactctgcaccactcatgg

SEQ ID NO: 322474 - DNA, 333 bp, Artificial Sequence
  derived and/or modified sequence
tgaaagatcaccgccaaggagctggagaccaagcagagctacaaggagaagagaggcggcttcgtgctggtgcacgccggcgccggctaccacagcgagagcaaggccaaggagtacaagcacgtgtgcaagagagcctgccagaaggccatcgagaagctgcaggccggcgccctggccaccgacgccgtgaccgccgccctggtggagctggagctgatgtggaagggccagttccaggtgctgtgcgtgctgaccaacctgttcctggacatcatcaagaaccccaccaagaccaagttcaagaccatcagcaacgtgaaggtgtactag

SEQ ID NO: 322475 - DNA, 438 bp, Artificial Sequence
  derived and/or modified sequence
atgaccatggagaagggcatgagcagcggcgagggcctgcccagcagaagcagccaggtgagcgccggcaagatcaccgccaaggagctggagaccaagcagagctacaaggagaagagaggcggcttcgtgctggtgcacgccggcgccggctaccacagcgagagcaaggccaaggagtacaagcacgtgtgcaagagagcctgccagaaggccatcgagaagctgcaggccggcgccctggccaccgacgccgtgaccgccgccctggtggagctggaggacgtggagagcatcctgtgcgccccctactggctggagaacgtgcacatgctgtacaagctgagaatgctgaccaagccctgctggagactgtgcaagaccagcctgagcgtgcacctgagcctgcccgtgaagatggcctgcctggccgagtag

SEQ ID NO: 322476 - DNA, 390 bp, Artificial Sequence
  derived and/or modified sequence
atgaccatggagaagggcatgagcagcggcgagggcctgcccagcagaagcagccaggtgagcgccggcaagatcaccgccaaggagctggagaccaagcagagctacaaggagaagagaggcggcttcgtgctggtgcacgccggcgccggctaccacagcgagagcaaggccaaggagtacaagcacgtgtgcaagagagcctgccagaaggccatcgagaagctgcaggccggcgccctggccaccgacgccgtgaccgccgccctggtggagctggaggtgtacacccacagctacaccagctggagctgcatccagcccagcatccacgtgctgctggtgaagagacagagaaagagccccctgcccagaatcagcaccttctag

SEQ ID NO: 322477 - DNA, 333 bp, Artificial Sequence
  derived and/or modified sequence
tgaaagatcactgccaaggaattggaaacgaagcaaagctacaaggagaaacgaggagggtttgtgctcgttcacgcaggggctgggtatcatagcgagtctaaagctaaagaatataagcacgtgtgcaagcgggcatgtcagaaggccatcgaaaagctccaagccggtgccctcgccacggacgcggtcactgccgccctcgttgagttagagctgatgtggaaagggcaattccaggtcctttgcgtgctgaccaatctgtttttggatattatcaaaaatcccacgaaaactaagttcaagacaattagcaacgtcaaagtgtactag

SEQ ID NO: 322478 - DNA, 438 bp, Artificial Sequence
  derived and/or modified sequence
atgacgatggaaaagggaatgagctccggtgaaggcttacccagtcgttcaagccaggtcagcgccgggaaaatcacggccaaggaattggagactaagcaatcctacaaagaaaaaagaggtgggtttgtcctggtccatgccggagccggctaccatagcgaatcaaaagccaaagaatataaacacgtgtgtaagagagcatgccaaaaggctatcgaaaaactgcaggctggcgcgctggccactgacgccgttaccgcggccctggttgagctggaagacgtagaatccatcctgtgtgccccctactggctggagaacgttcatatgctctacaagctgcgcatgctgacaaaaccttgctggcggttgtgtaaaacatcactgtccgtccacctaagcctgcccgtgaaaatggcatgcttagctgaatag

SEQ ID NO: 322479 - DNA, 390 bp, Artificial Sequence
  derived and/or modified sequence
atgacgatggaaaaaggcatgagtagcggcgagggattgccgtcgcgcagcagtcaggttagcgcggggaagattaccgcaaaagagctagagaccaaacagagctataaagaaaagcgggggggctttgtattggtgcacgcaggcgcaggctaccattcggagagtaaagccaaagagtacaagcatgtttgcaagagggcctgtcagaaggcaatcgagaaacttcaggccggcgcactcgcaacagacgcagtgactgctgctttggtcgagctggaagtgtacacgcattcttacactagctggtcctgcattcaaccaagtatacatgtgctgctcgttaagagacaacgcaagagtccactaccaaggatcagcactttttag

SEQ ID NO: 322480 - DNA, 333 bp, Artificial Sequence
  derived and/or modified sequence
tgaaaaatcacagccaaggagctggagaccaagcagagctacaaggagaagagaggaggctttgtgctggtgcacgccggggccggctaccacagcgagagcaaggccaaggagtacaagcacgtgtgcaagagggcctgccagaaggccatcgagaagctgcaggccggggccctggccacagatgctgtgacagctgccctggtggagctggagctgatgtggaagggccagttccaggtgctgtgtgtgctgaccaacctcttcctggacatcatcaagaaccccaccaagaccaagttcaagaccatcagcaatgtgaaggtgtactag

SEQ ID NO: 322481 - DNA, 438 bp, Artificial Sequence
  derived and/or modified sequence
atgaccatggagaagggcatgagcagtggagagggcctgcccagccgcagcagccaggtgtctgctgggaagatcacagccaaggagctggagaccaagcagagctacaaggagaagagaggaggctttgtgctggtgcacgccggggccggctaccacagcgagagcaaggccaaggagtacaagcacgtgtgcaagagggcctgccagaaggccatcgagaagctgcaggccggggccctggccacagatgctgtgacagctgccctggtggagctggaggatgtggagagcatcctgtgtgccccctactggctggagaatgtgcacatgctgtacaagctgaggatgctgaccaagccctgctggaggctgtgcaagaccagcctgtctgtgcacctgagcctgcctgtgaagatggcctgcctggccgagtag

SEQ ID NO: 322482 - DNA, 390 bp, Artificial Sequence
  derived and/or modified sequence
atgaccatggagaagggcatgagcagtggagagggcctgcccagccgcagcagccaggtgtctgctgggaagatcacagccaaggagctggagaccaagcagagctacaaggagaagagaggaggctttgtgctggtgcacgccggggccggctaccacagcgagagcaaggccaaggagtacaagcacgtgtgcaagagggcctgccagaaggccatcgagaagctgcaggccggggccctggccacagatgctgtgacagctgccctggtggagctggaggtgtacacccacagctacacctcctggagctgcatccagcccagcatccacgtgctgctggtgaagaggcagaggaagagccccctgccccgcatcagcaccttctag

SEQ ID NO: 322483 - DNA, 333 bp, Artificial Sequence
  derived and/or modified sequence
tgaaagatcaccgccaaggagctggagaccaagcagagctacaaggaaaaaagaggcggatttgtattagtacatgccggcgccgggtaccactctgagtctaaggccaaggaatataaacacgtttgtaaaagggcctgccagaaagctattgaaaaactacaggcgggggccctggccacagatgctgtgactgccgcattggtagagttagagctcatgtggaagggccagttccaggtgctctgtgtccttacgaatctcttcctggatatcatcaaaaatccgaccaaaacaaagtttaagactattagcaatgttaaagtatattag

SEQ ID NO: 322484 - DNA, 438 bp, Artificial Sequence
  derived and/or modified sequence
atgaccatggagaagggcatgagcagcggcgagggcctgcccagcaggtcttctcaggtttcggccggtaagataactgctaaggagctcgagaccaaacaatcatataaagagaagaggggcggctttgtcttggtccacgctggagctggttaccatagcgagtcaaaggctaaagagtacaaacacgtatgcaaacgggcctgtcagaaagcaatcgaaaaactccaggctggagcactggccacggatgcagtgaccgctgccctagttgaactggaagatgttgaatcaatattatgcgcaccctactggctcgaaaacgtgcatatgctctataaactccgcatgctgactaaaccctgttggagactttgtaagacgagtctctccgtccatctgtcattgcctgttaaaatggcttgcctcgcagagtag

SEQ ID NO: 322485 - DNA, 390 bp, Artificial Sequence
  derived and/or modified sequence
atgaccatggagaagggcatgagcagcggcgagggcctgcccagccggtcctctcaggtatcagcagggaaaatcaccgcaaaagagctggagactaaacagtcgtacaaagaaaaacggggagggttcgtcctggtgcacgcaggcgccgggtaccactctgaatccaaagctaaagaatataagcatgtgtgtaagagggcctgccagaaggcaatcgagaaactgcaggccggagcactagccactgatgctgtgactgccgcactggtcgaattggaagtgtacacacacagttacactagctggagttgcattcaaccaagcatccatgtgctccttgtgaaaaggcaaaggaagtccccactgcctaggatctccactttttag

SEQ ID NO: 322486 - DNA, 333 bp, Artificial Sequence
  derived and/or modified sequence
tagaaaattactgccaaagaactggagacaaaacagtcttataaagaaaaacgcggaggttttgttctggtgcacgcgggagccggttatcactccgagagtaaggccaaggaatataagcatgtctgcaaacgggcttgccagaaagcaattgagaagctacaggccggagccttggctacagatgctgtcaccgccgcacttgtcgagctcgagctcatgtggaaaggtcagttccaggtgctctgtgtgctgaccaatctgtttttagacattatcaaaaaccctacaaagacaaagtttaagaccatcagcaatgtgaaggtctattag

SEQ ID NO: 322487 - DNA, 438 bp, Artificial Sequence
  derived and/or modified sequence
atgactatggagaagggcatgagttcgggggagggactgccatctcggtcatcacaggtgagtgctggaaaaattaccgctaaagaactcgaaaccaaacagtcgtacaaggagaaaaggggtggattcgtgttagtgcacgctggggctggttaccacagtgagagtaaagcaaaggaatacaagcatgtttgcaagagagcatgccagaaagctattgagaagttgcaggcaggcgctctggccaccgatgccgtgacagctgctctagttgagcttgaagatgtggagtctatcctgtgcgcaccatattggctggaaaatgtccatatgttatataaactgaggatgttgacgaaaccctgctggcggttatgtaagaccagtctttctgtgcatttatccctcccagtgaagatggcctgtttggctgaatag

SEQ ID NO: 322488 - DNA, 390 bp, Artificial Sequence
  derived and/or modified sequence
atgacaatggagaagggcatgtcctcgggcgagggccttccaagtaggagttctcaggttagtgcgggtaaaatcacagcaaaagaattggaaaccaagcaaagttacaaagaaaaaagaggcggatttgtgcttgtacacgccggagctggttaccattccgagtcaaaggccaaagagtataagcacgtgtgtaaacgagcctgccagaaagcaattgagaaattgcaggccggagcactggccacagacgctgttactgctgcactggttgagctggaagtgtacacacattcgtatacctcttggagctgcatccaaccttccatacatgttctcctggtgaagcggcagagaaagagtccgctcccgcgtattagcactttctag

SEQ ID NO: 322489 - DNA, 426 bp, Artificial Sequence
  derived and/or modified sequence
gtaaaataacagccaaagagttggaaacaaagcagtcctataaagagaaacgaggaggctttgtgttggtgcatgcaggtgcaggttatcattctgaatccaaagccaaggagtataaacatgtatgcaaacgagcttgtcagaaggcaattgaaaagctgcaggccggtgctcttgcaactgacgcagtcactgcagcactggtggaacttgagctcatgtggaaaggacaatttcaggtactgtgtgtgctaactaacctcttcctggacatcataaagaatccaactaaaacaaagtttaaaactatttcaaatgtgaaagtttattgaagccaatattctattttagagatttgtgttatgtttttgacaagtaactgtactgtaattatgtggctttcaattaaaaaatgtgaaaactgtt

SEQ ID NO: 322490 - DNA, 952 bp, Artificial Sequence
  derived and/or modified sequence
acttccggtgcagtgaaggctcggggctgaagcggggtaattcctctcctgcaattacttttggatggaagtatgcccctttctcagtagaagatggtaatcttggagaatgaccatggagaaggggatgagttctggagaagggctgccttccagatcatctcaggtttcggctggtaaaataacagccaaagagttggaaacaaagcagtcctataaagagaaacgaggaggctttgtgttggtgcatgcaggtgcaggttatcattctgaatccaaagccaaggagtataaacatgtatgcaaacgagcttgtcagaaggcaattgaaaagctgcaggccggtgctcttgcaactgacgcagtcactgcagcactggtggaacttgaggatgtggagagcatcttgtgcgcaccatactggctagagaatgttcacatgctttacaagctgaggatgctcaccaagccctgttggagactatgcaaaacaagtttatcagttcacctttccttgccagtgaagatggcgtgcttggcggagtgattgtcctccgttcatgcagatgttctgccgagcctgactcctcccaaaataagcagacacttctagtggaatttctgtggagccacacgacggagagcatgtgtgtcggatatatgtcagcccaggatgggaaagccaagactcacatttcaagacttcctcctggtgcggtggcaggacagtctgtggcaatcgaagttggccagcgcagaagcttattgaatttatttaccttttcagagtttccctttaagcactacttttgcctcatcctacaaattttggtggctgtggacctggcaaaaactacatttcccagcatccacttcatctgagtgcgaccatatgacacaattctgccccatgaggagtaagtggaaggttctggacagaactgctgcaaag

SEQ ID NO: 322491 - DNA, 900 bp, Artificial Sequence
  derived and/or modified sequence
agtgaaggctcggggctgaagcggggtaattcctctcctgcaattacttttggatggaagtatgcccctttctcagtagaagatggtaatcttggagaatgaccatggagaaggggatgagttctggagaagggctgccttccagatcatctcaggtttcggctggtaaaataacagccaaagagttggaaacaaagcagtcctataaagagaaacgaggaggctttgtgttggtgcatgcaggtgcaggttatcattctgaatccaaagccaaggagtataaacatgtatgcaaacgagcttgtcagaaggcaattgaaaagctgcaggccggtgctcttgcaactgacgcagtcactgcagcactggtggaacttgaggtgtacacacacagttacacttcatggagttgcatccagccaagtatccatgtccttcttgtgaagaggcagagaaaatcacctctcccaagaatttccaccttctgaacaagggaaatgtatcctgaagagctgtacgcagatgggaggcaacttgtttgcttgttctgctgctagagcattgatttaattagaagacaggctgtgggtggccatgtgcagacaaagaagcaccagacagagcccatttagcctgggacagtaaaagtaagttacactctttttaaaacacttttttgagtactgatgctgattcttgcctttagtactaaggggcaacttgtaacttactgtttgtgtttacacatagatacatccgttctttttctgagaccctagaaatgacacatgctctctagcacaaagtacctgcttaatggaaaagcagtgatttcttccccaactgcccttttttttttttaaagaataaaaagaaaacggaatcaatgattacattcta

SEQ ID NO: 322492 - DNA, 5137 bp, Artificial Sequence
  derived and/or modified sequence
agtttggtctggagcagctgaaaccggtttgagcgtggctgcttcctgccgctcgacgccgcggcaggccgcctggggggagcgctggcgaggcacggacggcgggcgcccggtacctctgcccgcggtcctcgctctcgggcggggcggcggcgacgcggacctgcggactagcgaacccggagcacgacatcataaaataaatccatcagaatgacaccttctcaggttgcctttgaaataagaggaactcttttaccaggagaagtttttgcgatatgtggaagctgtgatgctttgggaaactggaatcctcaaaatgctgtggctcttcttccagagaatgacacaggtgaaagcatgctatggaaagcaaccattgtactcagtagaggagtatcagttcagtatcgctacttcaaagggtactttttagaaccaaagactatcggtggtccatgtcaagtgatagttcacaagtgggagactcatctacaaccacgatcaataacccctttagaaagcgaaattattattgacgatggacaatttggaatccacaatggtgttgaaactctggattctggatggctgacatgtcagactgaaataagattacgtttgcattattctgaaaaacctcctgtgtcaataaccaagaaaaaattaaaaaaatctagatttagggtgaagctgacactagaaggcctggaggaagatgacgatgatagggtatctcccactgtactccacaaaatgtccaatagcttggagatatccttaataagcgacaatgagttcaagtgcaggcattcacagccggagtgtggttatggcttgcagcctgatcgttggacagagtacagcatacagacgatggaaccagataacctggaactaatctttgattttttcgaagaagatctcagtgagcacgtagttcagggtgatgcccttcctggacatgtgggtacagcttgtctcttatcatccaccattgctgagagtggaaagagtgctggaattcttactcttcccatcatgagcagaaattcccggaaaacaataggcaaagtgagagttgactatataattattaagccattaccaggatacagttgtgacatgaaatcttcattttccaagtattggaagccaagaataccattggatgttggccatcgaggtgcaggaaactctacaacaactgcccagctggctaaagttcaagaaaatactattgcttctttaagaaatgctgctagtcatggtgcagcctttgtagaatttgacgtacacctttcaaaggactttgtgcccgtggtatatcatgatcttacctgttgtttgactatgaaaaagaatctgtggttcaggaggaaaattccttttcagaaaatcagccatttccttctcttaagatgggttcggcaaaagcagaacaaatatccgatactatttttaactcaaggaaaatctgagatttatcctgaactcatggacctcagatctcggacaacccccattgcaatgagctttgcacagtttgaaaatctactggggataaatgtacatactgaagacttgctcagaaacccatcctatattcaagaggcaaaagctaagggactagtcatattctgctggggtgatgataccaatgatcctgaaaacagaaggaaattgaaggaacttggagttaatggtctaatttatgataggatatatgattggatgcctgaacaaccaaatatattccaagtggagcaattggaacgcctgaagcaggaattgccagagcttaagagctgtttgtgtcccactgttagccgctttgttccctcatctttgtgtggggagtctgatatccatgtggatgccaacggcattgataacgtggagaatgcttagtttttattgcacagaggtcattttgggggcgtgcaccgctgttctgggtattcatttttcatcactgagcattgttgatctatgccttttgggcttctcagttcaatgaagcaataatgaagtatttaactctttcactacagttcttgcaagtatgctatttaaattacttggccaggtataattgccagtcagtctctttatagtgagaaaatttattggttagtaatataaatattttaaactaaatatataaatctataatgttaaacatatgttcattaaaagcatagcactttgaaattaactatataaatagctcatatttacacttacagcttttcatttgatcaggtctgaaatctttagcacttaaggaaaatgactatgcataattatacctgaccatgaaaaaaataagtacctcaaatgcatgcatttgcactggtgattccaactgcacaaatctttgtgccatcttgtatataggtattttttacatgggttgacatgcacacaacaccattttcattcagtatgaaccttgaggctgctgccatttttccacttaaccaaaccagcctgaaggtgaacctcgaaacttgtttcataaatctttcaaaagttgttttacatcaatgttaaaatttcaaaatgctgcagggtaatttaatgtataaaatattagtaagaaaaagtatgtattgcatacttagtagaatagatcacaacatacaaattcaattcagtgcatgctttaggtgttaagcatgagattgtacatgtttactgttaggtccttgcatctgtggtgctaggtgagtatgagaagatgtcaaggactggacgtattttgttgcctaaaaaaaaaaggctgtttgtaggcgttttaaatatgcttattttgtgtgtctctcactacctattacacactgttgctttgtgggtttgttttgtatgtgcgtgtgttatacagtagttaaatttccatgcagaaaaataaatgtcctgaattttcatattagtattctttattgtatatcatgcatgtaatttatttagaaatgtaggtcttactaaatgtatatgcatgtatttcagattatactaggatttcttggattagaagcagattgtgttaactgtaacttaaagaatgaatgttaaataaaatgatacagatttattttcttcattacaaaatgaaatttcaagaaggtgttacttttgtagaatggttttataatatgacaagaaattttaatatagtgtctaccctaaagggatggcttatttgcatctaccttttactgcatgtttttcacaaggcagtttattcatatattgacatattttggtagtagctgagaacctaagacttgaaattatacattgtgtagtattttttaagctaagcaatgcaattttggtcagatcttatttgtgtgaagataggctctgaaatcctatggtattgcgtttgtaacgttgatattaatgcaaaatagtttaggaaatggagtcttctgcaagggttctgtatacttttcccacattgtatgagattttccaaaattttggtgtgaattgggcacttttggaaaactcctgaaaaagaattagtttccttcatctgcagacctttgtccaatacggttaccatttctttatagtaactcgattagccatatatgtttgtttctagtcctgctcctttgctcctctcctatgccttcccagtgctggctccattttgaagactcaaggacagaggggaagcagatcataaagagaaaaaggagacagaagaaaggatgaaggaaggaggtcatggggagtgtggcttctgagcagtttagttgctggggagagcagacagtcactgcctacaatacagacagaaccttcctgctcactttctgtcctatctcttcctgaccttatgaaccagtgttagtagatgattaaaacatgacaagcaatggctccttattttcacaggactaagtccgggccttcgtatcactagctgttgccttttacaccctgcttcagccaccctgtccctgtcattggccctggacttcctctctgtgcccgtgtgtcctctgcctgggagccctctcctcccatagtcactttctctctgccaaactcatttcttcttgtgcccaagacctctctcctgagcccttgtggaaacttcaggaaggatgaatccgtctttgtgctccacggctcgtaccttgatcaggctgtgcatcacagtaattctgttctaggtaggcagagttgatctttgtctcatctgccaggctgcaggctcttcaagggcagggaccttgtcatagtcatttttattttcacagtgcttggaacatggtggaaaatgaatgttggaattattggagtaatataatttgtatcaaatgtccttttgaattaagagatttagttatgtttactaagaatgtaaactttgaattggtttgcattttaacaattaggatggtttattgatgtgaattttgaaatgtagaggtataatgttaaattattttatactttatggaaatcaagtgaaatgtttgaaaaaatgccgccattatcctctggtattttctactctctggaattatgtgctgtaaatgatcggctgtaaatgtgaggcacaccacccacccctgtgtggaaagtgttgtggcgcttcctgccacccacccacctctctgccgttgctccttgtgacacttgtctgtcgtctcccatccaaactccaagcttacagctacctcagtactgctttgcttgtctgaaacacctcctttgccttccttcagtgtcccgctcaggtgcagcctcctccctaaagctcatctcagcttttgatctgaatgatgatggaaacatgcagacagcctctcagtcttactatttaatgttgtagctgggaaaaaacccagagaggttaactgatatactgggttgggactaggatgtgggttttgtgactctgaatcccatgttctcaaactacgctgccttccgaagtctggcatttgttagctcatgcttccttgtagtccagcttcttatgtgcctgttatattctccagtaagattgtaagccccttaagggcagggacgtctttgcatctctagcactgctatagtgttctatccttagttatgaactagataaataaatggtggtggcaacaatcct

SEQ ID NO: 322493 - protein, 200 aa, Artificial Sequence
  derived and/or modified sequence
VLIFACLVPGFPAVMSSRGPCTLETLINPSPSVADVKIYPEEITPLLPAISGEKIAEDQTCFFLQILLKYMVIQAASLEWKNKENQDTGFKFLFTLFRKYYLPHLFPSFTKLTNIYKPVLDIPHLRPKPVYITTTRDNENIYSTKIPYMAARVVFIKWIVTFFLEKKYLTATQNTKNGVDVLPKIIQVCHPSSFYLLMLV

SEQ ID NO: 322494 - protein, 250 aa, Artificial Sequence
  derived and/or modified sequence
  misc_feature (1)..(1): Xaa can be any naturally occurring amino acid
XQPSPVEPRGPFYFCRLLLDDLGMNSWDRRKNFHLLKKNSKLLRELKNLDSRQCRETHKIAVFYIAEGQEDKCSILSNERGSQAYEDFVAGLGWEVDLSTHCGFMGGLQRNGSTGQTAPYYATSTVEVIFHVSTRMPSDSDDSLTKKLRHLGNDEVHIVWSEHSRDYRRGIIPTAFGDVSIIIYPMKNHMFFIAITKKPEVPFFGPLFDGAIVSGKLLPSLVCATCINASRAVKCLIPLYQSLYLFALNV

SEQ ID NO: 322495 - protein, 227 aa, Artificial Sequence
  derived and/or modified sequence
  misc_feature (1)..(1): Xaa can be any naturally occurring amino acid
XLIFACLVPGFPAVMSSRGPCTLETLINPSPSVADVKIYPEEITPLLPAISGEKIAEDQTCFFLQILLKYMVIQAASLEWKNKENQDTGFKFLFTLFRKYYLPHLFPSFTKLTNIYKPVLDIPHLRPKPVYITTTRDNENIYSTKIPYMAARVVFIKWIVTFFLEKKYLTATQNTKNGVDVLPKIIQTVGGGAVQERAPELDGGGPTEQDKSHSNSSTLSDRRLSNS

SEQ ID NO: 322496 - protein, 284 aa, Artificial Sequence
  derived and/or modified sequence
MFSRRSHGDVKKSTQKVLDPKKDVLTRLKHLRALLDNVDANDLKQFFETNYSQIYFIFYENFIALENSLKLKGNNKSQREELDSILFLFEKILQFLPERIFFRWHYQSIGSTLKKLLHTGNSIKIRCEGIRLFLLWLQALQTNCAEEQVLIFACLVPGFPAVMSSRGPCTLETLINPSPSVADVKIYPEEITPLLPAISGEKIAEDQTCFFLQILLKYMVIQAASLEWKNKENQDTGFKFLFTLFRKYYLPHLFPSFTKLTNIYKPVLDIPHLRPKPVYITTTR

SEQ ID NO: 322497 - DNA, 753 bp, Artificial Sequence
  derived and/or modified sequence
tgacagcccagccccgtggagcccagaggccccttctacttctgcagactgctgctggacgacctgggcatgaacagctgggacagaagaaagaacttccacctgctgaagaagaacagcaagctgctgagagagctgaagaacctggacagcagacagtgcagagagacccacaagatcgccgtgttctacatcgccgagggccaggaggacaagtgcagcatcctgagcaacgagagaggcagccaggcctacgaggacttcgtggccggcctgggctgggaggtggacctgagcacccactgcggcttcatgggcggcctgcagagaaacggcagcaccggccagaccgccccctactacgccaccagcaccgtggaggtgatcttccacgtgagcaccagaatgcccagcgacagcgacgacagcctgaccaagaagctgagacacctgggcaacgacgaggtgcacatcgtgtggagcgagcacagcagagactacagaagaggcatcatccccaccgccttcggcgacgtgagcatcatcatctaccccatgaagaaccacatgttcttcatcgccatcaccaagaagcccgaggtgcccttcttcggccccctgttcgacggcgccatcgtgagcggcaagctgctgcccagcctggtgtgcgccacctgcatcaacgccagcagagccgtgaagtgcctgatccccctgtaccagagcctgtacctgttcgccctgaacgtgtag

SEQ ID NO: 322498 - DNA, 753 bp, Artificial Sequence
  derived and/or modified sequence
tgacagccttcaccagtagagcccaggggccctttctacttttgtcgccttcttctggacgacctggggatgaatagttgggatcggaggaagaactttcacctgctcaagaagaatagtaaactgttgcgtgaactcaagaacttggactcacggcaatgccgggaaactcacaagatcgctgtcttttatattgccgagggacaggaggacaagtgctccattctgagtaacgagagaggaagccaggcttatgaggacttcgtggcagggctggggtgggaggtggacctgagcacacactgcggcttcatggggggccttcagcgtaacggcagcacaggacaaaccgcgccctattatgctaccagtacagtggaagtgattttccacgtttcaacgaggatgccttctgattctgacgactccttaacaaagaagctaaggcatctcgggaacgacgaagtgcacatagtgtggagcgaacattcgcgggattaccggcgcggcattattcctaccgcatttggcgatgtcagtattatcatttacccaatgaagaaccatatgttctttatcgctattacaaaaaaaccagaggtgccttttttcggacctctgttcgacggcgccatcgtctccggaaagttgctacctagtctcgtgtgtgccacgtgtataaatgcttcccgggcagtaaaatgtctcatacccctataccagtccctctacctgttcgctcttaacgtatag

SEQ ID NO: 322499 - DNA, 753 bp, Artificial Sequence
  derived and/or modified sequence
tgacagcccagccctgtggagccccggggccccttctacttctgccgcctgctgctggatgacctgggcatgaacagctgggacaggaggaagaacttccacctgctgaagaagaacagcaagctgctgcgggagctgaagaacctggacagccggcagtgccgggagacccacaagattgctgtgttctacatcgccgagggccaggaggacaagtgcagcatcctgagcaatgaaagaggcagccaggcctatgaggactttgtggccggcctgggctgggaggtggacctgagcacccactgcggcttcatgggcggcctgcagagaaatggcagcacaggccagacagccccctactatgccaccagcacagtggaggtgatcttccacgtgtccaccaggatgcccagcgacagtgatgacagcctgaccaagaagctgcggcacctgggcaatgatgaggtgcacatcgtgtggagcgagcacagccgggactaccgccggggcatcatccccacagcctttggagatgtgtccatcatcatctaccccatgaagaaccacatgttcttcatcgccatcaccaagaagccagaggtgcccttcttcggccccctgtttgatggagccatcgtgtctgggaagctgctgcccagcctggtgtgtgccacctgcatcaatgccagcagagctgtgaagtgcctgatccccctgtaccagagcctgtacctgtttgccctgaatgtgtag

SEQ ID NO: 322500 - DNA, 753 bp, Artificial Sequence
  derived and/or modified sequence
tgacagcccagccccgtggagccccggggccccttctacttctgcagactcctcctcgacgatttaggtatgaactcttgggacagacgaaagaatttccacctcctgaaaaagaactccaaattactcagggaattgaaaaacctggacagtagacagtgcagggagactcacaagattgccgtcttctatattgcggagggtcaggaggacaagtgttccatcctatctaacgaacgtggctcccaagcctacgaagacttcgtggccggtctcggatgggaagtggatctctcaacacactgcggctttatgggggggttgcaacgcaatgggagcaccggccagacggcgccttactacgccacctctactgttgaagttatcttccatgtatcgaccagaatgcctagcgactcagacgattcgcttacgaaaaaacttcggcatctcggcaacgacgaggtgcatatagtgtggtccgagcactctcgggactacaggcgtgggattatccccactgcgttcggggatgtttcgatcatcatctatcccatgaagaaccatatgtttttcatcgcaattacaaaaaagcctgaggtccctttctttgggcctctgtttgatggagctatcgtctctggaaagcttctgccctcactggtgtgtgcgacatgcatcaacgctagccgagcagttaagtgcctgattccactttatcagagcctgtacctcttcgctctgaacgtgtag

SEQ ID NO: 322501 - DNA, 753 bp, Artificial Sequence
  derived and/or modified sequence
tgacagccgagtcccgtggagccgagaggcccattctacttctgtaggctgcttctcgatgacctgggtatgaattcctgggaccggcgtaaaaacttccatctgctgaagaagaacagcaagttgcttcgcgaattaaaaaatctggactcaagacagtgccgagaaacacacaagattgcagtgttctatatcgccgaagggcaggaagataagtgtagtattttgtccaacgagcgagggagtcaggcttacgaagattttgtcgccggactaggatgggaggtggacctgtcaactcattgtggatttatgggcggtctgcagcgcaacggctctacgggtcagaccgccccttactatgccaccagcacagtggaagttatcttccatgtttcaacaaggatgccctccgattccgacgacagcctaaccaagaagctcagacatttgggtaatgacgaggtgcatattgtgtggtccgaacactccagagactatcgtcggggaattatacctactgcattcggtgatgtgtccatcattatctaccctatgaagaatcacatgttctttatcgcaatcaccaaaaagccggaagtccccttcttcggcccactgtttgacggggctatcgtctccggcaaattgctgccaagccttgtctgcgccacgtgcattaatgcttcgcgggctgttaaatgtctgattccgctgtatcaaagtctttacctgtttgcgctgaacgtttag

SEQ ID NO: 322502 - DNA, 2119 bp, Artificial Sequence
  derived and/or modified sequence
ggcagccctccccagtggagccccgaggacccttttatttctgcaggttattgcttgatgacttgggaatgaattcttgggacagaaggaagaattttcatctattgaagaaaaattcaaaattattgagagagctgaaaaatttggactcccgccagtgccgtgagacacacaaaatcgcagtgttttacattgctgaaggtcaagaagacaagtgttcaatcctctctaatgaaagaggaagccaagcatatgaagactttgttgctggacttggatgggaggtggatctctccacccactgtgggttcatgggtggccttcagcgcaatggcagcaccgggcagacggccccttactatgctacctcaactgtggaagtgattttccatgtttccactcgaatgccgtcagactcagatgattccctcaccaaaaagcttcgtcacttggggaatgacgaggtccatatcgtctggtctgaacactccagagactaccgcaggggtattatcccaactgcctttggagatgtttcaatcattatttacccaatgaagaatcacatgttcttcatcgcgataacgaagaaacctgaggttccattttttgggcctctgtttgatggagccatagtgagtgggaagctgctgccaagccttgtatgtgccacgtgcatcaacgccagcagggctgtgaagtgcctcatcccactctaccagagcttgtatctttttgctttaaatgtgtaacttactaaccatcccagaatcaagattcctggcagtttttcataagaggtaagtattcaaaactgaattgaagagggaagagaatttttttcaacctctgttaaaaataacatagtggtttttcatagcatttgttaatttatattaaatataataattttatgctgcattaaacttagagtttactttcataatttactcacatacgtttgtgtctgagaagctgtgaccattatgagatgctcatatcttcttaggtattttgccccacgttcagtctcatcctgtatccctcttatttgtggcagtccattgtatataaggtgggatgctgagcaaaacgtatcgctcattcagagtgcctaccagaaaccaaagcaaatgaaatgaccctaataaatcaaagaatgtggcaggtaccacctgagaagtgcaagtaggtttctggaagatcagaggagatagaaattgcatttggttgagggtagagggaaagatgtcctgaattaagttgcatttggacttatcaataggaatagctagaaattcttttgtaattttcccaaatcattgatattttctctagttcctgattttgtttccaaaaacagaataaatttcactcctaaaattttttcctcaaacattaattggcctgctgtagtccttaaattcaagcatgatctcaagttataagaaaaagagattaagatgggtgaccttataaaattgatgcaaaaaaagtgacctcctaataaaacttagaatctctttgtttctaattggtattgataataatttgaaacatattgtgtttgacctctatatatacttctcccaacctgatagtaagtgatgtgttgctatagcaagtgagagttgggggtagatgaaaactatcccatgtgaatagatacggttcatgaaaaaatacctttcattaaaatcctggtcacttcattgactgatattctgcctttagattaaaaaaaaatacatatgccatgtggcaacttaaaattatcatagaaatgagtagtagaaaagagctattaggtcccatctggtccctcccctgggggccagggcaggattattcccttcagtgtactctctcgtgctttgtccaggctggtggtgagtgttttggagatggcattctttgcagtgatttccacaacactgtagacgtaatcttgtggctggtgtcaatttggccttcagcatggagtttttatttcacatactattaaaaagagcctcttggcagaaatgagaaagaactattcagcgattagtttgtcagtttgcatgtcaactaggacgagctgggcacgcatcagtcaagtatgttggaccaaggcagc

SEQ ID NO: 322503 - DNA, 912 bp, Artificial Sequence
  derived and/or modified sequence
gaggacgagtacatccagagccacaacttcgacagcgccatgaaggtgaccagccagggccagcccagccccgtggagcccagaggccccttctacttctgcagactgctgctggacgacctgggcatgaacagctgggacagaagaaagaacttccacctgctgaagaagaacagcaagctgctgagagagctgaagaacctggacagcagacagtgcagagagacccacaagatcgccgtgttctacatcgccgagggccaggaggacaagtgcagcatcctgagcaacgagagaggcagccaggcctacgaggacttcgtggccggcctgggctgggaggtggacctgagcacccactgcggcttcatgggcggcctgcagagaaacggcagcaccggccagaccgccccctactacgccaccagcaccgtggaggtgatcttccacgtgagcaccagaatgcccagcgacagcgacgacagcctgaccaagaagctgagacacctgggcaacgacgaggtgcacatcgtgtggagcgagcacagcagagactacagaagaggcatcatccccaccgccttcggcgacgtgagcatcatcatctaccccatgaagaaccacatgttcttcatcgccatcaccaagaagcccgaggtgcccttcttcggccccctgttcgacggcgccatcgtgagcggcaagctgctgcccagcctggtgtgcgccacctgcatcaacgccagcagagccgtgaagtgcctgatccccctgtaccagagcttctacgaggagagagccctgtacctggaggccatcatccagaaccacagagaggtgatgaccttcgaggacttcgccgcccaggtgttcagccccagccccagctacagcctgagcggcaccgactag

SEQ ID NO: 322504 - DNA, 912 bp, Artificial Sequence
  derived and/or modified sequence
gaggatgagtacatccagtcccacaacttcgactcggccatgaaggttacttctcagggtcaaccttcccccgtcgagcctcgaggcccattctatttctgcagacttctgctcgacgatcttgggatgaactcctgggacagaaggaagaatttccatctcctcaaaaagaatagcaaactcctgcgtgagctgaagaacctcgacagcaggcagtgccgcgagactcataagatagccgtgttctatatcgcagagggacaggaggataagtgctcaatcctgtcaaatgagcgaggatctcaggcgtacgaagatttcgtcgcaggcctcggatgggaggtggacctcagcacccactgcggtttcatggggggtcttcagcgaaatgggagcaccggacagacagctccttattacgccaccagcaccgtggaggttatcttccatgtcagcactcggatgcccagcgatagtgatgattcactcactaaaaaactccgccaccttggaaacgatgaagtgcatattgtctggagtgagcattcccgtgactatcggcgaggaattatcccgacggcgtttggcgatgtctctatcattatctaccccatgaaaaaccatatgttcttcatcgccattacaaagaagcctgaagtaccttttttcggacccctttttgatggtgccattgtaagcgggaagctgttgcccagtcttgtttgtgccacctgtatcaatgcctccagagccgtcaaatgtcttatccccttataccaatcgttttatgaggagagggctctgtatctagaggccatcattcaaaaccaccgggaggtgatgacctttgaagactttgcagctcaggtatttagtccatccccttcctactcactgagcggcactgattag

SEQ ID NO: 322505 - DNA, 912 bp, Artificial Sequence
  derived and/or modified sequence
gaagatgagtacatccagagccacaactttgacagcgccatgaaggtgaccagccagggccagcccagccctgtggagccccggggccccttctacttctgccgcctgctgctggatgacctgggcatgaacagctgggacaggaggaagaacttccacctgctgaagaagaacagcaagctgctgcgggagctgaagaacctggacagccggcagtgccgggagacccacaagattgctgtgttctacatcgccgagggccaggaggacaagtgcagcatcctgagcaatgaaagaggcagccaggcctatgaagattttgtggccggcctgggctgggaggtggacctgagcacccactgcggcttcatgggcggcctgcagagaaatggcagcacaggccagacagccccctactatgccaccagcacagtggaggtgatcttccacgtgtccaccaggatgcccagcgacagtgatgacagcctgaccaagaagctgcggcacctgggcaatgatgaggtgcacatcgtgtggagcgagcacagccgggactacagaagaggcatcatccccacagcctttggagatgtgtccatcatcatctaccccatgaagaaccacatgttcttcatcgccatcaccaagaagccagaggtgcccttcttcggccccctgtttgatggagccatcgtgtctgggaagctgctgcccagcctggtgtgtgccacctgcatcaatgccagcagagctgtgaagtgcctgatccccctgtaccagagcttctatgaggagcgggccctgtacctggaggccatcatccagaaccaccgggaggtgatgacctttgaggactttgctgcccaggtgttcagccccagccccagctacagcctgagcggcacagactag

SEQ ID NO: 322506 - DNA, 912 bp, Artificial Sequence
  derived and/or modified sequence
gaggacgagtacatccagagccacaacttcgacagcgccatgaaggtcacctcacaagggcagccatccccggtcgagccacgaggccccttctacttctgtagattgctcttggacgatctgggcatgaattcttgggaccggcgaaaaaattttcatttgctgaagaaaaacagtaagctgctgagggaacttaaaaatctcgattctcgccagtgtcgcgaaactcataaaatagcagtcttctatattgccgaaggccaggaggacaagtgctccatattgagcaacgaacggggctctcaggcctatgaggactttgttgccggtttgggctgggaggtggacctttctacacattgcgggtttatgggggggcttcagcgaaacggatccaccgggcagacagccccctactatgcaacttctaccgtcgaagtgatttttcacgtgtccacccggatgccctctgactccgacgattcactaactaaaaaacttagacacttaggtaatgacgaggtgcatatagtctggtctgaacattctagggattatcgacgcgggatcatccccaccgcctttggagatgtgagcattatcatctatcccatgaaaaaccatatgtttttcatagcaataactaagaagccggaagtgcctttctttggccctctttttgatggcgcgatagtgagcgggaagcttctcccaagtctggtctgcgctacctgtataaacgcaagtagggctgtcaaatgtctgatccctctgtatcagtccttctatgaagagagggctctttacctggaggctatcatccagaatcatcgcgaagtaatgaccttcgaagacttcgctgctcaagtcttcagtccctccccctcctacagcttatccggaaccgattag

SEQ ID NO: 322507 - DNA, 4649 bp, Artificial Sequence
  derived and/or modified sequence
gaggatgagtatatccagagtcataacttcgattctgcaatgaaagtcaccagccaagggcagccctccccagtggagccccgaggacccttttatttctgcaggttattgcttgatgacttgggaatgaattcttgggacagaaggaagaattttcatctattgaagaaaaattcaaaattattgagagagctgaaaaatttggactcccgccagtgccgtgagacacacaaaatcgcagtgttttacattgctgaaggtcaagaagacaagtgttcaatcctctctaatgaaagaggaagccaagcatatgaagactttgttgctggacttggatgggaggtggatctctccacccactgtgggttcatgggtggccttcagcgcaatggcagcaccgggcagacggccccttactatgctacctcaactgtggaagtgattttccatgtttccactcgaatgccgtcagactcagatgattccctcaccaaaaagcttcgtcacttggggaatgacgaggtccatatcgtctggtctgaacactccagagactaccgcaggggtattatcccaactgcctttggagatgtttcaatcattatttacccaatgaagaatcacatgttcttcatcgcgataacgaagaaacctgaggttccattttttgggcctctgtttgatggagccatagtgagtgggaagctgctgccaagccttgtatgtgccacgtgcatcaacgccagcagggctgtgaagtgcctcatcccactctaccagagcttctatgaagagcgagctctgtatctcgaagcaataattcagaaccaccgcgaagtaatgacattcgaggatttcgcagcccaagtcttttctccctctcccagctactccctcagcggaacggattaaaacacgtaaaggtctcatttcaatatttgagcaaggggccctggcctccagtctgagtgctgacctcgaagagcccctgagtgaggaggagacagaacaccctctcctgcctctgccccgagccactaaacccagaatctccaggaaatttcgttgctgtactagtgccctcagcaggtcttcccattagtggacttctgaagcccatggtgaatcccactaccgtgtctcagatgggactcaaactaggctgtatcatcttgtcctgaaacctcacaaaccttggacttccaaagaagaaaagaaaaagtcaccaaaaaccagagatgaacccactgacacgtgggcactggtgtggctgctctgggcagatgacagcaggaaaagattctgcgctttcagggagggggcagagggcagcttgcttctgcaccccaagttgtttcttctcatttatgaacccaagcatgattcacaaaggggctggcaaaacaattgtctaattgaggaatctgatctgcattgattttgctagttccttttatgttaggatttatggtttactcaaaaatttcatcatcatggaaattggctttccccggggtcttttgcccaggagaagttttacctcagttgtccagtgttttcccacatggtacctgacgcccgctaactaagcagaggctctcctcaccacgcagaggcgcttcaggtcatgacagtgatgcccctatcttagaacactcagaagattccagaaatacagggtcctgtccttgcataagttcctgcaggacaggaagtgtcccaaggctcaaaacaacacagaccacatccacacaaaaggcgcatgccggcttcaggcgctaggctgagacgggtaccccccgaatggccttgtgcctccaaaagcctcacgctgcaactttgctgctcctgtctgttgcccagagaggcctcacacaggcctcagaaatgtttcttgtcacacaaagcttttggtagccgattccaagcgagggatttaatccttacatttttgcccatttggctccaaggaaggcttattagacctgtttttttgttgttgttgtttttttttcttaaaaacaaaatgaatgaatgaatgaaaagagaagcaatggtgagccctctcctgctggggcgccctgggtgggccttgcccgtcctgcagcagagaaatcagtcagcagcgaagagctgctggcgcaggccccaggctgtgtcctggacccttgacctgcctcagagctagaggtttgctccaccccgcacttcacttgggaagtaaatccaagaagcttaccagagtccatcgccactgcgcaggctttgttctcacagcggccaggtacagagcaacgccctgcagtgggaagggacagcagcacgagagacgcagcccctaactcagggcttatgatgggtgggctggtcctgggaaaggcgggccctgtgcgggaggcctccccaccttcctgtgccctctgccctctgcccttgcacacacttgttaccttcaggctgcttggccacccaggcctgaagaagccttctgaggctctcaccccatcagaacggccattttcactgaggagccagttttttccatttgccatggagctggtttggctggaacctggcctttgtagggaaaacggggagactcaggagccagactcactcttgggacaaatgagaaagagctgagccagtcgttcctgtcggaagggcgggcctgctcatcctggcgagaatttgcttttctgctttataggggattgcaggccaggcccactgacaggagcaccttgagaaccacctgaacagaagagaatgagggtgccccaaagtggaaggaagcttctggcccctgggccgttttgggaagggcccaggatactcacgggggctgaagggcaatgtgaagagtgactgcaagtcctggcattttctgtggtgtcagcaaatgcccctttattttaaatgattccagacatctgggcagcatagcttggccaccatcactcaggcttgatcctgctgttgagctgctcctgtctcctgtttacctcactcctgttgggaaggccatcgcatgctcctaggctccagagtcccctgtaggtctctaccagcaggtcgcctctgggagaacgtttcatcttcaggctctagaaactcctgttgcggaattgctggctttagtagaaaagatatgtcaggatttagaaatcgtattgaactctcctggacttctgctccatgatttcattttgctttcacgaaccagcgatccctaccttggggtgggaaattcaattgtaggcagcaaataactcaaccctcctgtaacccctgaggattataacgaccccatgacccccgatgacagccagcagtttggtgactagagttttttgagcctgccattctcagtagcagctttggtctggagatggaacgtggagcagggaatctgacagccacgtttctcgtgatcacgtggactggagttgtttttgttatctggggtggaaaattgcaatgatcaagtttcttttttattttttttttacttagaaaagcaaatattgtgtttttgtaataaatccctttcagcaaaattgcggaggatcattcatccactagggccccacctgaggcacagcgctgactcatcacggtggtaccagtaggtcagccatctggaaacagaagtggccctaattgggccaaaatgtggtaagactcgctggcctcaggcagggccaggccagttccctcacttctctgcacacctattcccagattccatccagagcaaagctgatgtttatcgtctcattgtacttaggctttcgtactttaaaaaattatgactttttaaaaataagccttcagcagacagaagtgaagaaatttagcctgggttgcctcagcaacaaagtctgcggttcctaagagccacatgttggggaagtggggtgacccaaacttggtgacataggttgattgatcagaccctcagccttacaagcaagagctcatgcagatccacagagccatgcacatcctgtcttcctgaccttcctcaggtggcaccacctgcgccccatggacctgctgtatcggtgtcatgtggaggtctgatgaatcctttaaaacctaactgtgatgtcgtaaatgtaactgtgctacctttatatctactgaagggcagcgtctgcatccgagggaaattcaacatgaaacaaccatcgttttagttgcactcagtctgtccatatgacatacacatgaagtgaatgtttccttatgttttcaggtctacaatgtttagtacatgtaaataaggaaaaaatttgataaatatggtaaattaagttatagcgtgtcatttgattcttattttgctgtctcttgttatttaattttcctaatgctccacatctaggttccttcctaggtggtgggaacaccttgcagacgtgtgtgcaccaggacacaccgcggcccaggcagccacaccgagaaagcacacatctccactgatggcagccacccgactctccagttaacctcttttactctttaattctgatttactgtgatgatttaataaagtggaaacacagcacttcagtgctatatgtttctctcattctcattatagtttataagaaaataaagttcaccctggcatctaataaaaa

SEQ ID NO: 322508 - DNA, 912 bp, Artificial Sequence
  derived and/or modified sequence
gaagatgagtatattcagagccacaactttgattctgctatgaaagtgacctcacaaggccagcccagccctgtagagccccgaggcccattctacttttgcagactgctactcgacgatctggggatgaactcgtgggatcggaggaagaattttcacttacttaagaagaattctaaactcctccgcgaacttaaaaatctggacagtcggcaatgccgggaaacccacaagatcgcagtgttctacattgccgaggggcaggaagacaagtgttcaatcctgtccaatgaaaggggctcacaggcttatgaggattttgttgctggcctgggctgggaagtagacctgagtacccattgtgggttcatggggggtttgcagcggaatgggagcactgggcagaccgccccttactacgcaacctccaccgtggaggtgatctttcatgtctcaaccagaatgccttcagattcagacgactcactcaccaaaaaactgcgacacctggggaacgatgaagtacacattgtatggagcgagcattctagggactatcggaggggaatcatccctaccgcatttggcgatgtgtccatcatcatctaccctatgaagaaccacatgtttttcatagccatcaccaagaaacctgaagttccctttttcgggccacttttcgatggtgcgattgtgagtggcaaattactcccaagtctggtgtgcgccacatgcatcaatgcctctcgggctgtgaaatgccttatacccctctaccagtccttttacgaggagcgggctctctacctcgaagcaattatccagaatcaccgcgaagtcatgacctttgaggatttcgctgcccaggtgtttagcccatcgccgtcgtattccctgtctggtacagattag

SEQ ID NO: 322509 - DNA, 198 bp, Artificial Sequence
  derived and/or modified sequence
atgttttacacacacgtgctgatgtcgaagcgtggccctctggcgaaaatttggttagctgcacactgggaaaaaaaactcaccaaggctcatgtttttgagtgcaaccttgaaatcacgatagaaaaaattctctcaccgaaggtcaagattgcgctccgaacctctggccacttgctcctcggtgtcgtgcggtag

SEQ ID NO: 322510 - DNA, 198 bp, Artificial Sequence
  derived and/or modified sequence
atgttctacacccacgtgctgatgagcaagaggggccccctggccaagatctggctggccgcccactgggagaagaagctgaccaaggcccacgtgtttgagtgcaacctggagatcaccatcgagaagatcctgagccccaaggtgaagatcgccctgcggaccagcggccacctgctgctgggcgtggtgaggtag

SEQ ID NO: 322511 - DNA, 492 bp, Artificial Sequence
  derived and/or modified sequence
ttgaaagtagggcgcagcctgagaggccggccggaccccgagtgctgtaggcgggctgggagatgggggccgccgccacccacattcccacacgcacccggcgccggcgcctcacgccgtgttagctcgcggcgccaagcccggagggtcccgcctgaggaagaaaggtcgtcgcccgcagcccagctggggctggaggcgcgacccggggtctcctcgcccgcacgcggaagaaaatgggcgctgtggcctcagtttccctcttttgttaaatacaagtaaggaacacaggcaacatgttctacacacatgtgcttatgagtaaacgagggccattggccaaaatatggcttgcagctcactgggagaagaaactcacaaaggcccatgtatttgaatgtaatctagagataaccattgaaaaaattctttcacccaaggtgaaaatagcacttcgaacttcaggacaccttcttttgggagttgttcgaa

SEQ ID NO: 322512 - DNA, 198 bp, Artificial Sequence
  derived and/or modified sequence
atgttctacacccacgtgctgatgagcaagcggggccccctggccaaaatctggctagccgcacattgggaaaagaaattaaccaaggcccacgtgttcgaatgcaacctggaaatcaccatcgagaaaatactctctcctaaagtgaaaatagctttacgcacctctggacacttacttctcggagtggtgcgctag

SEQ ID NO: 322513 - DNA, 198 bp, Artificial Sequence
  derived and/or modified sequence
atgttctatactcacgttttgatgtccaaacgcggtcccttggcaaagatctggctggctgcacactgggagaagaaactgacaaaggctcacgtatttgaatgtaaccttgagatcacgatcgagaagatcctgagccccaaagtgaagatagcattgcggacttctggtcatctcctgttaggcgtagtcagatag

SEQ ID NO: 322514 - DNA, 198 bp, Artificial Sequence
  derived and/or modified sequence
atgttctacacccacgtgctgatgagcaagagaggccccctggccaagatctggctggccgcccactgggagaagaagctgaccaaggcccacgtgttcgagtgcaacctggagatcaccatcgagaagatcctgagccccaaggtgaagatcgccctgagaaccagcggccacctgctgctgggcgtggtgagatag

SEQ ID NO: 322515 - protein, 12 aa, Artificial Sequence
  derived and/or modified sequence
WESFDVTPAVMR

SEQ ID NO: 322516 - protein, 1709 aa, Artificial Sequence
  derived and/or modified sequence
MGFLPKLLLLASFFPAGQASWGVSSPQDVQGVKGSCLLIPCIFSFPADVEVPDGITAIWYYDYSGQRQVVSHSADPKLVEARFRGRTEFMGNPEHRVCNLLLKDLQPEDSGSYNFRFEISEVNRWSDVKGTLVTVTEEPRVPTIASPVELLEGTEVDFNCSTPYVCLQEQVRLQWQGQDPARSVTFNSQKFEPTGVGHLETLHMAMSWQDHGRILRCQLSVANHRAQSEIHLQVKYAPKGVKILLSPSGRNILPGELVTLTCQVNSSYPAVSSIKWLKDGVRLQTKTGVLHLPQAAWSDAGVYTCQAENGVGSLVSPPISLHIFMAEVQVSPAGPILENQTVTLVCNTPNEAPSDLRYSWYKNHVLLEDAHSHTLRLHLATRADTGFYFCEVQNVHGSERSGPVSVVVNHPPLTPVLTAFLETQAGLVGILHCSVVSEPLATLVLSHGGHILASTSGDSDHSPRFSGTSGPNSLRLEIRDLEETDSGEYKCSATNSLGNATSTLDFHANAARLLISPAAEVVEGQAVTLSCRSGLSPTPDARFSWYLNGALLHEGPGSSLLLPAASSTDAGSYHCRARDGHSASGPSSPAVLTVLYPPRQPTFTTRLDLDAAGAGAGRRGLLLCRVDSDPPARLQLLHKDRVVATSLPSGGGCSTCGGCSPRMKVTKAPNLLRVEIHNPLLEEEGLYLCEASNALGNASTSATFNGQATVLAIAPSHTLQEGTEANLTCNVSREAAGSPANFSWFRNGVLWAQGPLETVTLLPVARTDAALYACRILTEAGAQLSTPVLLSVLYPPDRPKLSALLDMGQGHMALFICTVDSRPLALLALFHGEHLLATSLGPQVPSHGRFQAKAEANSLKLEVRELGLGDSGSYRCEATNVLGSSNTSLFFQVRGAWVQVSPSPELQEGQAVVLSCQVHTGVPEGTSYRWYRDGQPLQESTSATLRFAAITLTQAGAYHCQAQAPGSATTSLAAPISLHVSYAPRHVTLTTLMDTGPGRLGLLLCRVDSDPPAQLRLLHGDRLVASTLQGVGGPEGSSPRLHVAVAPNTLRLEIHGAMLEDEGVYICEASNTLGQASASADFDAQAVNVQVWPGATVREGQLVNLTCLVWTTHPAQLTYTWYQDGQQRLDAHSIPLPNVTVRDATSYRCGVGPPGRAPRLSRPITLDVLYAPRNLRLTYLLESHGGQLALVLCTVDSRPPAQLALSHAGRLLASSTAASVPNTLRLELRGPQPRDEGFYSCSARSPLGQANTSLELRLEGVRVILAPEAAVPEGAPITVTCADPAAHAPTLYTWYHNGRWLQEGPAASLSFLVATRAHAGAYSCQAQDAQGTRSSRPAALQVLYAPQDAVLSSFRDSRARSMAVIQCTVDSEPPAELALSHDGKVLATSSGVHSLASGTGHVQVARNALRLQVQDVPAGDDTYVCTAQNLLGSISTIGRLQVEGARVVAEPGLDVPEGAALNLSCRLLGGPGPVGNSTFAWFWNDRRLHAEPVPTLAFTHVARAQAGMYHCLAELPTGAAASAPVMLRVLYPPKTPTMMVFVEPEGGLRGILDCRVDSEPLASLTLHLGSRLVASSQPQGAPAEPHIHVLASPNALRVDIEALRPSDQGEYICSASNVLGSASTSTYFGVRALHRLHQFQQLLWVLGLLVGLLLLLLGLGACYTWRRRRVCKQSMGENSVEMAFQKETTQLIDPDAATCETSTCAPPLG

SEQ ID NO: 322517 - protein, 463 aa, Artificial Sequence
  derived and/or modified sequence
  misc_feature (1)..(1): Xaa can be any naturally occurring amino acid
XLALVLCTVDSRPPAQLALSHAGRLLASSTAASVPNTLRLELRGPQPRDEGFYSCSARSPLGQANTSLELRLEGVRVILAPEAAVPEGAPITVTCADPAAHAPTLYTWYHNGRWLQEGPAASLSFLVATRAHAGAYSCQAQDAQGTRSSRPAALQVLYAPQDAVLSSFRDSRARSMAVIQCTVDSEPPAELALSHDGKVLATSSGVHSLASGTGHVQVARNALRLQVQDVPAGDDTYVCTAQNLLGSISTIGRLQVEGARVVAEPGLDVPEGAALNLSCRLLGGPGPVGNSTFAWFWNDRRLHAEPVPTLAFTHVARAQAGMYHCLAELPTGAAASAPVMLRVLYPPKTPTMMVFVEPEGGLRGILDCRVDSEPLASLTLHLGSRLVASSQPQGAPAEPHIHVLASPNALRVDIEALRPSDQGEYICSASNVLGSASTSTYFGVRGEGRGLHLPGHSAQKPSS

SEQ ID NO: 322518 - DNA, 5129 bp, Artificial Sequence
  derived and/or modified sequence
atgggcttcctcccaaaactcctgctgttagcctcatttttcccagccggacaggcaagttggggagtcagctcgccccaggatgtgcagggggttaaggggagctgccttttgataccatgtatattcagcttccccgcagatgtagaggtcccggacggcattactgcaatttggtactacgattactctgggcaacgacaagtggtgagccattctgcggatccgaagctggtggaggccagattccggggtcggacggaatttatgggcaaccccgagcatagagtctgtaatcttctcttgaaagaccttcaaccagaggacagcggaagttacaattttaggttcgagattagcgaggtaaaccggtggagcgatgtgaaggggacgttagtgaccgtgaccgaggagccaagagtgcctactatcgcatcccccgtggaattgctggaggggactgaggttgattttaactgcagtaccccctacgtttgtctgcaggaacaggtccggctgcaatggcagggccaggatcctgcacggtctgtgaccttcaacagtcagaaattcgagccaacgggcgtgggtcaccttgagacactgcatatggcgatgtcctggcaggaccatggtaggatactgaggtgccaattgtctgtcgccaatcatcgggcacagtctgaaatccacttgcaggtgaagtacgctccgaagggcgtgaagatcctcctaagcccatctggcagaaatatactgcctggagagctagtgactttgacctgccaggtcaattccagctatccggcagttagttcgataaaatggctaaaagacggggtgcgccttcagacgaaaacaggggtgttgcatctcccacaggcggcttggagtgatgccggagtgtacacttgtcaagcagagaatggagtcggttcactggtaagccctcctataagcttacacattttcatggctgaagtgcaggtctcaccagcaggtcccattctggagaatcaaactgtgacattggtgtgcaacacacccaacgaggctccctcagaccttcgctatagctggtataagaaccatgtgctgcttgaagatgcccattcccacacactaaggctgcatctggccacgcgcgctgacactggattctacttctgcgaagtacagaacgtgcacggaagtgagcggagtgggcctgtaagcgtggtcgtgaaccaccctcccctgacgcctgttcttacagcctttctggaaactcaggcaggacttgtgggcatccttcattgttccgtcgtgagcgagccactcgccaccttggtgttgtcccatggcggacacattctggccagcacatccggagattctgatcattcccccagattcagcggtaccagcgggccaaactccttgcggttagagatccgcgatctcgaggagacagattcaggagaatataagtgcagcgccaccaattccctcgggaatgcgacatctaccctggattttcacgctaacgcggcacggcttttgataagccctgcagctgaagtggtggaaggtcaggcagttacactgagttgcaggagtggcttatccccaacaccagacgccagattctcttggtacttgaacggcgctctgctgcatgaaggccctggctctagccttctgctgcctgcagcatcttctaccgatgcagggtcttatcactgccgggctcgcgacggacactcagcatccggcccatcctcgccagcagtgctaactgtgttatacccgcctcggcagccaacgttcactacaaggctggacttggatgcagctggtgcaggggcaggcagaagaggtctcttactgtgtcgggtggactctgaccctcccgctaggctgcagcttctgcacaaagaccgcgtggtcgcaaccagcctcccgtcaggaggtggatgcagcacttgcggcggatgctcaccccgaatgaaagtcaccaaagcacccaatttactgcgagtggagattcacaaccccttattggaagaggagggtctgtacttgtgtgaagcaagcaacgctcttggtaatgcttccacgtctgctacatttaatggccaggccacagtgctggctattgcaccctctcacacattgcaagaaggcacagaagcaaaccttacttgcaacgtctcccgcgaagccgcagggtcccccgcaaacttctcctggtttcggaatggagtgctttgggcccagggacccctggaaactgtgactctcctgcccgtggctcggacagatgcagcactgtacgcctgccgtattctcacagaagcaggtgctcagctgagcacacctgttctgttgagcgtactgtaccctcccgatcgccctaagctgagcgcattgctggatatggggcagggccacatggccctttttatttgtacagtggattcgcggcctctggcactgctggctctgttccacggagagcacctcctcgctacatccctcggacctcaagtccctagccacggtaggtttcaggcaaaggctgaggccaattcactcaagctggaagttagggagctcggtctcggcgattcaggatcgtataggtgcgaggccactaatgttttaggctcaagtaacacttccctgttctttcaggtgaggggagcatgggtacaggtaagcccctcacctgaactccaggaagggcaggccgtggtgctgtcgtgtcaggtgcacacgggcgtaccagagggcactagctataggtggtatcgtgacggccagccactgcaggaaagtacaagcgcaactctccggttcgctgccattacactgacacaggccggagcttaccattgccaggcgcaggcccctgggtctgctactaccagtctggctgctcctatttcgctgcacgtatcttatgccccacggcacgttacacttactacattgatggataccgggcctgggagactgggtctcttactctgtcgagtcgattcagacccgcctgcccagcttagactccttcatggagacaggctcgttgctagtaccttgcaaggggtcggcggaccagagggttcttcccctcggctacatgtggccgtggctcccaatacgctgcggctggaaatccacggtgctatgctggaggacgaaggagtctacatatgtgaagcctccaacacgctcggccaggcctcagcgtccgctgactttgacgctcaggcggtgaatgtccaggtgtggccaggggctacagtgcgggagggccaactggtgaacctgacctgtcttgtatggacgactcatcctgcacagcttacttatacctggtaccaggacggacagcagaggctggacgcccacagcatacctctccccaatgtaactgtccgcgatgcgacctcttatcggtgtggcgtaggtcccccaggaagggccccaaggctaagtagaccaatcactctggacgtcctgtacgccccaaggaacctgcggctgacatatttgctggaatcccacggaggccagctggcactagtgctgtgtacagtggatagtagaccgcctgcgcagctggcactgagccacgcgggaaggctattagcatcctctacagcagcctctgtcccgaatactctgcggctggagctcagaggaccgcagcccagggacgaaggcttctacagctgtagcgctaggagtccgctggggcaagcgaatacttccctggagttgaggctggaaggagtcagggtgattttagcacccgaggccgcagtgcctgaaggcgcacctattacagtaacttgtgctgaccctgccgctcacgcacctaccttatatacttggtatcacaatgggagatggcttcaggaggggccagcagctagcctgtcattcctcgtcgccacccgcgcacacgccggtgcctactcctgccaggctcaggacgcccaggggacacggtcctcaagacccgcagctttacaagtactgtacgccccacaagacgcggttctgtcgagctttcgtgactcccgtgccagatcaatggctgtcattcaatgtaccgtagacagcgagcctccagcagaacttgccctctcacacgacggcaaggtgctcgcaaccagttcgggtgtgcactctctggcatctggtaccggacacgtgcaggtcgctcgcaacgcactcaggctccaggtgcaggacgttcctgccggtgacgacacatatgtgtgcaccgctcagaatctgctgggcagcatttcaacgatcggcaggctgcaggtggagggtgccagggtcgtcgcggagcccggactggatgtgcccgaaggcgctgccttgaatttgagttgtcgcctcctggggggacctggaccagtgggaaactcaacgtttgcctggttctggaatgacaggcgcttgcacgccgagcctgtgcccaccctcgcattcacgcacgtggccagggcccaagctggtatgtaccattgtcttgctgagttgcctacgggggcagccgcatcggcacctgtaatgctgagagtactctacccgccaaagacccccaccatgatggtgtttgttgagcccgaaggtgggctaagaggcattttggactgtcgtgtcgatagtgaacctctggcatcccttaccctgcatttgggcagtaggttggttgccagctcacagccccagggggctcctgccgaaccacacatccacgtgttggcttctccaaacgccttgagggtggacatcgaggctctgcgcccttctgaccaaggtgaatacatatgtagcgcttctaacgtactcgggtccgcctccactagcacctacttcggggtgcgggctcttcatcggctgcaccagtttcagcagctcttgtgggttctcgggcttctggttggcctgcttcttctgttgttagggctgggggcttgttatacttggcggagacgaagggtgtgtaaacaatctatgggggagaacagcgtagagatggcctttcagaaggagactacccagcttattgaccccgacgccgctacttgcgagacatccacatgcgcaccaccactcggata

SEQ ID NO: 322519 - DNA, 5130 bp, Artificial Sequence
  derived and/or modified sequence
atgggtttcttgccgaagctattgctgctggccagctttttccccgctggccaagccagctggggcgtctcttcaccgcaggacgtgcaaggcgtcaaaggatcttgtctccttatcccctgtattttttcattccccgccgatgtggaggttcccgacggaataactgcaatctggtactacgattattccgggcagcggcaggtggtctcccactccgccgaccccaaactcgtggaggccagattccggggcaggaccgagttcatgggcaacccggagcatagggtgtgcaacttacttctaaaagacctccagcccgaagacagcggttcttataactttagattcgaaatatccgaagtgaacaggtggtctgatgtgaaggggactctggtcacagtgacagaagagccccgtgtccctacaattgccagtcctgtggagcttcttgagggtaccgaagtcgactttaattgctcaactccctacgtctgcctgcaagaacaggtgcggctgcagtggcagggacaggacccggcaagaagcgtgactttcaatagccagaaattcgaacctacaggtgtcggtcatttggagactttgcacatggctatgtcgtggcaggatcatggccgcatcctgaggtgccagctgagcgtcgctaaccatcgtgcccaatccgagatacacctccaggtcaaatatgcacccaagggagtcaaaatcctgctctccccatccggacgtaatatcctgcctggcgaattagttacactgacgtgccaggtgaacagttcctaccctgccgtgagcagtatcaaatggctgaaagatggcgtaaggctgcagactaagacaggggtattgcacctccctcaggctgcctggtcagatgccggagtctatacgtgtcaggctgaaaacggcgttggatctctcgtctcccctcccatcagcctgcatatcttcatggccgaagtgcaggtgtccccagcgggtcctattttggagaatcaaacggtgacactggtctgcaatacaccgaacgaagcacctagcgatcttaggtactcttggtacaaaaatcacgtgctgctggaagacgcacattcacatacacttaggctgcacctcgccacgcgggccgacactggcttttatttttgcgaggtgcagaacgtgcacgggtcggagcggtccgggccagtttccgttgtagtgaatcaccctcctctcacccctgtcctgactgccttcttagagacacaagctggcctggtcggcatacttcattgctcagtggtctctgaacctctagcaacactggtcctatcacatggagggcacatcctggcaagcacaagtggcgatagcgatcactccccccgattctcaggaacctctggaccaaattcattaaggctggaaattcgcgacctcgaagaaaccgatagcggcgaatataagtgctctgccacaaactcattggggaacgccacctctacgttagacttccatgccaacgcggctagacttcttataagcccagcagcagaagtggtggaagggcaggcagtgacgttgtcttgtcggtcaggattaagccctacaccagacgcacggtttagttggtatctgaacggtgccttgttgcatgagggtcccggctccagtcttctacttcccgccgcctcctccactgatgctggcagttatcactgtagggcccgggacggacacagtgccagcggcccttcctcaccagcagtgctgactgtgctgtatccaccaaggcaacctaccttcaccaccagacttgacctcgacgctgccggcgctggggccggtcggcgcggcttgctactttgccgggtggactctgatccacctgctagactgcagctcctgcacaaggacagagtcgttgccacaagccttccaagcggaggcgggtgttcaacttgcggagggtgctcccctagaatgaaggttacaaaagctcctaatctcctgagagtcgaaattcataatccgctactggaggaagagggactatacctctgtgaagcctcaaacgctctcggaaacgcctcaacctcggcaacttttaacgggcaggctacggtactggcaattgccccatctcataccttgcaagaggggaccgaggccaacctgacttgtaacgtctcacgggaagctgcgggatcgcccgcaaatttctcatggttcagaaatggtgtgctgtgggcccagggaccgttggagactgttactctgctgcccgtggcacggactgatgcagctctttacgcttgtagaattctgacagaagcgggggctcagctctccacgccagtgttgctctctgtgctgtacccccccgatcgaccaaagctaagtgctttactagatatggggcagggtcatatggcactattcatttgtactgtggatagtagacccctggcgctcctcgccctcttccacggtgaacacttgctggctacctcacttggaccgcaggtgccgtctcacgggcgatttcaggccaaggctgaggcaaattctctgaagctggaggtgcgggaactcggcctgggagattcaggatcctacagatgcgaagccactaatgtcctgggttcaagtaatacatctctgtttttccaggtgagaggcgcttgggtccaggtctctccgtctccagagctgcaagagggacaagctgtggtgctgtcctgtcaagtgcataccggtgtacctgagggaacaagctaccgttggtatagggacggtcaaccacttcaggaatccacatctgccaccttgcggttcgctgcaatcaccttaacccaagccggtgcttaccactgccaggcacaggcgccaggcagcgctaccacatctcttgccgctccaattagtttgcacgtctcctatgcccctagacatgtgaccctgacaactctgatggacaccggaccagggaggctgggcctgttgttgtgccgggtagactctgaccccccggctcagctaagactgctgcacggcgatcgcctagtggcgagcacactccagggcgtgggaggccctgagggctccagcccacgtctgcatgtcgctgtggcgcccaacaccctcaggttggagattcacggagcgatgttagaggacgagggcgtttatatatgcgaggcttccaacacgttggggcaagcttcagcctcagcggatttcgacgcacaggcagtgaacgtgcaagtctggccaggcgccaccgtgagagaaggacagttggtaaacctgacgtgcttagtgtggactacacaccccgcccaactcacctacacatggtatcaggatgggcaacagcgccttgacgcccactccatacctttgccaaatgtgactgtacgcgacgcgacctcctataggtgtggtgttggtccccccgggagggctccaagattgtctcggcctatcacactagacgtgctttacgcaccacgcaacctgcgtttaacatacctcctggagagtcacggaggtcagctagcactggtcttgtgtaccgtggactctcggccccctgctcagctggccctcagccacgcaggtagactcctggcatcttctaccgcagcctcggtgccaaacacattgagactggagctaagagggccccagcctcgggacgagggcttttactcatgcagcgcacgttctccactgggtcaggcaaacaccagtttagaattaagactggagggggtgcgagtgattttagctcccgaggcggccgtcccagaaggggcccctatcaccgttacttgtgcagatcctgccgcacatgcgccgacgctgtacacctggtatcacaacgggagatggctccaggaaggccccgccgcttcgttgagcttcctggttgccaccagagcacacgcaggagcctacagctgccaggcacaagatgcgcagggtaccaggtccagtcgccccgcagcattacaggtgctctacgcgccccaggatgccgtactgtcctctttccgagactctagagctagaagtatggctgttatccagtgtaccgtggattccgaaccacccgccgagttggcactttctcatgatggcaaagtgttggctacgtcaagcggggttcatagcctcgcttcggggaccggacacgtccaggtggcccgcaacgctcttagactgcaagtccaggacgtccctgcgggcgacgatacatatgtgtgcacagctcagaatctgctgggcagcattagcaccataggtcgcttgcaggtggagggcgccagagtagttgccgaaccaggcctcgatgtgcctgaaggggccgctcttaaccttagttgccgactccttgggggccccggccctgtagggaattccacatttgcatggttttggaatgatcgcagattacacgccgaacctgtgcccactttggcttttacgcatgtagcccgcgctcaggctggtatgtaccactgtctcgctgaacttccaacaggggcagcagccagtgcgcctgtgatgctgagggttctttatccccctaaaacccctacaatgatggtgttcgtcgaaccagaagggggactccgaggcatcctggactgccgcgttgattccgaaccgctggcaagtttgacactccacttaggtagtaggctcgtcgctagttcacagccccagggcgctcccgctgaaccgcatattcatgttcttgctagtcccaatgcacttagagtcgatatcgaggctcttaggccctccgatcagggagagtacatctgtagcgcaagcaatgttcttggaagtgcctctacctctacgtatttcggagtgcgagccctgcatcgcttacaccagtttcaacagctcctatgggtgctgggactgctggtcggcctcttgctactcctgctggggttaggcgcctgttacacatggagaagacgtagagtctgtaaacagtctatgggggagaatagcgtggagatggcctttcagaaggaaaccacgcagctcattgaccctgatgctgctacttgcgagacatcgacttgtgctccgccgctggggtag

SEQ ID NO: 322520 - DNA, 5130 bp, Artificial Sequence
  derived and/or modified sequence
atgggttttcttccaaagctgctattgttggccagtttttttccagcaggacaagcctcatggggtgtgagctctcctcaggatgtccagggcgtgaagggaagctgccttttgattccatgtatctttagttttccagccgacgtagaagtcccggacggcatcacagccatctggtattacgactactctgggcagcggcaggtggtctctcattcagctgaccccaaactagtggaggcgcgatttagagggcgtacagaatttatgggcaacccggagcaccgagtttgcaacctgcttctcaaagacctgcaaccagaagactctggcagttataatttccgtttcgagatttcagaagttaacagatggagcgatgtgaaaggaacgttggtgaccgtgacagaggagccccgtgtgcccactatcgcctccccagtggaactcctggaaggtacggaggtagacttcaactgcagcacgccctatgtgtgcctccaggaacaggtgcgacttcaatggcagggtcaggatccagctagatcagttacctttaattctcagaaatttgagcctaccggtgtgggacaccttgaaacacttcacatggctatgtcatggcaggatcatggccgcattctgcggtgccagctgtctgtcgcgaaccatcgggctcaatccgagattcacctgcaggtcaaatatgctcccaaaggcgtaaaaatcttgctctcaccaagtgggcgaaatattctacccggcgaattagtgacgctgacatgtcaagtcaatagctcatatcctgcagtctcctcaattaagtggttgaaggatggagtgaggctgcagaccaaaacaggagttctgcatttgccgcaagccgcatggtccgacgctggcgtttacacctgccaggcagagaacggtgtgggatccttggtgtctcctccaatatcactgcacatctttatggccgaagtacaggttagccccgcagggcccatcctcgagaatcagaccgtaactcttgtgtgcaatacccccaacgaggccccttccgatctgcgctatagctggtataaaaaccatgtccttctcgaagacgctcacagccacactctccgcttgcacctggccacccgagctgatactggattctatttctgtgaggtgcaaaatgtgcacggatccgaacgctccgggccagtttccgttgtagtgaatcaccctcctctcacccctgtcctgactgccttcttagagacacaagctggcctggtcggcatacttcattgctcagtggtctctgaacctctagcaacactggtcctatcacatggagggcacatcctggcaagcacaagtggcgatagcgatcactccccccgattctcaggaacctctggaccaaattcattaaggctggaaattcgcgacctcgaagaaaccgatagcggcgaatataagtgctctgccacaaactcattggggaacgccacatcgactctggatttccacgcaaacgccgctaggctcttgatctcacccgccgccgaggtggtagaaggccaagccgtgacactgagctgcaggtcaggtctgtctcccacccctgatgctcgatttagctggtacttgaacggtgcactgctgcacgaaggaccaggttcctctctgcttttacccgctgcttcttccactgacgcaggatcctaccattgtagagctcgtgatgggcactctgccagcggcccaagctcccctgctgttctgactgtgctctaccctccgaggcagcccacattcaccactaggctagatttagacgcagctggtgctggagcaggcagacgtggattgctgctatgtagagtcgattcggatcctcccgccagattgcaacttctgcacaaggatcgcgttgtcgccacaagtttgccttcaggcggcggctgcagcacatgcggagggtgctcaccccgcatgaaggtgacaaaagcgcctaacctcctacgcgtcgaaatacataacccactgcttgaagaagaggggctgtatctgtgtgaagcgtctaacgcccttggaaatgcatcaacttcagccacctttaatggccaagctaccgtgcttgccatcgccccatcacatactttgcaggaaggtactgaagcaaatctcacttgcaatgtgtctcgcgaagccgcaggttctcccgccaattttagctggtttagaaatggcgtcctgtgggcccaaggacctctggagacagtaactctgttgccagttgcccgcaccgacgctgctctgtatgcatgccgaattctcacagaggctggagctcaattgtcaacacctgttctgcttagcgtcctttatccacctgaccgccctaaactatcagcactgctagacatgggacaggggcacatggcattgttcatctgtacagtcgacagtaggcctctcgcactcctggcgctttttcatggcgaacaccttctcgctacttctctgggtccccaggtgccttctcacggaagatttcaggccaaggccgaagcaaatagcctaaaactcgaggtaagggagctaggccttggcgactccggctcttatcggtgtgaagcaacaaatgtcttaggatcatcaaacacttcactgttttttcaggtgcggggcgcttgggtgcaggtgtcgccgtcccccgagcttcaagagggccaagcagtagttctttcctgtcaagtgcatacaggggtaccagagggaacttcctataggtggtatcgagatggccagcccttacaagagtctacgtcagcaacgttgaggttcgcagctattactctgacacaagctggggcttatcattgccaggctcaggccccaggctctgcgacaacttctctcgccgctcccatttcactgcacgtgagctatgctccacgtcatgtgacattaacaacccttatggatacaggtcctggaaggctgggactgctgctctgccgcgtggactcagaccccccagctcagctgcgtctgctgcatggagatagactggttgcatctacgctccagggcgttggcgggcccgaaggcagctccccacgcctccacgttgcagtggcccccaacacattaaggttggaaatccatggcgcaatgttagaggatgaaggcgtgtacatctgtgaggcttcgaatactctaggtcaggcatccgcctctgctgatttcgatgcacaagccgttaatgtacaggtctggccaggcgccaccgtccgcgagggtcagttagttaacttgacctgcctcgtctggactacccaccctgcccaactcacctacacctggtatcaggacggacaacagaggctagacgcccactccatccccctccctaacgtgaccgtgagagacgcaacctcatatcgctgtggcgtggggccgcctggacgcgcccctagactgtcccggccaattacgctggatgtcctgtacgctcctcgcaaccttaggttgacttaccttctggagagtcatggcggtcaactagcactggttctgtgcacagtggattctcgcccacccgcccaattggcgttgtctcacgctggtcgtctcttggctagttcgactgccgcatctgtgccaaatactctcagattagaacttcgcggcccccagccacgcgatgaggggttctactcatgttcagcacgctcaccactcggtcaggctaatacctccctcgaattaaggttggagggcgtcagggtgatcctcgcaccagaggctgccgtccccgaaggcgcgcccattacggtgacctgtgccgatccagccgcacacgcccccactctgtatacctggtaccacaatggtagatggctgcaggaaggacctgctgcttctctctcatttctggtggccacacgggctcacgccggagcatattcttgccaggctcaggacgcgcagggaacccggagttccagaccagccgctctccaggtcctgtatgctccccaggatgcggtgttatcctcatttcgcgactctcgtgctagaagcatggccgtgattcagtgtaccgttgatagtgaacctccagccgagttggctttgtcccacgacggaaaggtgcttgccacatcttccggtgtgcactcccttgcatcgggcaccgggcacgttcaggtcgctagaaacgctcttagattacaggtccaggacgtgcctgcaggagacgacacatacgtgtgcactgctcaaaacttactaggaagtatcagcactataggcagacttcaggtagagggcgcacgagtggttgcggaacccggcttagacgtgcccgaaggcgccgccttgaacctaagctgccgactgctgggcggccccggtcctgttgggaactcgacgtttgcatggttctggaacgacaggagactccacgctgagccagttcctacactcgccttcactcacgtagcccgcgctcaggctggtatgtaccactgtctcgctgaacttccaacaggggcagcagccagtgcgcctgtgatgctgagggttctttatccccctaaaacccctacaatgatggtgttcgtcgaaccagaagggggactccgaggcatcctggactgccgcgttgattccgaaccgctggcaagtttgacactccacttaggtagtaggctcgtcgctagttcacagccccagggcgctcccgctgaaccgcatattcatgttcttgctagtcccaatgcacttagagtcgatatcgaagccctgagaccaagcgaccagggagaatacatttgttccgcctcgaacgtgctggggagcgcctcaacaagcacctactttggcgtgcgcgcattgcatcggctgcatcagtttcagcaactgctgtgggtactgggtctcctggtcggattactccttctcctgttaggactgggtgcgtgttacacatggcgtcggagaagggtttgtaaacaatcaatgggtgagaattccgtagaaatggccttccagaaagaaaccactcaactaattgaccctgacgcagcaacatgcgaaacctccacttgtgcaccccccctcggctag

SEQ ID NO: 322521 - DNA, 5130 bp, Artificial Sequence
  derived and/or modified sequence
atgggcttcctgcccaagctgctgctgctggccagcttcttccccgccggccaggccagctggggcgtgagcagcccccaggacgtgcagggcgtgaagggcagctgcctgctgatcccctgcatcttcagcttccccgccgacgtggaggtgcccgacggcatcaccgccatctggtactacgactacagcggccagagacaggtggtgagccacagcgccgaccccaagctggtggaggccagattcagaggcagaaccgagttcatgggcaaccccgagcacagagtgtgcaacctgctgctgaaggacctgcagcccgaggacagcggcagctacaacttcagattcgagatcagcgaggtgaacagatggagcgacgtgaagggcaccctggtgaccgtgaccgaggagcccagagtgcccaccatcgccagccccgtggagctgctggagggcaccgaggtggacttcaactgcagcaccccctacgtgtgcctgcaggagcaggtgagactgcagtggcagggccaggaccccgccagaagcgtgaccttcaacagccagaagttcgagcccaccggcgtgggccacctggagaccctgcacatggccatgagctggcaggaccacggcagaatcctgagatgccagctgagcgtggccaaccacagagcccagagcgagatccacctgcaggtgaagtacgcccccaagggcgtgaagatcctgctgagccccagcggcagaaacatcctgcccggcgagctggtgaccctgacctgccaggtgaacagcagctaccccgccgtgagcagcatcaagtggctgaaggacggcgtgagactgcagaccaagaccggcgtgctgcacctgccccaggccgcctggagcgacgccggcgtgtacacctgccaggccgagaacggcgtgggcagcctggtgagcccccccatcagcctgcacatcttcatggccgaggtgcaggtgagccccgccggccccatcctggagaaccagaccgtgaccctggtgtgcaacacccccaacgaggcccccagcgacctgagatacagctggtacaagaaccacgtgctgctggaggacgcccacagccacaccctgagactgcacctggccaccagagccgacaccggcttctacttctgcgaggtgcagaacgtgcacggcagcgagagaagcggccccgtgagcgtggtggtgaaccacccccccctgacccccgtgctgaccgccttcctggagacccaggccggcctggtgggcatcctgcactgcagcgtggtgagcgagcccctggccaccctggtgctgagccacggcggccacatcctggccagcaccagcggcgacagcgaccacagccccagattcagcggcaccagcggccccaacagcctgagactggagatcagagacctggaggagaccgacagcggcgagtacaagtgcagcgccaccaacagcctgggcaacgccaccagcaccctggacttccacgccaacgccgccagactgctgatcagccccgccgccgaggtggtggagggccaggccgtgaccctgagctgcagaagcggcctgagccccacccccgacgccagattcagctggtacctgaacggcgccctgctgcacgagggccccggcagcagcctgctgctgcccgccgccagcagcaccgacgccggcagctaccactgcagagccagagacggccacagcgccagcggccccagcagccccgccgtgctgaccgtgctgtacccccccagacagcccaccttcaccaccagactggacctggacgccgccggcgccggcgccggcagaagaggcctgctgctgtgcagagtggacagcgacccccccgccagactgcagctgctgcacaaggacagagtggtggccaccagcctgcccagcggcggcggctgcagcacctgcggcggctgcagccccagaatgaaggtgaccaaggcccccaacctgctgagagtggagatccacaaccccctgctggaggaggagggcctgtacctgtgcgaggccagcaacgccctgggcaacgccagcaccagcgccaccttcaacggccaggccaccgtgctggccatcgcccccagccacaccctgcaggagggcaccgaggccaacctgacctgcaacgtgagcagagaggccgccggcagccccgccaacttcagctggttcagaaacggcgtgctgtgggcccagggccccctggagaccgtgaccctgctgcccgtggccagaaccgacgccgccctgtacgcctgcagaatcctgaccgaggccggcgcccagctgagcacccccgtgctgctgagcgtgctgtacccccccgacagacccaagctgagcgccctgctggacatgggccagggccacatggccctgttcatctgcaccgtggacagcagacccctggccctgctggccctgttccacggcgagcacctgctggccaccagcctgggcccccaggtgcccagccacggcagattccaggccaaggccgaggccaacagcctgaagctggaggtgagagagctgggcctgggcgacagcggcagctacagatgcgaggccaccaacgtgctgggcagcagcaacaccagcctgttcttccaggtgagaggcgcctgggtgcaggtgagccccagccccgagctgcaggagggccaggccgtggtgctgagctgccaggtgcacaccggcgtgcccgagggcaccagctacagatggtacagagacggccagcccctgcaggagagcaccagcgccaccctgagattcgccgccatcaccctgacccaggccggcgcctaccactgccaggcccaggcccccggcagcgccaccaccagcctggccgcccccatcagcctgcacgtgagctacgcccccagacacgtgaccctgaccaccctgatggacaccggccccggcagactgggcctgctgctgtgcagagtggacagcgacccccccgcccagctgagactgctgcacggcgacagactggtggccagcaccctgcagggcgtgggcggccccgagggcagcagccccagactgcacgtggccgtggcccccaacaccctgagactggagatccacggcgccatgctggaggacgagggcgtgtacatctgcgaggccagcaacaccctgggccaggccagcgccagcgccgacttcgacgcccaggccgtgaacgtgcaggtgtggcccggcgccaccgtgagagagggccagctggtgaacctgacctgcctggtgtggaccacccaccccgcccagctgacctacacctggtaccaggacggccagcagagactggacgcccacagcatccccctgcccaacgtgaccgtgagagacgccaccagctacagatgcggcgtgggcccccccggcagagcccccagactgagcagacccatcaccctggacgtgctgtacgcccccagaaacctgagactgacctacctgctggagagccacggcggccagctggccctggtgctgtgcaccgtggacagcagaccccccgcccagctggccctgagccacgccggcagactgctggccagcagcaccgccgccagcgtgcccaacaccctgagactggagctgagaggcccccagcccagagacgagggcttctacagctgcagcgccagaagccccctgggccaggccaacaccagcctggagctgagactggagggcgtgagagtgatcctggcccccgaggccgccgtgcccgagggcgcccccatcaccgtgacctgcgccgaccccgccgcccacgcccccaccctgtacacctggtaccacaacggcagatggctgcaggagggccccgccgccagcctgagcttcctggtggccaccagagcccacgccggcgcctacagctgccaggcccaggacgcccagggcaccagaagcagcagacccgccgccctgcaggtgctgtacgccccccaggacgccgtgctgagcagcttcagagacagcagagccagaagcatggccgtgatccagtgcaccgtggacagcgagccccccgccgagctggccctgagccacgacggcaaggtgctggccaccagcagcggcgtgcacagcctggccagcggcaccggccacgtgcaggtggccagaaacgccctgagactgcaggtgcaggacgtgcccgccggcgacgacacctacgtgtgcaccgcccagaacctgctgggcagcatcagcaccatcggcagactgcaggtggagggcgccagagtggtggccgagcccggcctggacgtgcccgagggcgccgccctgaacctgagctgcagactgctgggcggccccggccccgtgggcaacagcaccttcgcctggttctggaacgacagaagactgcacgccgagcccgtgcccaccctggccttcacccacgtggccagagcccaggccggcatgtaccactgcctggccgagctgcccaccggcgccgccgccagcgcccccgtgatgctgagagtgctgtacccccccaagacccccaccatgatggtgttcgtggagcccgagggcggcctgagaggcatcctggactgcagagtggacagcgagcccctggccagcctgaccctgcacctgggcagcagactggtggccagcagccagccccagggcgcccccgccgagccccacatccacgtgctggccagccccaacgccctgagagtggacatcgaggccctgagacccagcgaccagggcgagtacatctgcagcgccagcaacgtgctgggcagcgccagcaccagcacctacttcggcgtgagagccctgcacagactgcaccagttccagcagctgctgtgggtgctgggcctgctggtgggcctgctgctgctgctgctgggcctgggcgcctgctacacctggagaagaagaagagtgtgcaagcagagcatgggcgagaacagcgtggagatggccttccagaaggagaccacccagctgatcgaccccgacgccgccacctgcgagaccagcacctgcgccccccccctgggctag

SEQ ID NO: 322522 - DNA, 5130 bp, Artificial Sequence
  derived and/or modified sequence
atgggttttttgcccaaactgctcctcctggcatcttttttcccagcaggccaggcatcatggggagtgagctctccgcaggacgtgcagggggtgaaggggtcttgcctcttgatcccgtgcatcttctcatttcccgccgatgtggaggtgccagacggcattacagctatctggtattacgactacagtggccaacggcaggtggtgtctcacagtgcagatccaaagttagttgaggctcgtttccgcggaagaaccgaatttatgggcaatcctgagcacagggtctgcaatctgctgctcaaggacctgcaacccgaagactccgggtcttataacttcagatttgagatcagtgaggtcaataggtggtcagacgtgaaaggcaccctggtgacggtcaccgaagagccacgagtccccaccatcgcctctccagtggagctgctcgaaggcactgaagtggactttaactgctctacaccatatgtgtgcctgcaagagcaggtgcgcctccagtggcaaggccaggaccccgcgcgttctgtgaccttcaattcccagaagtttgagcctactggagtggggcatctagagactctgcacatggccatgagttggcaggaccacggccgcattctcaggtgccaactcagcgttgcgaatcaccgggcccaaagcgagatccatctgcaagttaaatacgctccaaaaggagtcaaaatccttttgagcccatctgggcggaatatcctgcccggcgagttggtcacactgacctgccaggtgaatagtagttaccccgctgtgagtagtatcaagtggctcaaagacggcgtgagattacaaaccaagactggggtactccacctgccacaagccgcctggtctgatgccggagtctacacatgtcaggccgaaaatggcgtgggtagcctggtctcacctcctatcagcctccatatctttatggcagaggtacaagtaagccccgcgggccctatattggagaatcagacagtgaccctcgtatgcaacacacccaatgaagctccatccgacctacggtattcttggtacaagaaccacgtcctgctggaggatgcccattcccatactctgagattgcaccttgctaccagggctgatacaggtttttacttttgcgaggtccaaaacgtgcacggatctgaaagatcaggtccagttagtgtggtcgttaatcacccaccacttactcctgtgcttacagccttcttagaaacccaggctggccttgttggaatcttacactgttccgttgtctccgaaccactggccaccctagtcttgtctcacggcggtcatatcctggcctctaccagtggggactctgaccacagtccacggttctccggtactagtggacccaattccctcaggctggagatcagagacctggaagagactgatagcggcgaatataagtgcagtgcaaccaactctctggggaatgccacgtccacactggatttccacgctaacgctgccaggctgctgatctctccagccgccgaggtcgttgaaggccaggctgtcacactgtcatgccgaagtggcctgagtcccacgcctgacgccagattcagttggtatctcaatggcgctctgctccacgaaggtcctgggtcgagcctgcttctaccagcagcgtcttctactgatgctggctcttaccattgtagagccagagatgggcacagcgcttccgggccgagtagccctgcagtgctgacagttttgtacccaccccgtcagccaacttttaccactcggcttgacctggatgctgctggggccggggccggaagacgcgggctcctgttgtgccgggtggacagcgaccccccggcacgactgcagctgctgcataaggacagggtggtcgccacttctcttccatctggcggaggttgtagtacatgtggagggtgctcacctagaatgaaggtgacgaaagctcccaacttgctgcgagtggagatacataaccccttgctggaagaggagggcttgtacctctgtgaggccagtaatgcgctagggaatgcctctacatcagctacctttaacgggcaggccaccgtcctggcaatcgccccttcacacacactccaagaggggactgaggcaaacctgacctgtaatgtatcaagagaagcagccggttcaccagcgaattttagctggtttaggaatggggttctatgggctcaagggcccctggaaacagtgactctcctacctgtcgcccggactgatgccgcgctctacgcgtgtcggatcctaacggaagctggagctcaactaagcacccccgtcctgttgtccgttctgtaccctccagacagacctaaactttcggcactcctggatatgggtcagggacatatggcactcttcatctgcacagtagattcacgtccacttgccctcctggccttgtttcacggagaacacctgctcgctacttcccttggcccacaagtcccaagccacggaaggttccaagctaaggctgaagcaaattcattgaagctggaggtgcgtgagctgggactcggtgatagcggtagttacagatgcgaggcgaccaacgtcctgggcagctcaaatacttcactgttctttcaagttcggggagcatgggtgcaggtgtccccgagtccagaactgcaggaaggacaagccgtagtactgagctgtcaagtgcacaccggggtgccggagggcacaagttatcgatggtacagagatgggcagcccctacaggaatcgacgagtgctacactgaggtttgccgcgataacactgacacaggccggagcttaccattgtcaagcacaagcaccaggaagtgctacaacatcccttgctgcccctatctctctccatgtctcatatgctcctcggcacgttacgctcacaaccctgatggacaccggtccaggtcgtctcggccttctgctgtgtcgcgttgacagtgacccccctgcccagttgaggctgcttcatggtgatcgtcttgtcgcgtccactctccaaggtgtggggggccccgaggggagtagcccacgtctgcacgtggctgttgctccgaacaccttaagacttgaaatccacggagctatgctcgaggatgagggcgtctacatttgtgaagcgagcaacacgttaggccaagcatccgcttctgcggactttgacgcccaagcggttaatgttcaggtgtggccaggggcgacggttcgcgagggccagcttgttaatctgacctgtcttgtgtggaccacccacccagcgcagctgacatacacatggtatcaggacggccagcagcgcttggatgctcactctatccctttgcctaacgtgactgttagggatgcaacatcttataggtgcggcgtggggcccccagggcgggccccacggttatccaggcctattactctcgacgtcttgtatgccccacgaaacttacggttgacgtatttactcgaatctcacgggggtcagctagcgctggtgctttgcactgtggattcacgccctccagcccaactggctttgtcccatgccggtaggctgttagcatcctccactgccgccagtgtgccgaacactcttcgcttagagctacgcgggccacagcccagagatgagggcttctacagctgctcggcgcggagtcccctgggccaagccaacacttcccttgaactccgattggagggcgttcgggtcatcctggcacctgaggccgccgtgccagagggagcacccatcacggtgacttgcgctgacccggctgcgcatgctcccacgctgtatacgtggtaccataatggtcgctggctgcaggagggcccagcagcaagcctgagcttcctggtggcgaccagggcccacgcaggcgcgtacagttgtcaggcccaagatgcccaggggacacgcagttcccggccagctgccttgcaggtcttgtacgctcctcaggatgcagtgctgtcctccttcagggactctagagcccgctcgatggcagtcattcagtgcacagttgatagcgagcctcctgctgagctagcactcagtcacgatgggaaggtgctggctacctccagtggtgtgcatagcctagcaagtggtacagggcatgtgcaggtagcccggaatgcattgagattgcaggtgcaggacgtccccgccggtgacgacacgtacgtgtgcacagctcaaaatctgctggggtcaattagcacaatcggccgcttgcaggtagagggagctcgtgtggttgccgaaccagggctggatgtccccgagggtgccgccttgaacctatcatgccggctgctcggagggccaggcccggtagggaactcgacatttgcttggttctggaacgaccgacgcctgcatgcggaacccgttccaactctcgccttcacgcatgtcgcccgggcccaagctggcatgtaccactgcctagctgaactaccaacaggtgcagctgcttcagcccccgtgatgttaagagtgctgtacccccccaagaccccaaccatgatggtcttcgtggagccagaaggagggctacgtgggatcttagattgtcgcgtggattctgagcccctcgcctcactgacactacatcttgggagtcgactggtcgcgtcctcacagccccagggtgctcctgctgagccccatatacatgtgcttgcaagcccaaatgcgctcagggtagatattgaggcccttcggcctagtgatcaaggggagtacatttgcagtgcaagtaatgtgctgggaagcgcttctacctcaacctacttcggggtgcgggccctccatcgactgcaccagtttcaacagctcctgtgggttctcgggctattggtggggcttctgctcttactattgggtctgggagcatgctatacctggcgaaggcgaagggtgtgtaagcaaagcatgggcgagaatagcgtggagatggccttccagaaagagactacccagctcattgaccctgacgcagcaacctgcgagactagtacctgtgccccacctttgggctag

SEQ ID NO: 322523 - DNA, 6720 bp, Artificial Sequence
  derived and/or modified sequence
atgggcttcttgcccaagcttctcctcctggcctcattcttcccagcaggccaggcctcatggggcgtctccagtccccaggacgtgcagggtgtgaaggggtcttgcctgcttatcccctgcatcttcagcttccctgccgacgtggaggtgcccgacggcatcacggccatctggtactacgactactcgggccagcggcaggtggtgagccactcggcggaccccaagctggtggaggcccgcttccgcggccgcaccgagttcatggggaaccccgagcacagggtgtgcaacctgctgctgaaggacctgcagcccgaggactctggttcctacaacttccgcttcgagatcagtgaggtcaaccgctggtcagatgtgaaaggcaccttggtcacagtaacagaggagcccagggtgcccaccattgcctccccggtggagcttctcgagggcacagaggtggacttcaactgctccactccctacgtatgcctgcaggagcaggtcagactgcagtggcaaggccaggaccctgctcgctctgtcaccttcaacagccagaagtttgagcccaccggcgtcggccacctggagaccctccacatggccatgtcctggcaggaccacggccggatcctgcgctgccagctctccgtggccaatcacagggctcagagcgagattcacctccaagtgaagtatgcccccaagggtgtgaagatcctcctcagcccctcggggaggaacatccttccaggtgagctggtcacactcacctgccaggtgaacagcagctaccctgcagtcagttccattaagtggctcaaggatggggtacgcctccaaaccaagactggtgtgctgcacctgccccaggcagcctggagcgatgctggcgtctacacctgccaagctgagaacggcgtgggctctttggtctcaccccccatcagcctccacatcttcatggctgaggtccaggtgagcccagcaggtcccatcctggagaaccagacagtgacactagtctgcaacacacccaatgaggcacccagtgatctccgctacagctggtacaagaaccatgtcctgctggaggatgcccactcccataccctccggctgcacttggccactagggctgatactggcttctacttctgtgaggtgcagaacgtccatggcagcgagcgctcgggccctgtcagcgtggtagtcaaccacccgcctctcactccagtcctgacagccttcctggagacccaggcgggacttgtgggcatccttcactgctctgtggtcagtgagcccctggccacactggtgctgtcacatgggggtcatatcctggcctccacctccggggacagtgatcacagcccacgcttcagtggtacctctggtcccaactccctgcgcctggagatccgagacctggaggaaactgacagtggggagtacaagtgctcagccaccaactcccttggaaatgcaacctccaccctggacttccatgccaatgccgcccgtctcctcatcagcccggcagccgaggtggtggaaggacaggcagtgacactgagctgcagaagcggcctaagccccacacctgatgcccgcttctcctggtacctgaatggagccctgcttcacgagggtcccggcagcagcctcctgctccccgcggcctccagcactgacgccggctcataccactgccgggcccgggacggccacagtgccagtggcccctcttcgccagctgttctcactgtgctctacccccctcgacaaccaacattcaccaccaggctggaccttgatgccgctggggccggggctggacggcgaggcctccttttgtgccgtgtggacagcgacccccccgccaggctgcagctgctccacaaggaccgtgttgtggccacttccctgccatcagggggtggctgcagcacctgtgggggctgttccccacgcatgaaggtcaccaaagcccccaacttgctgcgtgtggagattcacaaccctttgctggaagaggagggcttgtacctctgtgaggccagcaatgccctgggcaacgcctccacctcagccaccttcaatggccaggccactgtcctggccattgcaccatcacacacacttcaggagggcacagaagccaacttgacttgcaacgtgagccgggaagctgctggcagccctgctaacttctcctggttccgaaatggggtgctgtgggcccagggtcccctggagaccgtgacactgctgcccgtggccagaactgatgctgccctttacgcctgccgcatcctgactgaggctggtgcccagctctccactcccgtgctcctgagtgtactctatcccccggaccgtccaaagctgtcagccctcctagacatgggccagggccacatggctctgttcatctgcactgtggacagccgccccctggccttgctggccttgttccatggggagcacctcctggccaccagcctgggtccccaggtcccatcccatggtcggttccaggctaaagctgaggccaactccctgaagttagaggtccgagaactgggccttggggactctggcagctaccgctgtgaggccacaaatgttcttggatcatccaacacctcactcttcttccaggtccgaggagcctgggtccaggtgtcaccatcacctgagctccaagagggccaggctgtggtcctgagctgccaggtacacacaggagtcccagaggggacctcatatcgttggtatcgggatggccagcccctccaggagtcgacctcggccacgctccgctttgcagccataactttgacacaagctggggcctatcattgccaagcccaggccccaggctcagccaccacgagcctagctgcacccatcagcctccacgtgtcctatgccccacgccacgtcacactcactaccctgatggacacaggccctggacgactgggcctcctcctgtgccgtgtggacagtgaccctccggcccagctgcggctgctccacggggatcgccttgtggcctccaccctacaaggtgtggggggacccgaaggcagctctcccaggctgcatgtggctgtggcccccaacacactgcgtctggagatccacggggctatgctggaggatgagggtgtctatatctgtgaggcctccaacaccctgggccaggcctcggcctcagctgacttcgacgctcaagctgtgaatgtgcaggtgtggcccggggctaccgtgcgggaggggcagctggtgaacctgacctgccttgtgtggaccactcacccggcccagctcacctacacatggtaccaggatgggcagcagcgcctggatgcccactccatccccctgcccaacgtcacagtcagggatgccacctcctaccgctgcggtgtgggcccccctggtcgggcaccccgcctctccagacctatcaccttggacgtcctctacgcgccccgcaacctgcgcctgacctacctcctggagagccatggcgggcagctggccctggtactgtgcactgtggacagccgcccgcccgcccagctggccctcagccacgccggtcgcctcttggcctcctcgacagcagcctctgtccccaacaccctgcgcctggagctgcgagggccacagcccagggatgagggtttctacagctgctctgcccgcagccctctgggccaggccaacacgtccctggagctgcggctggagggtgtgcgggtgatcctggctccggaggctgccgtgcctgaaggtgcccccatcacagtgacctgtgcggaccctgctgcccacgcacccacactctatacttggtaccacaacggtcgttggctgcaggagggtccagctgcctcactctcattcctggtggccacgcgggctcatgcaggcgcctactcttgccaggcccaggatgcccagggcacccgcagctcccgtcctgctgccctgcaagtcctctatgcccctcaggacgctgtcctgtcctccttccgggactccagggccagatccatggctgtgatacagtgcactgtggacagtgagccacctgctgagctggccctatctcatgatggcaaggtgctggccacgagcagcggggtccacagcttggcatcagggacaggccatgtccaggtggcccgaaacgccctacggctgcaggtgcaagatgtgcctgcaggtgatgacacctatgtttgcacagcccaaaacttgctgggctcaatcagcaccatcgggcggttgcaggtagaaggtgcacgcgtggtggcagagcctggcctggacgtgcctgagggcgctgccctgaacctcagctgccgcctcctgggtggccctgggcctgtgggcaactccacctttgcatggttctggaatgaccggcggctgcacgcggagcctgtgcccactctcgccttcacccacgtggctcgtgctcaagctgggatgtaccactgcctggctgagctccccactggggctgctgcctctgctccagtcatgctccgtgtgctctaccctcccaagacgcccaccatgatggtcttcgtggagcctgagggtggcctccggggcatcctggattgccgagtggacagcgagccgctcgccagcctgactctccaccttggcagtcgactggtggcctccagtcagccccagggtgctcctgcagagccacacatccatgtcctggcttcccccaatgccctgagggtggacatcgaggcgctgaggcccagcgaccaaggggaatacatctgttctgcctcaaatgtcctgggctctgcctctacctccacctactttggggtcagagccctgcaccgcctgcatcagttccagcagctgctctgggtcctgggactgctggtgggcctcctgctcctgctgttgggcctgggggcctgctacacctggagaaggaggcgtgtttgtaagcagagcatgggcgagaattcggtggagatggcttttcagaaagagaccacgcagctcattgatcctgatgcagccacatgtgagacctcaacctgtgccccacccctgggctgaccagtggtgttgcctgccctccggaggagaaagtggccagaatctgtgatgactccagcctatgaatgtgaatgaggcagtgttgagtcctgcccgcctctacgaaaacagctctgtgacatctgactttttatgacctggccccaagcctcttgcccccccaaaaatgggtggtgagaggtctgcccaggagggtgttgaccctggaggacactgaagagcactgagctgatctcgctctctcttctctggatctcctcccttctctccatttctccctcaaaggaagccctgccctttcacatccttctcctcgaaagtcaccctggactttggttggattgcagcatcctgcatcctcagaggctcaccaaggcattctgtattcaacagagtatcagtcagcctgctctaacaagagaccaaatacagtgacttcaacatgatagaattttatttttctctcccacgctagtctggctgttacgatggtttatgatgttggggctcaggatccttctatcttccttttctctatccctaaaatgatgcctttgattgtgaggctcaccatggccccgctttgtccacatgccctccagccagaagaaggaagagtggaggtagaagcacacccatgcccatggtggacgcaactcagaagctgcacaggacttttccactcacttcccattggctggagtattgtcacatggctactgcaagctacaagggagactgggaaatgtagtttttattttgagtccagaggacatttggaattggacttccaaaggactcccaactgtgagctcatccctgagacttttgacattgttgggaatgccaccagcaggccatgttttgtctcagtgcccatctactgagggccagggtgtgcccctggccattctggttgtgggcttcctggaagaggtgatcactctcacactaagactgaggaaataaaaaaggtttggtgttttcctagggagagagcatgccaggcagtggagttgcctaagcagacatccttgtgccagatttggcccctgaaagaagagatgccctcattcccaccaccaccccccctacccccagggactgggtactaccttactggcccttacaagagtggagggcagacacagatgttgtcagcatccttattcctgctccagatgcatctctgttcatgactgtgtgagctcctgtccttttcctggagaccctgtgtcgggctgttaaagagaatgagttaccaagaaggaatgacgtgcccctgcgaatcagggaccaacaggagagagctcttgagtgggctagtgactccccctgcagcctggtggagatggtgtgaggagcgaagagccctctgctctaggatttgggttgaaaaacagagagagaagtggggagttgccacaggagctaacacgctgggaggcagttgggggcgggtgaactttgtgtagccgaggccgcaccctccctcattccaggctcattcattttcatgctccattgccagactcttgctgggagcccgtccagaatgtcctcccaataaaactccatcctatgacgcaa

SEQ ID NO: 322524 - DNA, 5130 bp, Artificial Sequence
  derived and/or modified sequence
atgggcttcctgcccaagctgctgctgctggccagcttcttccctgctggccaggcctcctggggcgtgagcagcccccaggatgtgcagggcgtgaagggcagctgcctgctgatcccctgcatcttctccttcccagcagatgtggaggtgcctgatggcatcacagccatctggtactatgactacagcggccagaggcaggtggtgagccacagcgctgaccccaagctggtggaggcccgcttccggggccgcacagagttcatgggcaaccctgagcaccgggtgtgcaacctgctgctgaaggacctgcagcctgaggacagcggcagctacaacttccgctttgagatcagcgaggtgaaccgctggagcgatgtgaagggcaccctggtgacagtgacagaggagccccgggtgcccaccatcgccagccctgtggagctgctggagggcacagaggtggacttcaactgcagcaccccctacgtgtgcctgcaggagcaggtgcggctgcagtggcagggccaggaccctgcccggtctgtgaccttcaacagccagaagtttgagcccaccggggtgggccacctggagaccctgcacatggccatgtcctggcaggaccacggccgcatcctgcgctgccagctgtctgtggccaaccaccgggcccagagcgagatccacctgcaggtgaagtatgcccccaagggcgtgaagatcctgctgagccccagcggcaggaacatcctgcccggggagctggtgaccctgacctgccaggtgaacagcagctacccagctgtgagcagcatcaagtggctgaaggatggagtgcggctgcagaccaagacaggagtgctgcacctgccccaggccgcctggagcgatgctggggtgtacacctgccaggccgagaatggagtgggcagcctggtgtccccacccatcagcctgcacatcttcatggccgaggtgcaggtgtccccagctggccccatcctggagaaccagacagtgaccctggtgtgcaacaccccaaatgaggcccccagcgacctgcgctacagctggtacaagaaccacgtgctgctggaggatgcccacagccacaccctgcggctgcacctggccaccagggctgacaccggcttctacttctgtgaggtgcagaatgtgcacggcagcgagaggagcggccctgtgtctgtggtggtgaaccacccccccctgacccctgtgctgacagccttcctggagacccaggccggcctggtgggcatcctgcactgcagcgtggtgtctgagcccctggccaccctggtgctgagccatggaggccacatcctggccagcaccagcggggacagcgaccacagcccccgcttcagcggcaccagcggccccaacagcctgcggctggagatccgggacctggaggagacagacagcggggagtacaagtgcagcgccaccaacagcctgggcaatgccaccagcaccctggacttccacgccaatgctgcccggctgctgatcagccctgctgctgaggtggtggagggccaggccgtgaccctgagctgccgcagcggcctgagccccaccccagatgcccgcttctcctggtacctgaatggagccctgctgcacgagggccctggcagcagcctgctgctgcctgctgccagcagcacagatgctggcagctaccactgccgggccagagatggccacagcgccagcggccccagcagccctgctgtgctgactgtgctgtacccaccccggcagcccaccttcaccacccggctggacctggatgctgctggggccggggccggccggcggggcctgctgctgtgccgggtggacagcgaccccccagcccggctgcagctgctgcacaaggacagagtggtggccaccagcctgcccagcggcggcggctgcagcacctgtggcggctgcagccccaggatgaaggtgaccaaggcccccaacctgctgcgggtggagatccacaaccccctgctggaggaggagggcctgtacctgtgtgaggccagcaatgccctgggcaatgccagcaccagcgccaccttcaacggccaggccaccgtgctggccatcgcccccagccacaccctgcaggagggcacagaggccaacctgacctgcaatgtgtcccgggaggccgccggcagccctgccaacttctcctggttcagaaatggagtgctgtgggcccagggccccctggagaccgtgaccctgctgcctgtggccaggacagatgctgccctgtatgcctgccgcatcctgacagaggccggggcccagctgagcacccctgtgctgctgtctgtgctgtaccccccagaccggcccaagctgagcgccctgctggacatgggccagggccacatggccctcttcatctgcaccgtggacagccggcccctggccctgctggccctcttccatggagagcacctgctggccaccagcctgggcccccaggtgcccagccacggccgcttccaggccaaggccgaggccaacagcctgaagctggaggtgcgggagctgggcctgggggacagcggcagctaccgctgtgaggccaccaacgtgctgggcagcagcaacaccagcctcttcttccaggtgcggggggcctgggtgcaggtgagccccagccctgagctgcaggagggccaggccgtggtgctgagctgccaggtgcacactggagtgcctgagggcaccagctaccgctggtacagagatggccagcccctgcaggagagcaccagcgccaccctgcgctttgctgccatcaccctgacccaggccggggcctaccactgccaggcccaggcccctggcagcgccaccaccagcctggccgcccccatcagcctgcacgtgtcctatgcccccaggcatgtgaccctgaccaccctgatggacaccggccctggccgcctgggcctgctgctgtgccgggtggacagcgaccccccagcccagctgcggctgctgcatggagaccggctggtggccagcaccctgcagggcgtgggcggccctgagggcagcagcccccggctgcacgtggccgtggcccccaacaccctgcggctggagatccatggagccatgctggaggatgaaggagtgtacatctgtgaggccagcaacaccctgggccaggccagcgccagcgctgactttgatgcccaggccgtgaatgtgcaggtgtggccaggggccaccgtgcgggagggccagctggtgaacctgacctgcctggtgtggaccacccacccagcccagctgacctacacctggtaccaggacggccagcagaggctggatgcccacagcatccccctgcccaacgtgacagtgagagatgccaccagctaccgctgtggggtgggccccccaggccgggccccccggctgagccggcccatcaccctggatgtgctgtatgcccccaggaacctgcggctgacctacctgctggagagccacggcggccagctggccctggtgctgtgcaccgtggacagccggcccccagcccagctggccctgagccacgccggccgcctgctggccagcagcacagctgcctctgtgcccaacaccctgcggctggagctgcggggcccccagcccagagatgagggcttctacagctgcagcgcccggagccccctgggccaggccaacaccagcctggagctgcggctggagggcgtgcgggtcatcctggcccctgaggccgctgtgcctgagggcgcccccatcaccgtgacctgtgccgaccctgctgcccacgcccccaccctgtacacctggtaccacaacggccgctggctgcaggagggccctgctgccagcctgtccttcctggtggccacccgggcccatgctggggcctacagctgccaggcccaggatgcccagggcaccaggagcagcaggcctgctgccctgcaggtgctgtatgccccccaggatgctgtgctgagcagcttccgggacagccgggcccgctccatggctgtgatccagtgcaccgtggacagcgagcccccagctgagctggccctgagccatgatggcaaggtgctggccaccagcagcggcgtgcacagcctggccagcggcactggacatgtgcaggtggccagaaatgccctgcggctgcaggtgcaggatgtgcctgctggagatgacacctacgtgtgcacagcccagaacctgctgggcagcatcagcaccatcggccgcctgcaggtggagggcgcccgggtggtggccgagcccggcctggatgtgcctgagggcgccgccctgaacctgagctgccgcctgctgggcggccctggccctgtgggcaacagcacctttgcctggttctggaatgaccggcggctgcacgccgagcctgtgcccaccctggccttcacccacgtggcccgggcccaggccggcatgtaccactgcctggccgagctgcccactggagctgctgccagcgcccctgtgatgctgcgggtgctgtacccacccaagacccccaccatgatggtgtttgtggagcctgagggcggcctgcggggcatcctggactgccgggtggacagcgagcccctggccagcctgaccctgcacctgggcagccggctggtggccagcagccagccccagggcgccccagctgagccccacatccacgtgctggccagccccaatgccctgcgggtggacatcgaggccctgcggcccagcgaccagggcgagtacatctgcagcgccagcaatgtgctgggcagcgccagcaccagcacctactttggagtgcgggccctgcaccggctgcaccagttccagcagctgctgtgggtgctgggcctgctggtgggcctgctgctgctgctgctgggcctgggcgcctgctacacctggaggagaagaagagtgtgcaagcagagcatgggagaaaattctgtggagatggccttccagaaggagaccacccagctgattgatcctgatgctgccacctgtgagaccagcacctgtgccccacccctgggctag

SEQ ID NO: 322525 - DNA, 5130 bp, Artificial Sequence
  derived and/or modified sequence
atgggcttcctgcccaagctgctgctgctggccagcttcttccccgcgggacaggcatcttggggcgtctcgagcccacaggacgtgcagggggttaagggaagctgcttgctaataccatgtatcttctccttccccgcagacgttgaggttccggatggcatcacggctatctggtactatgactactcagggcagagacaggtggtttctcatagcgccgacccaaaactggtcgaggcaaggttccgtggcaggacggaatttatgggaaatcctgagcacagagtttgtaacctcctgctgaaggaccttcagcccgaggattcaggttcatataatttccggtttgaaattagcgaagtcaatagatggtctgatgttaagggaaccttagttaccgtgacggaggagcccagggtgcccacaatagcatctcccgttgaattgttagagggaacagaagtcgatttcaattgctccaccccttatgtgtgcctgcaggaacaggtaaggctccagtggcaaggacaggatccagctagatctgtgacttttaacagccagaagttcgaaccgacgggcgttggccacctcgagacccttcacatggcgatgagttggcaggatcacgggcgcattcttaggtgccagctctccgtagccaaccatcgagctcagagcgaaatccacctgcaggtgaaatatgcacccaaaggagtgaagatactcctgtctccttctgggcggaatattctcccaggagagttggttacgctaacctgccaggtgaactcatcctatccagcagttagctctatcaaatggcttaaagacggagtacgtttgcagacaaagaccggggtgttgcacctcccccaagccgcctggagtgacgcaggcgtctacacctgccaggcagagaacggagtgggctccctggtgagcccaccaatttccctgcacatctttatggctgaagtgcaagtaagccctgcaggccctatcctggaaaatcagaccgtgaccctggtctgtaatacccctaatgaagctccttctgatctcaggtattcctggtataaaaaccacgtgctcttggaagatgctcactctcatacactgagactgcaccttgcgacaagagctgacacaggtttttacttctgtgaggtgcagaacgtccacggctcagagcggagcggcccagtgagtgtggtggtaaatcaccctcccttaactccagttctcacagcatttctggagacccaggcagggcttgtggggatcctgcattgttctgtggtgtctgagccccttgccacactggtgctgtcgcatggcggacacatactggcatctacaagcggtgatagtgatcattcccccagattttctggcacctccggacccaatagccttcggctggaaatccgagaccttgaggaaaccgattccggcgagtataagtgttcagcaacgaactcattgggtaatgctacgagcaccctcgactttcatgctaatgctgcccgacttctcatttccccagctgctgaggtggtggaaggccaggctgtcaccctttcgtgccggtccgggctgtcccctactcctgacgcacgatttagctggtacctgaatggtgcgttactgcatgaggggccggggagctctctactgctgccggccgcttccagcaccgatgcaggctcctaccactgccgcgccagagatggacactcagctagcggaccgagcagtcccgccgtgctaactgtgctttatcctcccaggcagcccacctttactacaaggctcgatttagatgcggcgggggccggtgcaggaagaaggggactcctgctgtgtcgcgtggactctgatccgcccgcccggcttcagctgctccataaagatagagtcgtcgccacatcccttccctcaggagggggttgcagcacttgtggagggtgcagcccgagaatgaaggtgactaaggcgcccaacttattgcgggtggagattcacaaccctctgttggaggaggaagggctgtatttgtgcgaagcgagtaacgcccttggaaacgcttcaacgagtgctactttcaatgggcaggccacggtcttggctattgcccctagccatacccttcaagagggtaccgaagctaacctgacctgtaatgtcagccgcgaggccgcgggctctccagccaacttcagttggttccgcaacggtgtgctgtgggcccagggcccgctggagaccgtcacactgttaccagtagctaggactgacgcagccctttacgcatgtagaatcctgacagaggcaggcgcccagctgagcaccccagttctattatctgtgctctatccccccgataggccaaagttgtcagctcttcttgatatggggcagggccatatggccctttttatctgcactgtggacagtcggcccctcgcactgcttgccctgttccatggagagcacctgttggccacttctcttggccctcaagttccctctcatggaagatttcaggccaaggctgaggctaattctttgaagttggaagttcgcgaattgggcctcggcgacagtgggtcttacagatgtgaagcgacgaatgtactgggctccagtaataccagtttattcttccaggtccggggggcttgggtccaagtcagtccgtctccagaattgcaggaagggcaggccgtggtgctaagctgccaggtccatacaggtgtcccagaaggcacttcctatcgctggtaccgagacggtcagccacttcaagagtcgacctctgctacattaaggttcgctgccatcacattgactcaggcaggcgcctatcattgtcaagctcaagcccccggctccgcaactacatccctggccgcccctatttctctccatgtgagctatgctcctcgtcatgtgaccctgactacgttaatggacacaggaccaggccgcctgggactgctcttgtgccgcgtcgatagcgaccccccagcccagctgaggttactgcatggcgaccggctcgtggcctcaacactacaaggggttgggggtccagaagggtcatcaccccggctacacgtggccgtggcaccgaatacattgaggctcgagatacatggggccatgttggaagacgagggcgtgtatatctgcgaggccagcaacacgctcggtcaggcaagcgcgagcgcggactttgacgcacaggccgtaaacgttcaggtctggcccggggctaccgtgagggagggtcagctcgttaatctgacttgcctcgtgtggacaacccatcctgcccaactgacttatacatggtaccaggacggtcaacagagactggacgcccactctatccccttacccaacgtgaccgtgcgggacgcaacttcttatcgctgtggcgtgggccctcccggtagggcgcccagattgagccgccccattaccctcgacgtgttatacgcccctaggaacctgagactgacgtatttattagagtcccacggtggccagttagccttggtgttgtgcactgttgatagtaggccacctgcccaactggccctctctcacgccggacgcctactggcatcgagtacagcggctagtgtgcctaataccttaaggctggagttgcgcggaccacagcctagagatgaggggttttactcatgttcggcaagaagtccactcggccaggcgaacacctctctcgaactgaggcttgagggtgttagggttatcctcgcaccggaagcagctgttcctgagggcgcccctatcacggttacgtgcgctgaccccgctgcacacgccccaacactttacacctggtatcataatggaagatggctgcaagaagggcccgccgcttccttgagtttcctcgtggctaccagagctcacgccggagcttacagctgtcaggcacaggacgctcagggcacgcgaagttcgagaccagcggctttgcaagtgctgtacgccccccaggacgcagtgctctcaagcttccgcgactccagggctaggtctatggccgtgatacagtgcaccgtcgactcagagccaccagccgagttagctctgtcccatgacgggaaagtgctggcaactagctcaggcgttcacagcttggcctctggtaccggccacgtgcaagtggcacgtaacgcactgaggttgcaagtgcaggacgtgcccgcaggcgatgatacctacgtctgtactgcacagaacctgctgggcagtatttccacaattggaaggcttcaagtggaaggagccagggtagtcgctgagcccggactggacgtgccagaaggcgcggctcttaatctgagctgcaggctcctgggtggacccggccctgtcgggaattccacctttgcctggttctggaacgaccgacgacttcacgctgagcctgtccctactctcgccttcacgcacgtagccagagcgcaagccggaatgtaccactgtctggctgagctcccgaccggagcggccgccagtgcccccgtaatgcttcgtgtgctgtacccccccaagactcccacgatgatggtttttgtcgagcccgaggggggcctgcgggggatcctggactgcagggtggacagtgagccattagcttccttaacactccaccttggctcaagactcgttgcaagctcgcagcctcagggcgcccccgcagagccacatatccacgtgctggcctctcctaacgctctgagggtagatattgaagcgctcaggccctccgatcagggagagtatatctgctccgcttccaacgtgctgggtagtgcttctaccagcacgtactttggggtcagagccctacaccggctgcaccagttccagcaactgctctgggtactgggtctgctggtgggcctcctgttgctactgctggggctcggagcttgttacacatggagaagacggcgggtttgtaaacaatcaatgggagaaaacagcgtggagatggccttccagaaagagaccacacaactgatcgacccagacgccgccacctgcgaaacctccacctgcgcccccccactaggctag

SEQ ID NO: 322526 - RNA, 5130 nt, Artificial Sequence
  derived and/or modified sequence
auggguuucuugccgaagcuauugcugcuggccagcuuuuuccccgcuggccaagccagcuggggcgucucuucaccgcaggacgugcaaggcgucaaaggaucuugucuccuuauccccuguauuuuuucauuccccgccgauguggagguucccgacggaauaacugcaaucugguacuacgauuauuccgggcagcggcagguggucucccacuccgccgaccccaaacucguggaggccagauuccggggcaggaccgaguucaugggcaacccggagcauagggugugcaacuuacuucuaaaagaccuccagcccgaagacagcgguucuuauaacuuuagauucgaaauauccgaagugaacagguggucugaugugaaggggacucuggucacagugacagaagagccccgugucccuacaauugccaguccuguggagcuucuugaggguaccgaagucgacuuuaauugcucaacucccuacgucugccugcaagaacaggugcggcugcaguggcagggacaggacccggcaagaagcgugacuuucaauagccagaaauucgaaccuacaggugucggucauuuggagacuuugcacauggcuaugucguggcaggaucauggccgcauccugaggugccagcugagcgucgcuaaccaucgugcccaauccgagauacaccuccaggucaaauaugcacccaagggagucaaaauccugcucuccccauccggacguaauauccugccuggcgaauuaguuacacugacgugccaggugaacaguuccuacccugccgugagcaguaucaaauggcugaaagauggcguaaggcugcagacuaagacagggguauugcaccucccucaggcugccuggucagaugccggagucuauacgugucaggcugaaaacggcguuggaucucucgucuccccucccaucagccugcauaucuucauggccgaagugcagguguccccagcggguccuauuuuggagaaucaaacggugacacuggucugcaauacaccgaacgaagcaccuagcgaucuuagguacucuugguacaaaaaucacgugcugcuggaagacgcacauucacauacacuuaggcugcaccucgccacgcgggccgacacuggcuuuuauuuuugcgaggugcagaacgugcacgggucggagcgguccgggccaguuuccguuguagugaaucacccuccucucaccccuguccugacugccuucuuagagacacaagcuggccuggucggcauacuucauugcucaguggucucugaaccucuagcaacacugguccuaucacauggagggcacauccuggcaagcacaaguggcgauagcgaucacuccccccgauucucaggaaccucuggaccaaauucauuaaggcuggaaauucgcgaccucgaagaaaccgauagcggcgaauauaagugcucugccacaaacucauuggggaacgccaccucuacguuagacuuccaugccaacgcggcuagacuucuuauaagcccagcagcagaagugguggaagggcaggcagugacguugucuugucggucaggauuaagcccuacaccagacgcacgguuuaguugguaucugaacggugccuuguugcaugagggucccggcuccagucuucuacuucccgccgccuccuccacugaugcuggcaguuaucacuguagggcccgggacggacacagugccagcggcccuuccucaccagcagugcugacugugcuguauccaccaaggcaaccuaccuucaccaccagacuugaccucgacgcugccggcgcuggggccggucggcgcggcuugcuacuuugccggguggacucugauccaccugcuagacugcagcuccugcacaaggacagagucguugccacaagccuuccaagcggaggcggguguucaacuugcggagggugcuccccuagaaugaagguuacaaaagcuccuaaucuccugagagucgaaauucauaauccgcuacuggaggaagagggacuauaccucugugaagccucaaacgcucucggaaacgccucaaccucggcaacuuuuaacgggcaggcuacgguacuggcaauugccccaucucauaccuugcaagaggggaccgaggccaaccugacuuguaacgucucacgggaagcugcgggaucgcccgcaaauuucucaugguucagaaauggugugcugugggcccagggaccguuggagacuguuacucugcugcccguggcacggacugaugcagcucuuuacgcuuguagaauucugacagaagcgggggcucagcucuccacgccaguguugcucucugugcuguacccccccgaucgaccaaagcuaagugcuuuacuagauauggggcagggucauauggcacuauucauuuguacuguggauaguagaccccuggcgcuccucgcccucuuccacggugaacacuugcuggcuaccucacuuggaccgcaggugccgucucacgggcgauuucaggccaaggcugaggcaaauucucugaagcuggaggugcgggaacucggccugggagauucaggauccuacagaugcgaagccacuaauguccuggguucaaguaauacaucucuguuuuuccaggugagaggcgcuuggguccaggucucuccgucuccagagcugcaagagggacaagcuguggugcuguccugucaagugcauaccgguguaccugagggaacaagcuaccguugguauagggacggucaaccacuucaggaauccacaucugccaccuugcgguucgcugcaaucaccuuaacccaagccggugcuuaccacugccaggcacaggcgccaggcagcgcuaccacaucucuugccgcuccaauuaguuugcacgucuccuaugccccuagacaugugacccugacaacucugauggacaccggaccagggaggcugggccuguuguugugccggguagacucugaccccccggcucagcuaagacugcugcacggcgaucgccuaguggcgagcacacuccagggcgugggaggcccugagggcuccagcccacgucugcaugucgcuguggcgcccaacacccucagguuggagauucacggagcgauguuagaggacgagggcguuuauauaugcgaggcuuccaacacguuggggcaagcuucagccucagcggauuucgacgcacaggcagugaacgugcaagucuggccaggcgccaccgugagagaaggacaguugguaaaccugacgugcuuaguguggacuacacaccccgcccaacucaccuacacaugguaucaggaugggcaacagcgccuugacgcccacuccauaccuuugccaaaugugacuguacgcgacgcgaccuccuauaggugugguguugguccccccgggagggcuccaagauugucucggccuaucacacuagacgugcuuuacgcaccacgcaaccugcguuuaacauaccuccuggagagucacggaggucagcuagcacuggucuuguguaccguggacucucggcccccugcucagcuggcccucagccacgcagguagacuccuggcaucuucuaccgcagccucggugccaaacacauugagacuggagcuaagagggccccagccucgggacgagggcuuuuacucaugcagcgcacguucuccacugggucaggcaaacaccaguuuagaauuaagacuggagggggugcgagugauuuuagcucccgaggcggccgucccagaaggggccccuaucaccguuacuugugcagauccugccgcacaugcgccgacgcuguacaccugguaucacaacgggagauggcuccaggaaggccccgccgcuucguugagcuuccugguugccaccagagcacacgcaggagccuacagcugccaggcacaagaugcgcaggguaccagguccagucgccccgcagcauuacaggugcucuacgcgccccaggaugccguacuguccucuuuccgagacucuagagcuagaaguauggcuguuauccaguguaccguggauuccgaaccacccgccgaguuggcacuuucucaugauggcaaaguguuggcuacgucaagcgggguucauagccucgcuucggggaccggacacguccagguggcccgcaacgcucuuagacugcaaguccaggacgucccugcgggcgacgauacauaugugugcacagcucagaaucugcugggcagcauuagcaccauaggucgcuugcagguggagggcgccagaguaguugccgaaccaggccucgaugugccugaaggggccgcucuuaaccuuaguugccgacuccuugggggccccggcccuguagggaauuccacauuugcaugguuuuggaaugaucgcagauuacacgccgaaccugugcccacuuuggcuuuuacgcauguagcccgcgcucaggcugguauguaccacugucucgcugaacuuccaacaggggcagcagccagugcgccugugaugcugaggguucuuuaucccccuaaaaccccuacaaugaugguguucgucgaaccagaagggggacuccgaggcauccuggacugccgcguugauuccgaaccgcuggcaaguuugacacuccacuuagguaguaggcucgucgcuaguucacagccccagggcgcucccgcugaaccgcauauucauguucuugcuagucccaaugcacuuagagucgauaucgaggcucuuaggcccuccgaucagggagaguacaucuguagcgcaagcaauguucuuggaagugccucuaccucuacguauuucggagugcgagcccugcaucgcuuacaccaguuucaacagcuccuaugggugcugggacugcuggucggccucuugcuacuccugcugggguuaggcgccuguuacacauggagaagacguagagucuguaaacagucuaugggggagaauagcguggagauggccuuucagaaggaaaccacgcagcucauugacccugaugcugcuacuugcgagacaucgacuugugcuccgccgcugggguag

SEQ ID NO: 322527 - RNA, 5130 nt, Artificial Sequence
  derived and/or modified sequence
auggguuuucuuccaaagcugcuauuguuggccaguuuuuuuccagcaggacaagccucauggggugugagcucuccucaggauguccagggcgugaagggaagcugccuuuugauuccauguaucuuuaguuuuccagccgacguagaagucccggacggcaucacagccaucugguauuacgacuacucugggcagcggcagguggucucucauucagcugaccccaaacuaguggaggcgcgauuuagagggcguacagaauuuaugggcaacccggagcaccgaguuugcaaccugcuucucaaagaccugcaaccagaagacucuggcaguuauaauuuccguuucgagauuucagaaguuaacagauggagcgaugugaaaggaacguuggugaccgugacagaggagccccgugugcccacuaucgccuccccaguggaacuccuggaagguacggagguagacuucaacugcagcacgcccuaugugugccuccaggaacaggugcgacuucaauggcagggucaggauccagcuagaucaguuaccuuuaauucucagaaauuugagccuaccggugugggacaccuugaaacacuucacauggcuaugucauggcaggaucauggccgcauucugcggugccagcugucugucgcgaaccaucgggcucaauccgagauucaccugcaggucaaauaugcucccaaaggcguaaaaaucuugcucucaccaagugggcgaaauauucuacccggcgaauuagugacgcugacaugucaagucaauagcucauauccugcagucuccucaauuaagugguugaaggauggagugaggcugcagaccaaaacaggaguucugcauuugccgcaagccgcaugguccgacgcuggcguuuacaccugccaggcagagaacggugugggauccuuggugucuccuccaauaucacugcacaucuuuauggccgaaguacagguuagccccgcagggcccauccucgagaaucagaccguaacucuugugugcaauacccccaacgaggccccuuccgaucugcgcuauagcugguauaaaaaccauguccuucucgaagacgcucacagccacacucuccgcuugcaccuggccacccgagcugauacuggauucuauuucugugaggugcaaaaugugcacggauccgaacgcuccgggccaguuuccguuguagugaaucacccuccucucaccccuguccugacugccuucuuagagacacaagcuggccuggucggcauacuucauugcucaguggucucugaaccucuagcaacacugguccuaucacauggagggcacauccuggcaagcacaaguggcgauagcgaucacuccccccgauucucaggaaccucuggaccaaauucauuaaggcuggaaauucgcgaccucgaagaaaccgauagcggcgaauauaagugcucugccacaaacucauuggggaacgccacaucgacucuggauuuccacgcaaacgccgcuaggcucuugaucucacccgccgccgaggugguagaaggccaagccgugacacugagcugcaggucaggucugucucccaccccugaugcucgauuuagcugguacuugaacggugcacugcugcacgaaggaccagguuccucucugcuuuuacccgcugcuucuuccacugacgcaggauccuaccauuguagagcucgugaugggcacucugccagcggcccaagcuccccugcuguucugacugugcucuacccuccgaggcagcccacauucaccacuaggcuagauuuagacgcagcuggugcuggagcaggcagacguggauugcugcuauguagagucgauucggauccucccgccagauugcaacuucugcacaaggaucgcguugucgccacaaguuugccuucaggcggcggcugcagcacaugcggagggugcucaccccgcaugaaggugacaaaagcgccuaaccuccuacgcgucgaaauacauaacccacugcuugaagaagaggggcuguaucugugugaagcgucuaacgcccuuggaaaugcaucaacuucagccaccuuuaauggccaagcuaccgugcuugccaucgccccaucacauacuuugcaggaagguacugaagcaaaucucacuugcaaugugucucgcgaagccgcagguucucccgccaauuuuagcugguuuagaaauggcguccugugggcccaaggaccucuggagacaguaacucuguugccaguugcccgcaccgacgcugcucuguaugcaugccgaauucucacagaggcuggagcucaauugucaacaccuguucugcuuagcguccuuuauccaccugaccgcccuaaacuaucagcacugcuagacaugggacaggggcacauggcauuguucaucuguacagucgacaguaggccucucgcacuccuggcgcuuuuucauggcgaacaccuucucgcuacuucucuggguccccaggugccuucucacggaagauuucaggccaaggccgaagcaaauagccuaaaacucgagguaagggagcuaggccuuggcgacuccggcucuuaucggugugaagcaacaaaugucuuaggaucaucaaacacuucacuguuuuuucaggugcggggcgcuugggugcaggugucgccgucccccgagcuucaagagggccaagcaguaguucuuuccugucaagugcauacagggguaccagagggaacuuccuauaggugguaucgagauggccagcccuuacaagagucuacgucagcaacguugagguucgcagcuauuacucugacacaagcuggggcuuaucauugccaggcucaggccccaggcucugcgacaacuucucucgccgcucccauuucacugcacgugagcuaugcuccacgucaugugacauuaacaacccuuauggauacagguccuggaaggcugggacugcugcucugccgcguggacucagaccccccagcucagcugcgucugcugcauggagauagacugguugcaucuacgcuccagggcguuggcgggcccgaaggcagcuccccacgccuccacguugcaguggcccccaacacauuaagguuggaaauccauggcgcaauguuagaggaugaaggcguguacaucugugaggcuucgaauacucuaggucaggcauccgccucugcugauuucgaugcacaagccguuaauguacaggucuggccaggcgccaccguccgcgagggucaguuaguuaacuugaccugccucgucuggacuacccacccugcccaacucaccuacaccugguaucaggacggacaacagaggcuagacgcccacuccaucccccucccuaacgugaccgugagagacgcaaccucauaucgcuguggcguggggccgccuggacgcgccccuagacugucccggccaauuacgcuggauguccuguacgcuccucgcaaccuuagguugacuuaccuucuggagagucauggcggucaacuagcacugguucugugcacaguggauucucgcccacccgcccaauuggcguugucucacgcuggucgucucuuggcuaguucgacugccgcaucugugccaaauacucucagauuagaacuucgcggcccccagccacgcgaugagggguucuacucauguucagcacgcucaccacucggucaggcuaauaccucccucgaauuaagguuggagggcgucagggugauccucgcaccagaggcugccguccccgaaggcgcgcccauuacggugaccugugccgauccagccgcacacgcccccacucuguauaccugguaccacaaugguagauggcugcaggaaggaccugcugcuucucucucauuucugguggccacacgggcucacgccggagcauauucuugccaggcucaggacgcgcagggaacccggaguuccagaccagccgcucuccagguccuguaugcuccccaggaugcgguguuauccucauuucgcgacucucgugcuagaagcauggccgugauucaguguaccguugauagugaaccuccagccgaguuggcuuugucccacgacggaaaggugcuugccacaucuuccggugugcacucccuugcaucgggcaccgggcacguucaggucgcuagaaacgcucuuagauuacagguccaggacgugccugcaggagacgacacauacgugugcacugcucaaaacuuacuaggaaguaucagcacuauaggcagacuucagguagagggcgcacgagugguugcggaacccggcuuagacgugcccgaaggcgccgccuugaaccuaagcugccgacugcugggcggccccgguccuguugggaacucgacguuugcaugguucuggaacgacaggagacuccacgcugagccaguuccuacacucgccuucacucacguagcccgcgcucaggcugguauguaccacugucucgcugaacuuccaacaggggcagcagccagugcgccugugaugcugaggguucuuuaucccccuaaaaccccuacaaugaugguguucgucgaaccagaagggggacuccgaggcauccuggacugccgcguugauuccgaaccgcuggcaaguuugacacuccacuuagguaguaggcucgucgcuaguucacagccccagggcgcucccgcugaaccgcauauucauguucuugcuagucccaaugcacuuagagucgauaucgaagcccugagaccaagcgaccagggagaauacauuuguuccgccucgaacgugcuggggagcgccucaacaagcaccuacuuuggcgugcgcgcauugcaucggcugcaucaguuucagcaacugcuguggguacugggucuccuggucggauuacuccuucuccuguuaggacugggugcguguuacacauggcgucggagaaggguuuguaaacaaucaaugggugagaauuccguagaaauggccuuccagaaagaaaccacucaacuaauugacccugacgcagcaacaugcgaaaccuccacuugugcacccccccucggcuag

SEQ ID NO: 322528 - protein, 1701 aa, Artificial Sequence
  derived and/or modified sequence
MGFLPKLLLLASFFPAGQASWGVSSPQDVQGVKGSCLLIPCIFSFPADVEVPDGITAIWYYDYSGQRQVVSHSADPKLVEARFRGRTEFMGNPEHRVCNLLLKDLQPEDSGSYNFRFEISEVNRWSDVKGTLVTVTEEPRVPTIASPVELLEGTEVDFNCSTPYVCLQEQVRLQWQGQDPARSVTFNSQKFEPTGVGHLETLHMAMSWQDHGRILRCQLSVANHRAQSEIHLQVKYAPKGVKILLSPSGRNILPGELVTLTCQVNSSYPAVSSIKWLKDGVRLQTKTGVLHLPQAAWSDAGVYTCQAENGVGSLVSPPISLHIFMAEVQVSPAGPILENQTVTLVCNTPNEAPSDLRYSWYKNHVLLEDAHSHTLRLHLATRADTGFYFCEVQNVHGSERSGPVSVVVNHPPLTPVLTAFLETQAGLVGILHCSVVSEPLATLVLSHGGHILASTSGDSDHSPRFSGTSGPNSLRLEIRDLEETDSGEYKCSATNSLGNATSTLDFHANAARLLISPAAEVVEGQAVTLSCRSGLSPTPDARFSWYLNGALLHEGPGSSLLLPAASSTDAGSYHCRARDGHSASGPSSPAVLTVLYPPRQPTFTTRLDLDAAGAGAGRRGLLLCRVDSDPPARLQLLHKDRVVATSLPSGGGCSTCGGCSPRMKVTKAPNLLRVEIHNPLLEEEGLYLCEASNALGNASTSATFNGQATVLAIAPSHTLQEGTEANLTCNVSREAAGSPANFSWFRNGVLWAQGPLETVTLLPVARTDAALYACRILTEAGAQLSTPVLLSVLYPPDRPKLSALLDMGQGHMALFICTVDSRPLALLALFHGEHLLATSLGPQVPSHGRFQAKAEANSLKLEVRELGLGDSGSYRCEATNVLGSSNTSLFFQVRGAWVQVSPSPELQEGQAVVLSCQVHTGVPEGTSYRWYRDGQPLQESTSATLRFAAITLTQAGAYHCQAQAPGSATTSLAAPISLHVSYAPRHVTLTTLMDTGPGRLGLLLCRVDSDPPAQLRLLHGDRLVASTLQGVGGPEGSSPRLHVAVAPNTLRLEIHGAMLEDEGVYICEASNTLGQASASADFDAQAVNVQVWPGATVREGQLVNLTCLVWTTHPAQLTYTWYQDGQQRLDAHSIPLPNVTVRDATSYRCGVGPPGRAPRLSRPITLDVLYAPRNLRLTYLLESHGGQLALVLCTVDSRPPAQLALSHAGRLLASSTAASVPNTLRLELRGPQPRDEGFYSCSARSPLGQANTSLELRLEGVRVILAPEAAVPEGAPITVTCADPAAHAPTLYTWYHNGRWLQEGPAASLSFLVATRAHAGAYSCQAQDAQGTRSSRPAALQVLYAPQDAVLSSFRDSRARSMAVIQCTVDSEPPAELALSHDGKVLATSSGVHSLASGTGHVQVARNALRLQVQDVPAGDDTYVCTAQNLLGSISTIGRLQVEGARVVAEPGLDVPEGAALNLSCRLLGGPGPVGNSTFAWFWNDRRLHAEPVPTLAFTHVARAQAGMYHCLAELPTGAAASAPVMLRVLYPPKTPTMMVFVEPEGGLRGILDCRVDSEPLASLTLHLGSRLVASSQPQGAPAEPHIHVLASPNALRVDIEALRPSDQGEYICSASNVLGSASTSTYFGVRALHRLHQFQQLLWVLGLLVGLLLLLLGLGACYTWSSLILMQPHVRPQPVPHPWADQWCCLPSGGESGQNL

SEQ ID NO: 322529 - DNA, 5105 bp, Artificial Sequence
  derived and/or modified sequence
atgggattccttccaaaactattgctattggccagtttttttcctgcgggacaggctagctggggagtgagctccccccaggatgttcaaggcgtaaagggaagttgcctgctcatcccctgtattttctcttttccagctgatgttgaggtgcctgatgggattacagccatttggtactatgactacagcggtcagaggcaagtggtgtcacacagcgccgatcctaaactggttgaggctaggttcagggggcgaaccgaattcatgggcaatcccgaacaccgcgtctgtaacttacttctgaaagacttgcagcctgaggacagcgggtcatacaatttcaggtttgagatttctgaggtaaatagatggagtgatgtcaaaggcactctggttaccgtaacggaggagccgagagtccccacaatcgctagccccgtcgaactgcttgagggaactgaggtggactttaattgcagcaccccctacgtgtgtctgcaggaacaggtgagactccaatggcaaggccaagacccggcaaggtcagtgacattcaactcccagaaattcgaacccaccggcgtcggacacctggagaccctgcatatggcaatgtcatggcaggaccacggtcgtatcctacggtgccagctgagtgtggctaatcaccgggctcaatctgagatacatttacaggtgaagtacgcccctaagggcgtgaagattctgctatcaccctcagggcgaaacatacttccaggcgagttggtgactctcacctgccaggtcaactcgagctacccggctgtaagctctatcaagtggctgaaggatggggttcggttacagacaaaaacaggggtgctgcatttaccccaggctgcttggagcgatgcaggggtctacacttgccaggctgagaacggtgttgggtctctggtgagccctcccatttcgctgcatattttcatggcagaggtgcaggtatctccagccggtcccattctcgaaaaccagactgttacactcgtgtgcaacacaccaaacgaagccccatctgatttgaggtacagctggtacaaaaatcacgtgctgcttgaagatgcacactctcatacacttcgccttcatcttgcaactagggccgataccgggttctacttttgcgaagtccaaaacgtgcacggctccgaacggagcggtcccgtcagtgtggtggtgaatcacccccctttgacccccgtgctgaccgcttttctcgaaacccaggccggtctggtggggatattgcattgttcggtcgtatccgaacctctggcgactctcgtactgagccacggtgggcacatacttgcttccacatcaggcgattccgatcattctcctagatttagcggcacatccgggccaaactctcttaggctggagatcagagacctggaggagacggactcaggcgagtataaatgttctgcaacgaattccctgggcaacgccacgtcaactttggacttccacgcaaatgcagcacgacttttgattagtcccgcagcggaagttgtcgagggacaggcagtcaccctcagctgccgatccggcttgtcgccgacacctgacgcccgtttttcatggtacttaaacggcgctttgctacacgaaggacctgggtcttccctcctgcttcccgcagcatcttcaacggatgctggctcctatcattgccgagccagggacggacattcagccagtggacctagtagccctgcagttctgaccgtgctttatccccctcgccaaccgacattcaccacccgtctcgatctggatgccgctggtgccggagcaggccgaagaggattactattgtgccgggtggacagtgatccacctgctaggctgcagttgttgcacaaggatagagtggtggctacatcacttccctcaggaggaggatgttctacctgcggcggttgcagccccaggatgaaagtgactaaagctcccaatctcctcagggtggaaattcataacccactgctggaggaagaaggcctgtatttatgtgaggccagcaacgccttaggaaatgcgtccacctccgcgacgtttaacggccaggccactgtgcttgccattgcccctagccacacacttcaggaaggaacggaggctaatctgacttgcaatgttagtagagaagccgcagggagcccagcgaatttctcatggtttagaaacggtgtgctttgggctcagggaccattggaaaccgtaactttgctgcccgtcgctaggacagatgctgctctctacgcctgtcggatcctgacagaggccggagctcagttgtccacgccggtgctactgtccgttttgtatcccccagatcgccctaaattgagcgccctcctggacatgggtcaggggcacatggcactatttatttgtacagtggacagccggccactcgccctcctggctttgttccatggcgagcatcttctagccacatcacttggtcctcaggtacccagtcacggcagatttcaggctaaagctgaggccaattccttgaagctggaggtgagagaattaggcctgggcgactcggggtcttaccgatgcgaggctactaatgtgctaggctcttccaatacttctctgttcttccaggtacgcggtgcttgggtccaagtgtcacccagtccagagctgcaagagggccaagccgttgtgttatcttgtcaggttcacactggtgtgccagaggggacatcctaccgatggtatagagatggccagccccttcaggagtcaacctcggcaacgctgcgctttgcagctattaccctcacccaggcaggtgcttaccactgccaggcccaggccccagggtcagctacaacgtccttggctgcgcctatttccttacatgtctcatacgctcccaggcacgtgactctgacaacactgatggatacaggccctgggagactgggactccttctgtgccgagtagactcagaccctcccgctcagctgaggttgctgcacggcgacaggctagtggcatctacactgcagggcgtgggaggtccagaaggctcttctcccagactgcacgtagccgtagcccctaatactttaaggctggagattcacggagctatgctggaagacgagggcgtctacatctgcgaggcttctaacacactgggccaagcttccgcaagtgccgacttcgacgcccaggccgtcaacgtccaggtgtggcctggagcaaccgtcagggagggccagttggtaaatctcacttgcctggtgtggacaacccaccctgcccagttgacttacacttggtaccaagacggtcaacaacggttggacgcgcactctatccctctgccaaacgtgaccgtgagggatgcaacttcctatagatgcggtgtcgggcctcctggacgcgcaccacggctctcccggcctatcaccctggacgttctatacgctccaagaaacctacgcctgacctatttgttggaatcgcatgggggacagctggcactggttctgtgtaccgtcgattcccgaccacctgctcagcttgctctctcccacgcaggccgattgctggccagctccactgccgcttctgtgcctaacactctcaggctagagcttcggggacctcagcccagagatgagggtttttacagctgttccgccaggagcccccttggccaggccaatacctcccttgagctgcggctggaaggagtccgtgtgatcctggcccctgaggcagccgtgcccgaaggggctcccatcaccgtaacatgtgcagatccagctgcccatgctcccactctgtatacatggtatcacaacggacgctggctgcaagaaggccctgccgcttccctctccttcctggtagctacccgcgctcacgccggtgcctattcctgtcaggcacaagacgcacagggaacaagaagctcgaggccagcggctctacaggtgctctacgctcctcaggacgcggtgctgtcaagctttagagacagcagggcccgaagcatggccgtgatacagtgtaccgtagacagcgagccacctgcagagctggccttatcccacgatggaaaggtccttgctaccagttccggcgtgcacagcttagcgagtggcaccggccacgtccaagtcgcaagaaatgcactgagactgcaggtgcaagacgtgcctgccggtgacgacacttacgtttgtacagctcagaatctattggggagcatatctacaattgggaggttgcaagtggaaggcgcacgggtagtcgccgagccagggctggatgtgcctgagggcgcagccctcaacctctcctgtcggttactgggcggtcctggcccagtcgggaacagcactttcgcgtggttctggaacgatcgtcggctgcacgccgaacccgtgccaaccctcgcatttacacatgttgctcgggcacaggccggaatgtatcactgtctcgcagagctaccaactggggctgccgcttccgcgccagtcatgttgcgggtgctgtatcctcctaagacacctaccatgatggtgttcgtggagcccgaggggggacttagggggattctcgactgtagggtggacagcgaaccgttggccagtttgacattgcaccttggctctcgactagtcgcgtcctcccagccgcagggtgcacctgctgaaccacatatccacgtgttagcgagccccaatgcactgcgggtggacattgaagccttgagacctagcgaccagggcgaatatatctgctcagcatcgaacgtattagggtcagcctctacgtccacatacttcggcgtcagggcactccaccggttacaccagttccaacagctgctgtgggtacttgggctactggtcgggctactcctcttgctgctcggtcttggcgcttgctacacctggagctctctgatattgatgcagccccacgtccgacctcagcccgtccctcatccgtgggccgaccaatggtgttgcctgcctagcggaggggagtccggacaaaatctata

SEQ ID NO: 322530 - DNA, 5106 bp, Artificial Sequence
  derived and/or modified sequence
atggggtttctgcccaagctccttctgctggcgagttttttccccgccggtcaggcatcatggggtgtgtcaagtcctcaggatgtgcagggtgtaaaaggcagttgcttgctgataccttgtattttcagttttcctgccgacgttgaagtccctgacgggattaccgcaatatggtattacgactatagcggccaacgacaggtggtgagccattccgctgatcccaaactggttgaggcgcgattccggggtcggaccgaatttatgggaaatcctgagcatcgtgtgtgcaatttgctcctcaaagacctccagccagaagacagcggcagctacaacttccgtttcgagatctcggaagtgaaccgttggtctgacgtgaagggcaccctcgttacggtcacagaagagccccgcgtgcccaccatcgcttcccccgtcgagctcctggaaggcaccgaggtagactttaattgcagcacaccttatgtctgcctgcaggaacaggttcggctgcagtggcagggacaggatccagcaagaagcgtgacatttaattcacagaaattcgagcctaccggcgtggggcacctggaaaccctacacatggctatgtcttggcaggaccatggacgcattctgcgctgtcaactaagtgtggcaaaccatagagcacagtccgaaatccatctccaggtgaaatacgcacccaaaggtgttaaaatcctgctgtccccctcggggcgaaatatcctgcccggagaattggtaacactaacctgccaagttaacagctcttatcccgctgtaagctcaatcaaatggttgaaggatggagttcgcctgcaaacaaagaccggagtcctacatttgcctcaggcagcctggagcgatgccggagtttacacctgccaagctgaaaacggtgtaggttcactggtgtctcccccaatctccctgcatatctttatggccgaagttcaagtctcccccgccggacctatcctcgagaatcagacagtcaccctcgtatgtaataccccgaacgaggcaccttccgacctccgttacagctggtacaaaaatcacgtgctgttagaggacgcacatagtcataccctccggctgcacctcgccacccgcgccgatacagggttttatttttgcgaagtccagaacgtacacgggagtgaaagaagcggacccgtatctgtagtggtgaaccacccccctctgactccagtgctgactgcctttcttgaaacccaggctggcctggtgggcatcctccactgctccgtagtatcggagccgctggctacgctggtgctgagtcatggaggccacattctcgcctccactagcggagattccgatcatagtcctagattttccgggacttccggcccaaattctctcagattggaaattcgcgatctggaggagaccgacagcggtgaatacaaatgcagcgccaccaacagcctaggcaacgctactagtacactggactttcatgctaacgccgctcggctcctgatctctccagccgcagaggtggttgaagggcaagcggtgaccctttcctgcagatccgggctgtctcctacgccggacgcaaggttctcctggtacctgaatggcgctttgttacacgagggtcccggatcctcactgctgctgcctgccgccagctcaaccgacgccggctcctaccattgtagggcccgcgatggtcattctgcttcaggcccaagctctccggccgtcctgacagtactctacccgccccggcaacctacttttacaactcggttagatctagatgctgctggggcaggcgccgggaggcgaggtttgctcctgtgcagagttgatagcgacccccctgcgcgcttgcaactgctccacaaggatcgcgtggtggccactagtttgcctagtggcggcggctgctccacttgcggcggctgtagcccacggatgaaggtcacaaaagcccccaatctcttgcgggtcgagatacacaatcctctactcgaagaagaagggttatatctgtgtgaggcttccaatgccctgggaaatgcatctactagtgccacattcaatggacaagctacggttctggcaattgccccctctcacaccctgcaagagggaacggaggccaatctaacctgtaatgtgtctcgcgaggcagcagggtcccccgccaatttttcctggtttagaaacggcgtcctgtgggcacagggaccactggaaacggttactcttcttcccgtcgccagaactgatgccgctctttacgcctgcagaatcctgacagaagcaggcgcccaactctctacccctgtcttgttgtcagtcttgtatccgcctgacaggcctaagctgtccgccctgctggatatggggcaagggcacatggctttatttatatgtactgtcgacagcagaccgctggccctcttagcgctgttccatggagaacaccttctcgcaacctctctgggcccacaggtaccttctcacggcaggtttcaggccaaagctgaagcaaacagcctgaaactggaagtgagggaattggggctaggtgattccggctcctaccgatgcgaagcaaccaatgtgctgggcagcagtaataccagcctcttcttccaggttcgtggagcatgggtgcaagtttctccctcaccagaactgcaggagggtcaggccgtcgttctgagctgccaagtgcataccggcgtgccagagggtacaagttatcggtggtaccgggacggacaacctctccaggagagtacaagtgccacgcttcggttcgccgcgatcacactgacacaagcaggcgcttatcattgccaggcacaggcccctggtagtgcaaccactagcttagccgcccccatctccttgcatgtatcctacgctcctcgccatgtgaccctcactactctcatggatactgggcccgggcggctaggattgcttctgtgccgcgtcgactcagacccacctgctcagcttcggttgctccacggagaccggctcgtggcatctacactgcagggtgtcggaggccccgagggaagttctccaagactgcatgtcgctgtcgctccaaatactttgcgtctggaaatccacggtgctatgttggaagatgaaggggtatatatttgtgaggccagtaacaccctggggcaggccagcgcttcagctgattttgatgcccaagcagttaacgttcaagtctggccaggtgccactgtcagagaaggtcagcttgtaaacttgacctgtttggtgtggaccactcaccccgctcagttgacttacacatggtatcaggacgggcagcaaaggttggatgcccatagtataccattgccaaacgtgacagttcgcgatgctactagctataggtgcggagtgggccctcctgggcgggccccacgcctgagccggccgattactctcgatgtgctatacgcgcccagaaacttgcgactcacatatctcctcgagtcgcacggaggacagctcgctctggtcctgtgtactgtggactcgcggcctcctgctcagctggcactgagtcacgccgggcgtctgttagcttcttccacggcggcctctgtgcctaacaccctgagactcgagctgcgcgggccacagccccgagacgagggattctactcgtgcagtgctcggtctccgctgggtcaggccaacacgagtttggagctgcgcctggagggagttagagtaatccttgccccagaagcagctgtccctgaaggggcccctattactgtcacttgtgccgaccctgcagcccacgcgccgaccctctatacatggtaccataacggtcgctggctccaggagggacctgctgcctctttgtcttttctcgttgccaccagggctcacgccggcgcctattcttgccaggcccaagacgcccaaggaaccagatctagccggccagccgcccttcaggtgctctatgcgccccaggatgccgttctttcatcatttagggatagtcgagcccgatcaatggccgtcattcaatgtacagtcgattcagagccaccagctgaactggcactgagtcacgacgggaaagtcctggccacatcgagtggggtccacagcctggccagcgggacaggacatgtacaggtagctagaaacgcgctgaggttgcaggtccaagacgtgcctgccggagatgacacctacgtgtgcactgcgcagaatttactcggttccatctcaactataggccgtctgcaggtggagggcgcacgagtggtggccgagcccgggctggatgtgccagagggagctgcgcttaacctgagttgtaggctgttgggtggtccaggtcctgtgggtaactccacctttgcatggttctggaacgaccggcggctccacgccgagcccgtgccaaccttggccttcacccacgttgcccgggctcaagcaggcatgtaccattgcttggccgaattgccgacaggggcagccgcaagcgccccagtgatgctgagagttctctatcctcctaagacgccaactatgatggtgtttgtggagcccgaaggcggactgaggggtattttggactgcagggtggactcagagccactggcttccctcacactgcacttgggcagtcgattagtggcctcatcgcaacctcagggagctcccgccgagccccacatccatgtgctggccagcccaaatgcactgcgggtcgacatagaggccttacgacctagtgaccagggcgagtacatttgctccgctagcaacgtgctgggcagcgcttccacctcaacatatttcggcgttcgagctctccaccgtttgcaccaatttcaacagcttctctgggtgctagggttgctcgttggcctgctgctgttgctactggggctcggagcctgttacacctggagcagcttgattctgatgcaaccgcatgtccgccctcaacctgttcctcacccatgggccgatcaatggtgctgcctgccatctggtggtgaatcgggacagaatttatag

SEQ ID NO: 322531 - DNA, 5106 bp, Artificial Sequence
  derived and/or modified sequence
atgggctttcttccaaagctcttactgctggcctccttttttccagccggccaggccagttggggcgttagctccccccaggacgttcaaggcgtgaagggttcttgtctcctaattccctgtatcttttcattcccagcagacgtcgaggtgcctgacggtataactgccatatggtactacgattacagcggacagcgccaagtggtgtctcacagtgcggacccaaaactcgtggaagctcgttttcgcggaaggactgagtttatggggaatcctgagcaccgcgtctgtaacctgctcctgaaagatctccaacctgaggatagcggtagctacaacttccgtttcgaaatctccgaggtgaaccgctggtcagatgtgaagggtacccttgtcacagtgacagaagaaccccgagtgcccactatagctagccctgtggaacttttggaaggtactgaggttgattttaattgctccaccccatacgtctgtcttcaagagcaagtccgcctccagtggcagggccaggacccagcgcgttctgttacttttaatagtcagaagtttgaacccacgggcgtcggtcatcttgagaccctacacatggctatgtcttggcaggaccatggacgcattctgcgctgtcaactaagtgtggcaaaccatagagcacagtccgaaatccatctccaggtgaaatacgcacccaaaggtgttaaaatcctgctgtccccctcggggcgaaatatcctgcccggagaattggtaacactaacctgccaagttaacagctcttatcccgctgtaagctcaatcaaatggttgaaggatggagttcgcctgcaaacaaagaccggagtcctacatttgcctcaggcagcctggagcgatgccggagtttacacctgccaagctgaaaacggtgtaggttcactggtgtctcccccaatctccctgcatatctttatggccgaagttcaagtctcccccgccggacctatcctcgagaatcagacagtcaccctcgtatgtaataccccgaacgaggcaccttccgacctccgttacagctggtacaaaaatcacgtgctgttagaggacgcacatagtcataccctccggctgcacctcgccacccgcgccgatacagggttttatttttgcgaagtccagaacgtacacgggagtgaaagatctggtccagttagtgtcgtagttaaccatccgccactgacacccgtgctgacagcatttttggagacgcaggccggcctggttggaattttacactgtagtgtggtaagtgagcccctggctacattagtgttatcacacggagggcacatcctggctagcacttcaggagactctgaccattctccacgattttcaggcacatctggcccaaactcactccgccttgaaatcagagacctcgaggagactgacagcggcgagtataagtgcagcgcaaccaactctttagggaatgcaacttccacgcttgatttccacgccaatgccgcccgactgttgatttcgccagccgccgaggtcgtcgaaggccaagccgtcacactttcttgcaggtcaggacttagccccaccccagacgcaaggttctcatggtacctaaacggtgccctcctccacgaaggccctggttcatcgctactgctgccagccgcctcatcaacggatgccggctcctaccactgtagagctagagacgggcacagtgcctcaggtccaagctcccccgccgttctgactgtgctctatcctccccgccagcctacttttacgaccagactggacctcgatgctgccggtgcaggagccggtcgacgcggcctgttgctgtgcagagtcgatagtgatccacctgcccggttgcaactgctgcataaggatcgggtcgttgctacaagcctgccgtccggtggcggatgttctacttgtgggggatgttccccgaggatgaaggtaaccaaggccccaaacctcctgagagtcgaaatccataacccattgcttgaggaagagggattgtatctgtgcgaagcttctaatgctttgggtaacgcttcaacttctgctacattcaatggccaagctacagtcctcgctattgccccatctcatacactgcaggagggcaccgaggccaatcttacatgtaatgtcagccgggaggccgccggctcacctgcgaacttctcatggtttcgtaacggagtgctttgggctcagggaccactcgagactgtcactctgctgcctgttgctagaactgacgcagccctgtacgcttgcagaatcctcactgaggcaggagctcagctgtccaccccagttctgctgagtgtgttgtacccaccagatcgaccgaagctatcagcactgcttgatatggggcagggacatatggctctttttatttgcaccgttgacagcagacccctcgctctcttagctcttttccatggtgaacatttactggctacatctcttggaccgcaagtcccttcccacggtcgattccaggcaaaggctgaagctaatagccttaagttggaagtgcgggaactggggctgggagattccgggtcctaccggtgcgaagcaacaaatgtactgggaagcagcaacacaagtcttttcttccaggtccgtggggcctgggtgcaggtctcgcccagccccgagttacaagaagggcaagccgttgtcttgagctgccaggtccatacaggggtcccagaaggcacttcctacaggtggtatcgggatggacagccccttcaagaatccacctcggcaaccttgagatttgccgccatcacgctgacccaggcgggagcttatcattgtcaggcccaagcaccaggctctgcaactacaagccttgccgctcctatcagcctccacgtgtcctatgctcctcgccacgtgaccctaacaactttgatggatacaggtcctggaagattgggactgctactctgccgcgtggatagtgaccctcccgcacagctgcgattgttgcacggagataggttggttgcttccacacttcaaggggtcggaggtccggaggggtccagcccaagactacatgtggctgtcgctcctaatactttaaggctcgagatccacggcgccatgctggaggacgagggcgtgtatatttgcgaagcttctaacaccttaggacaggcatcagcctcagctgactttgatgcacaggctgtcaatgttcaagtatggcccggcgcaacagtgcgagaaggtcagcttgtgaacttaacgtgtcttgtgtggaccacacatcctgctcagctcacctatacttggtaccaagatggtcaacagagattggacgcccattcaattcctcttcccaacgtaactgtccgagatgccacaagctatagatgcggagttgggccgccagggcgggcccccaggctgagcagacccatcaccctagacgtactttatgctccccgtaacctcaggctaacttatctactggagagccatggcggacagctagccctggtcctgtgcactgtcgacagccgccctcccgcccagttggccctgtcccacgccggccgccttctcgccagttcgaccgccgcctcagtccctaacacacttcggttggaactacgcggaccccaacccagggatgaggggttctattcctgctctgcacgttcacctcttggtcaagctaacacctcgctagagctacgtctggaaggtgtcagggtgatactcgctcccgaagcagcagtccctgagggtgcccccattacagtcacttgcgccgacccagccgcacatgctccaaccctgtatacctggtaccacaacggcagatggctgcaggaaggacctgcagcgtccttatcttttttagtcgcaactcgcgcacacgccggagcttattcgtgtcaggcgcaagatgcccagggtactcgttcatctaggcccgccgcactccaggtgctttatgctccacaagatgctgttctcagttcattccgcgactcacgtgccagatccatggcagttatccagtgtaccgtggattctgaacccccagctgaactcgcactctcacatgacggaaaggtcctagcaactagttctggggtccactcccttgcctcgggcacgggacatgtgcaagtagcccggaatgctttgcgcctgcaagttcaggacgtccctgctggcgatgacacttatgtctgcactgcacaaaacctgcttggttccatttcaactattggacgcttacaggtcgagggagcacgggtggttgccgaacctggcctggatgtccccgagggcgccgcgctgaatttgagctgcaggctgctgggaggtcccggtccagtcggaaactctacatttgcctggttttggaacgacagacggctgcatgctgagcccgtgcccacactagcttttacccatgtggcgcgggcacaggctggaatgtaccactgtttggccgaactcccgactggcgcagccgcttccgcccccgtgatgctgagagtgctataccctccaaaaactccaaccatgatggtgttcgtggaacctgaaggcggcctcagggggattctggactgccgcgtcgactcagagcccttggcctcacttacgttgcaccttggaagtcgcctggtcgcctccagccagcctcaaggagctcccgcagagccacacatccatgtcctagcctccccgaatgcactcagagtcgacatcgaggccttacgacctagtgaccagggcgagtacatttgctccgctagcaacgtgctgggcagcgcttccacctcaacatatttcggcgttcgagctctccaccgtttgcaccaatttcaacagcttctctgggtgctagggttgctcgttggcctgctgctgttgctactggggctcggagcctgttacacctggagcagcttgattctgatgcaaccgcatgtccgccctcaacctgttcctcacccatgggccgatcaatggtgctgcctgccatctggtggtgaatcgggacagaatctatag

SEQ ID NO: 322532 - DNA, 6645 bp, Artificial Sequence
  derived and/or modified sequence
atgggcttcttgcccaagcttctcctcctggcctcattcttcccagcaggccaggcctcatggggcgtctccagtccccaggacgtgcagggtgtgaaggggtcttgcctgcttatcccctgcatcttcagcttccctgccgacgtggaggtgcccgacggcatcacggccatctggtactacgactactcgggccagcggcaggtggtgagccactcggcggaccccaagctggtggaggcccgcttccgcggccgcaccgagttcatggggaaccccgagcacagggtgtgcaacctgctgctgaaggacctgcagcccgaggactctggttcctacaacttccgcttcgagatcagtgaggtcaaccgctggtcagatgtgaaaggcaccttggtcacagtaacagaggagcccagggtgcccaccattgcctccccggtggagcttctcgagggcacagaggtggacttcaactgctccactccctacgtatgcctgcaggagcaggtcagactgcagtggcaaggccaggaccctgctcgctctgtcaccttcaacagccagaagtttgagcccaccggcgtcggccacctggagaccctccacatggccatgtcctggcaggaccacggccggatcctgcgctgccagctctccgtggccaatcacagggctcagagcgagattcacctccaagtgaagtatgcccccaagggtgtgaagatcctcctcagcccctcggggaggaacatccttccaggtgagctggtcacactcacctgccaggtgaacagcagctaccctgcagtcagttccattaagtggctcaaggatggggtacgcctccaaaccaagactggtgtgctgcacctgccccaggcagcctggagcgatgctggcgtctacacctgccaagctgagaacggcgtgggctctttggtctcaccccccatcagcctccacatcttcatggctgaggtccaggtgagcccagcaggtcccatcctggagaaccagacagtgacactagtctgcaacacacccaatgaggcacccagtgatctccgctacagctggtacaagaaccatgtcctgctggaggatgcccactcccataccctccggctgcacttggccactagggctgatactggcttctacttctgtgaggtgcagaacgtccatggcagcgagcgctcgggccctgtcagcgtggtagtcaaccacccgcctctcactccagtcctgacagccttcctggagacccaggcgggacttgtgggcatccttcactgctctgtggtcagtgagcccctggccacactggtgctgtcacatgggggtcatatcctggcctccacctccggggacagtgatcacagcccacgcttcagtggtacctctggtcccaactccctgcgcctggagatccgagacctggaggaaactgacagtggggagtacaagtgctcagccaccaactcccttggaaatgcaacctccaccctggacttccatgccaatgccgcccgtctcctcatcagcccggcagccgaggtggtggaaggacaggcagtgacactgagctgcagaagcggcctaagccccacacctgatgcccgcttctcctggtacctgaatggagccctgcttcacgagggtcccggcagcagcctcctgctccccgcggcctccagcactgacgccggctcataccactgccgggcccgggacggccacagtgccagtggcccctcttcgccagctgttctcactgtgctctacccccctcgacaaccaacattcaccaccaggctggaccttgatgccgctggggccggggctggacggcgaggcctccttttgtgccgtgtggacagcgacccccccgccaggctgcagctgctccacaaggaccgtgttgtggccacttccctgccatcagggggtggctgcagcacctgtgggggctgttccccacgcatgaaggtcaccaaagcccccaacttgctgcgtgtggagattcacaaccctttgctggaagaggagggcttgtacctctgtgaggccagcaatgccctgggcaacgcctccacctcagccaccttcaatggccaggccactgtcctggccattgcaccatcacacacacttcaggagggcacagaagccaacttgacttgcaacgtgagccgggaagctgctggcagccctgctaacttctcctggttccgaaatggggtgctgtgggcccagggtcccctggagaccgtgacactgctgcccgtggccagaactgatgctgccctttacgcctgccgcatcctgactgaggctggtgcccagctctccactcccgtgctcctgagtgtactctatcccccggaccgtccaaagctgtcagccctcctagacatgggccagggccacatggctctgttcatctgcactgtggacagccgccccctggccttgctggccttgttccatggggagcacctcctggccaccagcctgggtccccaggtcccatcccatggtcggttccaggctaaagctgaggccaactccctgaagttagaggtccgagaactgggccttggggactctggcagctaccgctgtgaggccacaaatgttcttggatcatccaacacctcactcttcttccaggtccgaggagcctgggtccaggtgtcaccatcacctgagctccaagagggccaggctgtggtcctgagctgccaggtacacacaggagtcccagaggggacctcatatcgttggtatcgggatggccagcccctccaggagtcgacctcggccacgctccgctttgcagccataactttgacacaagctggggcctatcattgccaagcccaggccccaggctcagccaccacgagcctagctgcacccatcagcctccacgtgtcctatgccccacgccacgtcacactcactaccctgatggacacaggccctggacgactgggcctcctcctgtgccgtgtggacagtgaccctccggcccagctgcggctgctccacggggatcgccttgtggcctccaccctacaaggtgtggggggacccgaaggcagctctcccaggctgcatgtggctgtggcccccaacacactgcgtctggagatccacggggctatgctggaggatgagggtgtctatatctgtgaggcctccaacaccctgggccaggcctcggcctcagctgacttcgacgctcaagctgtgaatgtgcaggtgtggcccggggctaccgtgcgggaggggcagctggtgaacctgacctgccttgtgtggaccactcacccggcccagctcacctacacatggtaccaggatgggcagcagcgcctggatgcccactccatccccctgcccaacgtcacagtcagggatgccacctcctaccgctgcggtgtgggcccccctggtcgggcaccccgcctctccagacctatcaccttggacgtcctctacgcgccccgcaacctgcgcctgacctacctcctggagagccatggcgggcagctggccctggtactgtgcactgtggacagccgcccgcccgcccagctggccctcagccacgccggtcgcctcttggcctcctcgacagcagcctctgtccccaacaccctgcgcctggagctgcgagggccacagcccagggatgagggtttctacagctgctctgcccgcagccctctgggccaggccaacacgtccctggagctgcggctggagggtgtgcgggtgatcctggctccggaggctgccgtgcctgaaggtgcccccatcacagtgacctgtgcggaccctgctgcccacgcacccacactctatacttggtaccacaacggtcgttggctgcaggagggtccagctgcctcactctcattcctggtggccacgcgggctcatgcaggcgcctactcttgccaggcccaggatgcccagggcacccgcagctcccgtcctgctgccctgcaagtcctctatgcccctcaggacgctgtcctgtcctccttccgggactccagggccagatccatggctgtgatacagtgcactgtggacagtgagccacctgctgagctggccctatctcatgatggcaaggtgctggccacgagcagcggggtccacagcttggcatcagggacaggccatgtccaggtggcccgaaacgccctacggctgcaggtgcaagatgtgcctgcaggtgatgacacctatgtttgcacagcccaaaacttgctgggctcaatcagcaccatcgggcggttgcaggtagaaggtgcacgcgtggtggcagagcctggcctggacgtgcctgagggcgctgccctgaacctcagctgccgcctcctgggtggccctgggcctgtgggcaactccacctttgcatggttctggaatgaccggcggctgcacgcggagcctgtgcccactctcgccttcacccacgtggctcgtgctcaagctgggatgtaccactgcctggctgagctccccactggggctgctgcctctgctccagtcatgctccgtgtgctctaccctcccaagacgcccaccatgatggtcttcgtggagcctgagggtggcctccggggcatcctggattgccgagtggacagcgagccgctcgccagcctgactctccaccttggcagtcgactggtggcctccagtcagccccagggtgctcctgcagagccacacatccatgtcctggcttcccccaatgccctgagggtggacatcgaggcgctgaggcccagcgaccaaggggaatacatctgttctgcctcaaatgtcctgggctctgcctctacctccacctactttggggtcagagccctgcaccgcctgcatcagttccagcagctgctctgggtcctgggactgctggtgggcctcctgctcctgctgttgggcctgggggcctgctacacctggagctcattgatcctgatgcagccacatgtgagacctcaacctgtgccccacccctgggctgaccagtggtgttgcctgccctccggaggagaaagtggccagaatctgtgatgactccagcctatgaatgtgaatgaggcagtgttgagtcctgcccgcctctacgaaaacagctctgtgacatctgactttttatgacctggccccaagcctcttgcccccccaaaaatgggtggtgagaggtctgcccaggagggtgttgaccctggaggacactgaagagcactgagctgatctcgctctctcttctctggatctcctcccttctctccatttctccctcaaaggaagccctgccctttcacatccttctcctcgaaagtcaccctggactttggttggattgcagcatcctgcatcctcagaggctcaccaaggcattctgtattcaacagagtatcagtcagcctgctctaacaagagaccaaatacagtgacttcaacatgatagaattttatttttctctcccacgctagtctggctgttacgatggtttatgatgttggggctcaggatccttctatcttccttttctctatccctaaaatgatgcctttgattgtgaggctcaccatggccccgctttgtccacatgccctccagccagaagaaggaagagtggaggtagaagcacacccatgcccatggtggacgcaactcagaagctgcacaggacttttccactcacttcccattggctggagtattgtcacatggctactgcaagctacaagggagactgggaaatgtagtttttattttgagtccagaggacatttggaattggacttccaaaggactcccaactgtgagctcatccctgagacttttgacattgttgggaatgccaccagcaggccatgttttgtctcagtgcccatctactgagggccagggtgtgcccctggccattctggttgtgggcttcctggaagaggtgatcactctcacactaagactgaggaaataaaaaaggtttggtgttttcctagggagagagcatgccaggcagtggagttgcctaagcagacatccttgtgccagatttggcccctgaaagaagagatgccctcattcccaccaccaccccccctacccccagggactgggtactaccttactggcccttacaagagtggagggcagacacagatgttgtcagcatccttattcctgctccagatgcatctctgttcatgactgtgtgagctcctgtccttttcctggagaccctgtgtcgggctgttaaagagaatgagttaccaagaaggaatgacgtgcccctgcgaatcagggaccaacaggagagagctcttgagtgggctagtgactccccctgcagcctggtggagatggtgtgaggagcgaagagccctctgctctaggatttgggttgaaaaacagagagagaagtggggagttgccacaggagctaacacgctgggaggcagttgggggcgggtgaactttgtgtagccgaggccgcaccctccctcattccaggctcattcattttcatgctccattgccagactcttgctgggagcccgtccagaatgtcctcccaataaaactccatcctatgacgc

SEQ ID NO: 322533 - DNA, 5106 bp, Artificial Sequence
  derived and/or modified sequence
atgggcttcctgcccaagctgctgctgctggccagcttcttccccgccggccaggccagctggggcgtgagcagcccccaggacgtgcagggcgtgaagggcagctgcctgctgatcccctgcatcttcagcttccccgccgacgtggaggtgcccgacggcatcaccgccatctggtactacgactacagcggccagagacaggtggtgagccacagcgccgaccccaagctggtggaggccagattcagaggcagaaccgagttcatgggcaaccccgagcacagagtgtgcaacctgctgctgaaggacctgcagcccgaggacagcggcagctacaacttcagattcgagatcagcgaggtgaacagatggagcgacgtgaagggcaccctggtgaccgtgaccgaggagcccagagtgcccaccatcgccagccccgtggagctgctggagggcaccgaggtggacttcaactgcagcaccccctacgtgtgcctgcaggagcaggtgagactgcagtggcagggccaggaccccgccagaagcgtgaccttcaacagccagaagttcgagcccaccggcgtgggccacctggagaccctgcacatggccatgagctggcaggaccacggcagaatcctgagatgccagctgagcgtggccaaccacagagcccagagcgagatccacctgcaggtgaagtacgcccccaagggcgtgaagatcctgctgagccccagcggcagaaacatcctgcccggcgagctggtgaccctgacctgccaggtgaacagcagctaccccgccgtgagcagcatcaagtggctgaaggacggcgtgagactgcagaccaagaccggcgtgctgcacctgccccaggccgcctggagcgacgccggcgtgtacacctgccaggccgagaacggcgtgggcagcctggtgagcccccccatcagcctgcacatcttcatggccgaggtgcaggtgagccccgccggccccatcctggagaaccagaccgtgaccctggtgtgcaacacccccaacgaggcccccagcgacctgagatacagctggtacaagaaccacgtgctgctggaggacgcccacagccacaccctgagactgcacctggccaccagagccgacaccggcttctacttctgcgaggtgcagaacgtgcacggcagcgagagaagcggccccgtgagcgtggtggtgaaccacccccccctgacccccgtgctgaccgccttcctggagacccaggccggcctggtgggcatcctgcactgcagcgtggtgagcgagcccctggccaccctggtgctgagccacggcggccacatcctggccagcaccagcggcgacagcgaccacagccccagattcagcggcaccagcggccccaacagcctgagactggagatcagagacctggaggagaccgacagcggcgagtacaagtgcagcgccaccaacagcctgggcaacgccaccagcaccctggacttccacgccaacgccgccagactgctgatcagccccgccgccgaggtggtggagggccaggccgtgaccctgagctgcagaagcggcctgagccccacccccgacgccagattcagctggtacctgaacggcgccctgctgcacgagggccccggcagcagcctgctgctgcccgccgccagcagcaccgacgccggcagctaccactgcagagccagagacggccacagcgccagcggccccagcagccccgccgtgctgaccgtgctgtacccccccagacagcccaccttcaccaccagactggacctggacgccgccggcgccggcgccggcagaagaggcctgctgctgtgcagagtggacagcgacccccccgccagactgcagctgctgcacaaggacagagtggtggccaccagcctgcccagcggcggcggctgcagcacctgcggcggctgcagccccagaatgaaggtgaccaaggcccccaacctgctgagagtggagatccacaaccccctgctggaggaggagggcctgtacctgtgcgaggccagcaacgccctgggcaacgccagcaccagcgccaccttcaacggccaggccaccgtgctggccatcgcccccagccacaccctgcaggagggcaccgaggccaacctgacctgcaacgtgagcagagaggccgccggcagccccgccaacttcagctggttcagaaacggcgtgctgtgggcccagggccccctggagaccgtgaccctgctgcccgtggccagaaccgacgccgccctgtacgcctgcagaatcctgaccgaggccggcgcccagctgagcacccccgtgctgctgagcgtgctgtacccccccgacagacccaagctgagcgccctgctggacatgggccagggccacatggccctgttcatctgcaccgtggacagcagacccctggccctgctggccctgttccacggcgagcacctgctggccaccagcctgggcccccaggtgcccagccacggcagattccaggccaaggccgaggccaacagcctgaagctggaggtgagagagctgggcctgggcgacagcggcagctacagatgcgaggccaccaacgtgctgggcagcagcaacaccagcctgttcttccaggtgagaggcgcctgggtgcaggtgagccccagccccgagctgcaggagggccaggccgtggtgctgagctgccaggtgcacaccggcgtgcccgagggcaccagctacagatggtacagagacggccagcccctgcaggagagcaccagcgccaccctgagattcgccgccatcaccctgacccaggccggcgcctaccactgccaggcccaggcccccggcagcgccaccaccagcctggccgcccccatcagcctgcacgtgagctacgcccccagacacgtgaccctgaccaccctgatggacaccggccccggcagactgggcctgctgctgtgcagagtggacagcgacccccccgcccagctgagactgctgcacggcgacagactggtggccagcaccctgcagggcgtgggcggccccgagggcagcagccccagactgcacgtggccgtggcccccaacaccctgagactggagatccacggcgccatgctggaggacgagggcgtgtacatctgcgaggccagcaacaccctgggccaggccagcgccagcgccgacttcgacgcccaggccgtgaacgtgcaggtgtggcccggcgccaccgtgagagagggccagctggtgaacctgacctgcctggtgtggaccacccaccccgcccagctgacctacacctggtaccaggacggccagcagagactggacgcccacagcatccccctgcccaacgtgaccgtgagagacgccaccagctacagatgcggcgtgggcccccccggcagagcccccagactgagcagacccatcaccctggacgtgctgtacgcccccagaaacctgagactgacctacctgctggagagccacggcggccagctggccctggtgctgtgcaccgtggacagcagaccccccgcccagctggccctgagccacgccggcagactgctggccagcagcaccgccgccagcgtgcccaacaccctgagactggagctgagaggcccccagcccagagacgagggcttctacagctgcagcgccagaagccccctgggccaggccaacaccagcctggagctgagactggagggcgtgagagtgatcctggcccccgaggccgccgtgcccgagggcgcccccatcaccgtgacctgcgccgaccccgccgcccacgcccccaccctgtacacctggtaccacaacggcagatggctgcaggagggccccgccgccagcctgagcttcctggtggccaccagagcccacgccggcgcctacagctgccaggcccaggacgcccagggcaccagaagcagcagacccgccgccctgcaggtgctgtacgccccccaggacgccgtgctgagcagcttcagagacagcagagccagaagcatggccgtgatccagtgcaccgtggacagcgagccccccgccgagctggccctgagccacgacggcaaggtgctggccaccagcagcggcgtgcacagcctggccagcggcaccggccacgtgcaggtggccagaaacgccctgagactgcaggtgcaggacgtgcccgccggcgacgacacctacgtgtgcaccgcccagaacctgctgggcagcatcagcaccatcggcagactgcaggtggagggcgccagagtggtggccgagcccggcctggacgtgcccgagggcgccgccctgaacctgagctgcagactgctgggcggccccggccccgtgggcaacagcaccttcgcctggttctggaacgacagaagactgcacgccgagcccgtgcccaccctggccttcacccacgtggccagagcccaggccggcatgtaccactgcctggccgagctgcccaccggcgccgccgccagcgcccccgtgatgctgagagtgctgtacccccccaagacccccaccatgatggtgttcgtggagcccgagggcggcctgagaggcatcctggactgcagagtggacagcgagcccctggccagcctgaccctgcacctgggcagcagactggtggccagcagccagccccagggcgcccccgccgagccccacatccacgtgctggccagccccaacgccctgagagtggacatcgaggccctgagacccagcgaccagggcgagtacatctgcagcgccagcaacgtgctgggcagcgccagcaccagcacctacttcggcgtgagagccctgcacagactgcaccagttccagcagctgctgtgggtgctgggcctgctggtgggcctgctgctgctgctgctgggcctgggcgcctgctacacctggagcagcctgatcctgatgcagccccacgtgagaccccagcccgtgccccacccctgggccgaccagtggtgctgcctgcccagcggcggcgagagcggccagaacctgtag

SEQ ID NO: 322534 - DNA, 5106 bp, Artificial Sequence
  derived and/or modified sequence
atgggcttcttgcctaaattacttttgctcgctagcttctttcccgccggtcaagctagttggggagtttcaagcccccaggatgtccagggcgtaaagggttcctgcttgctcattccatgcatcttctcgtttccagcagatgtcgaggtgcctgacgggatcactgcaatatggtactacgactactcaggtcagcggcaggtcgtgtcccacagcgctgaccctaaacttgttgaagccagatttaggggacgcaccgagtttatgggcaaccctgagcacagggtgtgtaacttgctgttaaaggatttgcagcctgaagatagcggcagttataactttcggttcgaaataagtgaggtgaatagatggtctgatgtgaaggggaccttggtaaccgtgacagaggaacctcgcgtgccaacaatagcttctccagtggagctgctggaaggaacagaagtggattttaactgctcgacgccttatgtgtgcttacaggagcaagtacgtcttcagtggcagggtcaggatccagcgcgatccgtgacatttaactcacagaaattcgaacctacaggtgtcgggcatctcgaaacactgcacatggcaatgtcttggcaggatcatggaaggattttaaggtgccagttgtcagtcgctaatcatcgcgcccagtcggaaattcacctccaagtgaagtacgctccaaaaggagtcaagatactcctaagccccagcgggagaaacatcctgccaggagagctagtgaccctcacgtgtcaggtgaatagctcctatccagcagtttcaagtatcaaatggctgaaggatggagtacggctgcagaccaaaacaggtgtcctccacttgccacaagcagcctggtccgacgccggtgtgtacacttgccaagctgagaatggagttggctcccttgtgtctcccccaatttccctgcacatctttatggctgaggtgcaagtaagtccagccggccccatcctggagaaccagaccgtaaccctcgtgtgcaacacccccaacgaagccccgtcagacctacggtattcctggtacaagaaccatgtgctcttagaggacgcacactcccacaccctgcggctccacctcgctacacgagcagatacaggattttacttttgcgaggtgcagaacgtgcatggcagtgaacgaagcggacccgtatccgtggtggtgaatcacccccccctcaccccagtgctgaccgcttttctggaaacacaggccggtctggtcggtattctgcactgctcggttgtgtccgagcctttggcaactcttgtgctgagccacggcggacacattctggctagcaccagtggcgatagcgatcacagtcccaggttcagcggtacgtcaggtcctaactcactacggttggagatcagagatctggaagagacagatagcggcgagtataaatgctccgccactaactctctgggcaatgctacgtcaactcttgactttcacgcaaacgcggcccgtctactgatcagtccagccgcagaagttgtagaagggcaggctgttacactctcctgtcgttcagggctgagcccaacaccggatgcccggtttagctggtatctcaatggtgccctcctgcacgaaggccctggttcttccctgctcctgccagctgctagctcaactgacgcgggatcttaccactgtcgcgctcgggacgggcattccgccagtggccctagttctcccgccgtcctgacggtgctgtatcctccaagacagcccacatttactacgcggttggacctagacgcagcgggagccggagcaggtagaagaggcctgttgctgtgcagagttgatagtgatccaccagctcggctccagctccttcataaggatcgagttgtggctacctctctcccctccggtggtggttgctccacttgtggcggctgcagtcctcggatgaaggttactaaagctccaaacctgctcagggtagagattcataacccccttttagaggaggaaggcctctatttatgcgaagcctccaacgctctgggcaatgcgagtacgtcagctacattcaacggacaggccaccgtgttagccatagcaccaagtcacacactgcaggagggcaccgaggccaatctcacttgcaatgtgagccgagaagctgctgggagccccgctaacttttcctggttccgcaacggagtactttgggcacagggaccactggaaactgtgactcttctcccagtggccagaacagatgccgccctatatgcatgccgtatactgacagaggcaggggctcagctgagcacacccgtcttgctgagcgtcttgtatccaccagaccggcccaagttgagcgccctgctggacatggggcaaggccatatggccctctttatctgtactgttgactcaaggcctctggctctcctggcgttgttccacggcgagcacttattagctacctctctcggcccacaggtgccctcccatggccgcttccaggcaaaagccgaagccaactccttaaagctggaagttcgggaactgggattgggagatagtggcagttaccgatgtgaggctaccaatgtgctcggtagttctaataccagcctcttcttccaagttaggggcgcttgggtgcaggtgagtccatctcccgaactgcaggaaggccaggctgttgtgctcagctgccaggttcacacgggggtgccagagggcaccagctacagatggtatagagacggtcagcccctccaagaatccacctcagccacacttaggttcgcggcgataactcttactcaagccggtgcctaccactgtcaggcccaggcccccggatctgctacaacgtccctagctgcccctattagtctgcatgtttcatacgcccctaggcatgtgactctgaccactttgatggacaccggtcctggaaggctgggcctgttgctgtgtcgagtggattcagaccctccagcccagcttaggctgctccacggggatagacttgttgccagtacactacaaggagtgggaggaccagagggctccagtcctagactgcatgtggcagtggccccaaacaccctccgtcttgagatccatggggccatgttggaggatgagggagtgtatatttgtgaagccagtaacacactcggtcaggcttcagcgagcgccgatttcgatgcccaagcagtgaacgttcaggtgtggcctggtgctactgtccgtgaggggcagctggttaatctgacttgcctggtgtggaccacgcaccccgcacaactgacatacacctggtatcaggatgggcagcagagactggatgcacacagtatccccctgccgaacgttacggtcagagacgccaccagttatcggtgcggtgtgggcccaccggggagggctcctaggttatctcgacccataacgctcgacgtgctgtacgcccctagaaacctacgccttacttacctcctggaatctcatggtggtcagcttgctctcgtgttgtgcaccgtcgatagcaggccccccgctcagctggccctgtcccacgccgggcgtctgttagcttctagtaccgccgctagcgttcccaatacacttaggttagagcttagagggccccagcctagggacgaagggttttactcctgttccgctcgcagtcccctgggccaagctaacaccagcttggagctgcgccttgaaggcgtaagggtgatcctggcgccagaagcagctgtgcctgaaggggcaccgattaccgtgacctgtgctgacccagccgctcacgcacctaccctctatacgtggtatcataatggccgttggctgcaggaggggccagctgctagcttaagcttcctggtagctacacgtgcacatgcgggagcctacagttgccaggctcaggatgcacagggaactcgctcatcgaggccagctgcccttcaagtactgtacgcccctcaggatgctgtgctcagttcctttagagattcacgcgcccgatctatggctgtcattcagtgtaccgtagattctgagcctcccgccgagcttgcgttaagtcacgacgggaaggtgctcgctacgtctagcggcgtgcacagtctggcctccggcactggacatgtccaagtggccaggaacgctttgcgcctccaggtgcaagatgtgcctgccggggacgacacatacgtctgcacagcgcagaatttgctcggaagcatcagcactattggaagacttcaggtcgagggggcccgggtggtggcggaaccagggctggatgtgcccgaaggcgccgctttaaacctgtcctgtaggttactgggcggacctggcccagtggggaactcaacatttgcttggttctggaatgaccggcgtctgcacgcagagcctgtgccgacactggcttttacacatgtagcccgcgcccaggcaggcatgtaccactgtctagctgagttacccacaggtgctgcggcatccgcgccagtgatgctgcgcgttctctacccgccaaaaacacccaccatgatggtctttgtggaacccgaaggcggattgcggggaattctcgattgcagggtggacagcgaaccactcgccagtctgacactgcacctgggcagtcgactggtcgcctcatcccagccccaaggcgcaccggccgagcctcatatccacgtgctggcctctcccaatgccctccgggttgatatcgaggctctgcgcccctcggatcagggagaatacatttgcagcgccagtaacgtgttggggagtgcctcgacctccacgtacttcggggttagagccctgcataggctgcatcaatttcagcagctgctctgggtactcggcctcctggtggggctgctcttgcttctactaggcctgggagcttgttacacctggtcgtctctgatccttatgcagcctcacgtaagaccgcagcccgtgccccacccttgggcagatcagtggtgctgcctgcccagcgggggtgagtctggtcaaaacttgtag

SEQ ID NO: 322535 - DNA, 5106 bp, Artificial Sequence
  derived and/or modified sequence
atgggcttcctgcccaagctgctgctgctggccagcttcttccctgctggccaggcctcctggggcgtgagcagcccccaggatgtgcagggcgtgaagggcagctgcctgctgatcccctgcatcttctccttcccagcagatgtggaggtgcctgatggcatcacagccatctggtactatgactacagcggccagaggcaggtggtgagccacagcgctgaccccaagctggtggaggcccgcttccggggccgcacagagttcatgggcaaccctgagcaccgggtgtgcaacctgctgctgaaggacctgcagcctgaggacagcggcagctacaacttccgctttgagatcagcgaggtgaaccgctggagcgatgtgaagggcaccctggtgacagtgacagaggagccccgggtgcccaccatcgccagccctgtggagctgctggagggcacagaggtggacttcaactgcagcaccccctacgtgtgcctgcaggagcaggtgcggctgcagtggcagggccaggaccctgcccggtctgtgaccttcaacagccagaagtttgagcccaccggggtgggccacctggagaccctgcacatggccatgtcctggcaggaccacggccgcatcctgcgctgccagctgtctgtggccaaccaccgggcccagagcgagatccacctgcaggtgaagtatgcccccaagggcgtgaagatcctgctgagccccagcggcaggaacatcctgcccggggagctggtgaccctgacctgccaggtgaacagcagctacccagctgtgagcagcatcaagtggctgaaggatggagtgcggctgcagaccaagacaggagtgctgcacctgccccaggccgcctggagcgatgctggggtgtacacctgccaggccgagaatggagtgggcagcctggtgtccccacccatcagcctgcacatcttcatggccgaggtgcaggtgtccccagctggccccatcctggagaaccagacagtgaccctggtgtgcaacaccccaaatgaggcccccagcgacctgcgctacagctggtacaagaaccacgtgctgctggaggatgcccacagccacaccctgcggctgcacctggccaccagggctgacaccggcttctacttctgtgaggtgcagaatgtgcacggcagcgagaggagcggccctgtgtctgtggtggtgaaccacccccccctgacccctgtgctgacagccttcctggagacccaggccggcctggtgggcatcctgcactgcagcgtggtgtctgagcccctggccaccctggtgctgagccatggaggccacatcctggccagcaccagcggggacagcgaccacagcccccgcttcagcggcaccagcggccccaacagcctgcggctggagatccgggacctggaggagacagacagcggggagtacaagtgcagcgccaccaacagcctgggcaatgccaccagcaccctggacttccacgccaatgctgcccggctgctgatcagccctgctgctgaggtggtggagggccaggccgtgaccctgagctgccgcagcggcctgagccccaccccagatgcccgcttctcctggtacctgaatggagccctgctgcacgagggccctggcagcagcctgctgctgcctgctgccagcagcacagatgctggcagctaccactgccgggccagagatggccacagcgccagcggccccagcagccctgctgtgctgactgtgctgtacccaccccggcagcccaccttcaccacccggctggacctggatgctgctggggccggggccggccggcggggcctgctgctgtgccgggtggacagcgaccccccagcccggctgcagctgctgcacaaggacagagtggtggccaccagcctgcccagcggcggcggctgcagcacctgtggcggctgcagccccaggatgaaggtgaccaaggcccccaacctgctgcgggtggagatccacaaccccctgctggaggaggagggcctgtacctgtgtgaggccagcaatgccctgggcaatgccagcaccagcgccaccttcaacggccaggccaccgtgctggccatcgcccccagccacaccctgcaggagggcacagaggccaacctgacctgcaatgtgtcccgggaggccgccggcagccctgccaacttctcctggttcagaaatggagtgctgtgggcccagggccccctggagaccgtgaccctgctgcctgtggccaggacagatgctgccctgtatgcctgccgcatcctgacagaggccggggcccagctgagcacccctgtgctgctgtctgtgctgtaccccccagaccggcccaagctgagcgccctgctggacatgggccagggccacatggccctcttcatctgcaccgtggacagccggcccctggccctgctggccctcttccatggagagcacctgctggccaccagcctgggcccccaggtgcccagccacggccgcttccaggccaaggccgaggccaacagcctgaagctggaggtgcgggagctgggcctgggggacagcggcagctaccgctgtgaggccaccaacgtgctgggcagcagcaacaccagcctcttcttccaggtgcggggggcctgggtgcaggtgagccccagccctgagctgcaggagggccaggccgtggtgctgagctgccaggtgcacactggagtgcctgagggcaccagctaccgctggtacagagatggccagcccctgcaggagagcaccagcgccaccctgcgctttgctgccatcaccctgacccaggccggggcctaccactgccaggcccaggcccctggcagcgccaccaccagcctggccgcccccatcagcctgcacgtgtcctatgcccccaggcatgtgaccctgaccaccctgatggacaccggccctggccgcctgggcctgctgctgtgccgggtggacagcgaccccccagcccagctgcggctgctgcatggagaccggctggtggccagcaccctgcagggcgtgggcggccctgagggcagcagcccccggctgcacgtggccgtggcccccaacaccctgcggctggagatccatggagccatgctggaggatgaaggagtgtacatctgtgaggccagcaacaccctgggccaggccagcgccagcgctgactttgatgcccaggccgtgaatgtgcaggtgtggccaggggccaccgtgcgggagggccagctggtgaacctgacctgcctggtgtggaccacccacccagcccagctgacctacacctggtaccaggacggccagcagaggctggatgcccacagcatccccctgcccaacgtgacagtgagagatgccaccagctaccgctgtggggtgggccccccaggccgggccccccggctgagccggcccatcaccctggatgtgctgtatgcccccaggaacctgcggctgacctacctgctggagagccacggcggccagctggccctggtgctgtgcaccgtggacagccggcccccagcccagctggccctgagccacgccggccgcctgctggccagcagcacagctgcctctgtgcccaacaccctgcggctggagctgcggggcccccagcccagagatgagggcttctacagctgcagcgcccggagccccctgggccaggccaacaccagcctggagctgcggctggagggcgtgcgggtcatcctggcccctgaggccgctgtgcctgagggcgcccccatcaccgtgacctgtgccgaccctgctgcccacgcccccaccctgtacacctggtaccacaacggccgctggctgcaggagggccctgctgccagcctgtccttcctggtggccacccgggcccatgctggggcctacagctgccaggcccaggatgcccagggcaccaggagcagcaggcctgctgccctgcaggtgctgtatgccccccaggatgctgtgctgagcagcttccgggacagccgggcccgctccatggctgtgatccagtgcaccgtggacagcgagcccccagctgagctggccctgagccatgatggcaaggtgctggccaccagcagcggcgtgcacagcctggccagcggcactggacatgtgcaggtggccagaaatgccctgcggctgcaggtgcaggatgtgcctgctggagatgacacctacgtgtgcacagcccagaacctgctgggcagcatcagcaccatcggccgcctgcaggtggagggcgcccgggtggtggccgagcccggcctggatgtgcctgagggcgccgccctgaacctgagctgccgcctgctgggcggccctggccctgtgggcaacagcacctttgcctggttctggaatgaccggcggctgcacgccgagcctgtgcccaccctggccttcacccacgtggcccgggcccaggccggcatgtaccactgcctggccgagctgcccactggagctgctgccagcgcccctgtgatgctgcgggtgctgtacccacccaagacccccaccatgatggtgtttgtggagcctgagggcggcctgcggggcatcctggactgccgggtggacagcgagcccctggccagcctgaccctgcacctgggcagccggctggtggccagcagccagccccagggcgccccagctgagccccacatccacgtgctggccagccccaatgccctgcgggtggacatcgaggccctgcggcccagcgaccagggcgagtacatctgcagcgccagcaatgtgctgggcagcgccagcaccagcacctactttggagtgcgggccctgcaccggctgcaccagttccagcagctgctgtgggtgctgggcctgctggtgggcctgctgctgctgctgctgggcctgggcgcctgctacacctggagcagcctcatcctgatgcagccccacgtgcggccccagcctgtgccccacccctgggccgaccagtggtgctgcctgcccagcggcggggagagcggccagaacctgtag

SEQ ID NO: 322536 - DNA, 5106 bp, Artificial Sequence
  derived and/or modified sequence
atgggcttcctgcccaagctgctgctgctggccagcttcttccccgccggacaggcatcatggggagtctcgagtccgcaggacgtccaaggggttaaaggaagttgtctgttgatcccatgcatattctccttccccgcagacgtagaggtgccagatggtatcaccgcgatatggtactacgactacagtggccagcggcaagtggtatcgcactccgcggaccccaagttggtcgaagccagatttcggggccgcacagagttcatggggaatcctgaacacagggtttgcaatttactccttaaagatctgcaacccgaagacagcggatcttataactttcgtttcgagataagtgaggtgaaccgttggagcgacgtcaaaggaaccctggtgaccgtcaccgaggagcctcgagtccctacaattgcttcccccgttgagctcctcgagggaactgaggttgatttcaactgctcaaccccctatgtctgcttgcaagagcaggttcgtctgcagtggcaagggcaggatccagcgaggtctgtgaccttcaactcacagaagtttgagccgactggcgtggggcacctcgaaacattgcatatggccatgtcatggcaggaccatggccgcattctgaggtgccagctgagcgtcgctaaccacagggcccagagcgagatccacctccaggtcaagtatgcacccaaaggggtgaagatcctgctgtcaccgagcggaaggaacatattgccgggagaactcgtgactcttacttgccaggtcaactcttcctatcccgccgtgagcagcattaagtggctaaaagacggggtgcggctgcagactaagacgggcgtgctgcatctcccacaggccgcctggtcggacgccggagtgtacacctgccaggccgagaatggcgtggggtctttggtgtccccccccatctcactgcacatcttcatggcggaggtccaagtctctcccgccggaccgatccttgaaaaccagactgtgacccttgtatgtaatactcctaatgaggcaccatctgatttgagatacagctggtacaagaatcacgtccttctcgaagatgctcactcacatacgctacgtttacacctggccaccagagccgatacaggattttacttttgtgaagtgcagaatgtgcatggatctgaacggtccggccccgtaagcgtggttgtgaaccaccccccccttactcctgtgctcacggctttcctagagacccaagcaggattggtaggaattctgcactgtagcgtggtgtccgagcccctggcaaccctagtcttgtcacatggtgggcacatcctagcaagtacctctggagattctgaccattctcctcgattctcaggcacgagcggtccaaactcactccggttggaaattcgggacttagaagagaccgacagtggagaatacaaatgtagcgccacgaactctctcggtaatgccacttcaactctggacttccacgcgaacgctgcacgactacttatatcacccgccgccgaggttgtcgaaggccaggcagtaaccctgagttgcagatccgggctgagccccacgcccgacgctcgtttcagttggtacttaaatggggcactgctccatgagggccccggatcctcgctcctgctccccgcagcttcttccaccgacgctggaagttatcattgtagggcccgggacggacactccgcatctggcccttcttctccggcagtgctcacagttctgtatcccccaaggcagcctacctttaccacccgcctggacctagacgccgcaggagcgggcgctggccggcgaggcctactgttgtgtcgcgtggacagcgacccacccgctaggttgcagttgcttcataaagatagggtggtcgctacgagcctaccttcaggcggcgggtgttcaacctgcggcgggtgttcacccagaatgaaggtgactaaagccccaaatctgttaagagtagagatccacaaccctctcctcgaggaggaggggctctacctctgcgaagcttccaacgctctgggcaacgctagcaccagtgctacatttaacgggcaagcaactgtgctagcaattgctccttcgcacaccttgcaggagggcaccgaggcaaaccttacctgtaatgtatctcgcgaggcagccggctcgccagctaacttttcgtggttcaggaatggtgtgctctgggctcagggaccgttggagacagtgaccctgttgccagtggcacggaccgacgctgctctgtatgcctgtagaatccttactgaggctggcgcccagctatccacaccagtgctgctatcagtcctctatcctccggaccggcccaagctttccgcacttctcgacatgggccagggccacatggcccttttcatttgtaccgtggattctcgtcctctggccctgctggccctgtttcacggcgaacacctgcttgcgacctcccttggtccccaggtacccagtcacggaagattccaggctaaggcagaggcaaattcccttaagctggaggtacgcgaactgggattgggggattcggggtcctaccgttgcgaggctaccaatgtgttgggctcctctaacacaagcctgttctttcaagtgcgaggagcttgggttcaggtttcaccgagtccagagttacaggaagggcaggcagtggttctgtcatgtcaggtgcacacaggcgtccctgagggaacgagctacaggtggtacagggatgggcaacctttacaggagtcgacatctgccaccctgcgcttcgccgcgatcactctgacacaggccggcgcttaccactgtcaggcccaggctcccgggagcgcaaccacgagtctcgcagctcctatctcgctccacgtcagttatgccccaaggcacgtgaccctgacaaccctgatggataccggacctggcaggcttggcctactgttgtgtcgagtggactctgaccctccagcccagctgaggttgctacacggagaccgcctagtagcaagcaccctgcagggggttggagggcccgagggatcgtctcctcggttgcacgtagccgtagcccctaataccctgcgtttggaaattcacggggccatgctcgaggacgaaggagtctacatctgtgaagcctcaaacacattgggccaggcttcggcatctgccgatttcgatgcccaagccgtgaacgtgcaagtgtggccgggagccactgtaagagaaggacagctggtgaatctgacctgtctcgtctggacgacacatcctgcccagcttacctacacctggtatcaggatgggcaacagcgattggacgcacattccatccccctgcctaacgtgactgtccgcgacgccacatcttataggtgcggtgtggggccgcccggtcgtgccccccgcctgtcccggcctatcacacttgacgtgctgtatgcccccaggaatctgaggcttacctatctcctggagtcacatggtggtcagttggccctggtcctttgtaccgttgattctaggccacccgcacaattagcactctcacatgccgggaggctgcttgcatcttccacagcggcatcagtgcccaacacactgcgcttggaactgcgagggccacagccccgtgatgagggtttttacagctgttccgcccgatcacccctgggccaggccaacacatccttggaactgcgcttagagggcgtgcgggttatcctggcccctgaggccgccgtcccagaaggagctcctattacagtgacttgcgcagatccagcggcgcacgcccccacattgtacacatggtatcacaatggccgctggcttcaggagggcccagctgccagcctgtcctttctggttgccactagggctcatgccggcgcttactcttgtcaagcccaagatgctcagggtacccggtcttctagaccagctgcactccaggtcttgtatgccccccaggacgccgtcctctcaagcttccgggattcaagagcacggtcaatggcggttatacagtgcacagtggactcagagcctcccgctgaactggccctgagccatgacggtaaagtattagccacctcgtccggtgttcattccctggcaagcggaactggacacgttcaggtggctagaaatgcccttcgcttacaagtgcaggacgttcctgcaggcgacgatacgtacgtgtgcaccgcccaaaacctgttgggctctattagtacgataggacgcctgcaggtggagggggcacgcgtagtcgccgagcctgggttggatgtacctgagggggctgcactcaatctgagctgcagactgttgggaggtccaggacccgttggcaactctactttcgcatggttttggaatgacaggcggctgcatgcagaaccggtgccaaccctcgccttcacccacgttgcacgagctcaggctgggatgtatcattgtctggctgaactgccaaccggggcagctgccagtgcgcctgtgatgcttagagtgctgtaccccccaaagacccctacaatgatggtgtttgtagagccagaaggaggcctgagaggcattttagactgcagggtggatagtgaaccactggcgagcttaaccctccacctgggatctcgtttggtggcctcgtcacagcctcaaggagcccctgcagagccccacatccacgtcctggcctctcccaatgccctcagggtagatatcgaagccctgcgtccttccgaccagggtgaatacatctgtagtgctagcaacgtgctcggttccgcttcgactagcacttacttcggagttagagctcttcatcgactgcaccaatttcagcagctgctttgggtgctcggtttactggtcggactactgctgctgttgcttggcctgggcgcatgctacacctggagttctctcatactgatgcagcctcacgtcagaccccaaccagtgccgcatccgtgggccgaccagtggtgttgtctccccagcggtggagaaagcggccaaaacctgtag

SEQ ID NO: 322537 - RNA, 5106 nt, Artificial Sequence
  derived and/or modified sequence
augggguuucugcccaagcuccuucugcuggcgaguuuuuuccccgccggucaggcaucauggggugugucaaguccucaggaugugcaggguguaaaaggcaguugcuugcugauaccuuguauuuucaguuuuccugccgacguugaagucccugacgggauuaccgcaauaugguauuacgacuauagcggccaacgacagguggugagccauuccgcugaucccaaacugguugaggcgcgauuccggggucggaccgaauuuaugggaaauccugagcaucgugugugcaauuugcuccucaaagaccuccagccagaagacagcggcagcuacaacuuccguuucgagaucucggaagugaaccguuggucugacgugaagggcacccucguuacggucacagaagagccccgcgugcccaccaucgcuucccccgucgagcuccuggaaggcaccgagguagacuuuaauugcagcacaccuuaugucugccugcaggaacagguucggcugcaguggcagggacaggauccagcaagaagcgugacauuuaauucacagaaauucgagccuaccggcguggggcaccuggaaacccuacacauggcuaugucuuggcaggaccauggacgcauucugcgcugucaacuaaguguggcaaaccauagagcacaguccgaaauccaucuccaggugaaauacgcacccaaagguguuaaaauccugcugucccccucggggcgaaauauccugcccggagaauugguaacacuaaccugccaaguuaacagcucuuaucccgcuguaagcucaaucaaaugguugaaggauggaguucgccugcaaacaaagaccggaguccuacauuugccucaggcagccuggagcgaugccggaguuuacaccugccaagcugaaaacgguguagguucacuggugucucccccaaucucccugcauaucuuuauggccgaaguucaagucucccccgccggaccuauccucgagaaucagacagucacccucguauguaauaccccgaacgaggcaccuuccgaccuccguuacagcugguacaaaaaucacgugcuguuagaggacgcacauagucauacccuccggcugcaccucgccacccgcgccgauacaggguuuuauuuuugcgaaguccagaacguacacgggagugaaagaagcggacccguaucuguaguggugaaccaccccccucugacuccagugcugacugccuuucuugaaacccaggcuggccuggugggcauccuccacugcuccguaguaucggagccgcuggcuacgcuggugcugagucauggaggccacauucucgccuccacuagcggagauuccgaucauaguccuagauuuuccgggacuuccggcccaaauucucucagauuggaaauucgcgaucuggaggagaccgacagcggugaauacaaaugcagcgccaccaacagccuaggcaacgcuacuaguacacuggacuuucaugcuaacgccgcucggcuccugaucucuccagccgcagaggugguugaagggcaagcggugacccuuuccugcagauccgggcugucuccuacgccggacgcaagguucuccugguaccugaauggcgcuuuguuacacgagggucccggauccucacugcugcugccugccgccagcucaaccgacgccggcuccuaccauuguagggcccgcgauggucauucugcuucaggcccaagcucuccggccguccugacaguacucuacccgccccggcaaccuacuuuuacaacucgguuagaucuagaugcugcuggggcaggcgccgggaggcgagguuugcuccugugcagaguugauagcgaccccccugcgcgcuugcaacugcuccacaaggaucgcgugguggccacuaguuugccuaguggcggcggcugcuccacuugcggcggcuguagcccacggaugaaggucacaaaagcccccaaucucuugcgggucgagauacacaauccucuacucgaagaagaaggguuauaucugugugaggcuuccaaugcccugggaaaugcaucuacuagugccacauucaauggacaagcuacgguucuggcaauugcccccucucacacccugcaagagggaacggaggccaaucuaaccuguaaugugucucgcgaggcagcagggucccccgccaauuuuuccugguuuagaaacggcguccugugggcacagggaccacuggaaacgguuacucuucuucccgucgccagaacugaugccgcucuuuacgccugcagaauccugacagaagcaggcgcccaacucucuaccccugucuuguugucagucuuguauccgccugacaggccuaagcuguccgcccugcuggauauggggcaagggcacauggcuuuauuuauauguacugucgacagcagaccgcuggcccucuuagcgcuguuccauggagaacaccuucucgcaaccucucugggcccacagguaccuucucacggcagguuucaggccaaagcugaagcaaacagccugaaacuggaagugagggaauuggggcuaggugauuccggcuccuaccgaugcgaagcaaccaaugugcugggcagcaguaauaccagccucuucuuccagguucguggagcaugggugcaaguuucucccucaccagaacugcaggagggucaggccgucguucugagcugccaagugcauaccggcgugccagaggguacaaguuaucggugguaccgggacggacaaccucuccaggagaguacaagugccacgcuucgguucgccgcgaucacacugacacaagcaggcgcuuaucauugccaggcacaggccccugguagugcaaccacuagcuuagccgcccccaucuccuugcauguauccuacgcuccucgccaugugacccucacuacucucauggauacugggcccgggcggcuaggauugcuucugugccgcgucgacucagacccaccugcucagcuucgguugcuccacggagaccggcucguggcaucuacacugcagggugucggaggccccgagggaaguucuccaagacugcaugucgcugucgcuccaaauacuuugcgucuggaaauccacggugcuauguuggaagaugaagggguauauauuugugaggccaguaacacccuggggcaggccagcgcuucagcugauuuugaugcccaagcaguuaacguucaagucuggccaggugccacugucagagaaggucagcuuguaaacuugaccuguuugguguggaccacucaccccgcucaguugacuuacacaugguaucaggacgggcagcaaagguuggaugcccauaguauaccauugccaaacgugacaguucgcgaugcuacuagcuauaggugcggagugggcccuccugggcgggccccacgccugagccggccgauuacucucgaugugcuauacgcgcccagaaacuugcgacucacauaucuccucgagucgcacggaggacagcucgcucugguccuguguacuguggacucgcggccuccugcucagcuggcacugagucacgccgggcgucuguuagcuucuuccacggcggccucugugccuaacacccugagacucgagcugcgcgggccacagccccgagacgagggauucuacucgugcagugcucggucuccgcugggucaggccaacacgaguuuggagcugcgccuggagggaguuagaguaauccuugccccagaagcagcugucccugaaggggccccuauuacugucacuugugccgacccugcagcccacgcgccgacccucuauacaugguaccauaacggucgcuggcuccaggagggaccugcugccucuuugucuuuucucguugccaccagggcucacgccggcgccuauucuugccaggcccaagacgcccaaggaaccagaucuagccggccagccgcccuucaggugcucuaugcgccccaggaugccguucuuucaucauuuagggauagucgagcccgaucaauggccgucauucaauguacagucgauucagagccaccagcugaacuggcacugagucacgacgggaaaguccuggccacaucgagugggguccacagccuggccagcgggacaggacauguacagguagcuagaaacgcgcugagguugcagguccaagacgugccugccggagaugacaccuacgugugcacugcgcagaauuuacucgguuccaucucaacuauaggccgucugcagguggagggcgcacgagugguggccgagcccgggcuggaugugccagagggagcugcgcuuaaccugaguuguaggcuguugggugguccagguccuguggguaacuccaccuuugcaugguucuggaacgaccggcggcuccacgccgagcccgugccaaccuuggccuucacccacguugcccgggcucaagcaggcauguaccauugcuuggccgaauugccgacaggggcagccgcaagcgccccagugaugcugagaguucucuauccuccuaagacgccaacuaugaugguguuuguggagcccgaaggcggacugagggguauuuuggacugcaggguggacucagagccacuggcuucccucacacugcacuugggcagucgauuaguggccucaucgcaaccucagggagcucccgccgagccccacauccaugugcuggccagcccaaaugcacugcgggucgacauagaggccuuacgaccuagugaccagggcgaguacauuugcuccgcuagcaacgugcugggcagcgcuuccaccucaacauauuucggcguucgagcucuccaccguuugcaccaauuucaacagcuucucugggugcuaggguugcucguuggccugcugcuguugcuacuggggcucggagccuguuacaccuggagcagcuugauucugaugcaaccgcauguccgcccucaaccuguuccucacccaugggccgaucaauggugcugccugccaucugguggugaaucgggacagaauuuauag

SEQ ID NO: 322538 - RNA, 5106 nt, Artificial Sequence
  derived and/or modified sequence
augggcuuucuuccaaagcucuuacugcuggccuccuuuuuuccagccggccaggccaguuggggcguuagcuccccccaggacguucaaggcgugaaggguucuugucuccuaauucccuguaucuuuucauucccagcagacgucgaggugccugacgguauaacugccauaugguacuacgauuacagcggacagcgccaaguggugucucacagugcggacccaaaacucguggaagcucguuuucgcggaaggacugaguuuauggggaauccugagcaccgcgucuguaaccugcuccugaaagaucuccaaccugaggauagcgguagcuacaacuuccguuucgaaaucuccgaggugaaccgcuggucagaugugaaggguacccuugucacagugacagaagaaccccgagugcccacuauagcuagcccuguggaacuuuuggaagguacugagguugauuuuaauugcuccaccccauacgucugucuucaagagcaaguccgccuccaguggcagggccaggacccagcgcguucuguuacuuuuaauagucagaaguuugaacccacgggcgucggucaucuugagacccuacacauggcuaugucuuggcaggaccauggacgcauucugcgcugucaacuaaguguggcaaaccauagagcacaguccgaaauccaucuccaggugaaauacgcacccaaagguguuaaaauccugcugucccccucggggcgaaauauccugcccggagaauugguaacacuaaccugccaaguuaacagcucuuaucccgcuguaagcucaaucaaaugguugaaggauggaguucgccugcaaacaaagaccggaguccuacauuugccucaggcagccuggagcgaugccggaguuuacaccugccaagcugaaaacgguguagguucacuggugucucccccaaucucccugcauaucuuuauggccgaaguucaagucucccccgccggaccuauccucgagaaucagacagucacccucguauguaauaccccgaacgaggcaccuuccgaccuccguuacagcugguacaaaaaucacgugcuguuagaggacgcacauagucauacccuccggcugcaccucgccacccgcgccgauacaggguuuuauuuuugcgaaguccagaacguacacgggagugaaagaucugguccaguuagugucguaguuaaccauccgccacugacacccgugcugacagcauuuuuggagacgcaggccggccugguuggaauuuuacacuguagugugguaagugagccccuggcuacauuaguguuaucacacggagggcacauccuggcuagcacuucaggagacucugaccauucuccacgauuuucaggcacaucuggcccaaacucacuccgccuugaaaucagagaccucgaggagacugacagcggcgaguauaagugcagcgcaaccaacucuuuagggaaugcaacuuccacgcuugauuuccacgccaaugccgcccgacuguugauuucgccagccgccgaggucgucgaaggccaagccgucacacuuucuugcaggucaggacuuagccccaccccagacgcaagguucucaugguaccuaaacggugcccuccuccacgaaggcccugguucaucgcuacugcugccagccgccucaucaacggaugccggcuccuaccacuguagagcuagagacgggcacagugccucagguccaagcucccccgccguucugacugugcucuauccuccccgccagccuacuuuuacgaccagacuggaccucgaugcugccggugcaggagccggucgacgcggccuguugcugugcagagucgauagugauccaccugcccgguugcaacugcugcauaaggaucgggucguugcuacaagccugccguccgguggcggauguucuacuugugggggauguuccccgaggaugaagguaaccaaggccccaaaccuccugagagucgaaauccauaacccauugcuugaggaagagggauuguaucugugcgaagcuucuaaugcuuuggguaacgcuucaacuucugcuacauucaauggccaagcuacaguccucgcuauugccccaucucauacacugcaggagggcaccgaggccaaucuuacauguaaugucagccgggaggccgccggcucaccugcgaacuucucaugguuucguaacggagugcuuugggcucagggaccacucgagacugucacucugcugccuguugcuagaacugacgcagcccuguacgcuugcagaauccucacugaggcaggagcucagcuguccaccccaguucugcugaguguguuguacccaccagaucgaccgaagcuaucagcacugcuugauauggggcagggacauauggcucuuuuuauuugcaccguugacagcagaccccucgcucucuuagcucuuuuccauggugaacauuuacuggcuacaucucuuggaccgcaagucccuucccacggucgauuccaggcaaaggcugaagcuaauagccuuaaguuggaagugcgggaacuggggcugggagauuccggguccuaccggugcgaagcaacaaauguacugggaagcagcaacacaagucuuuucuuccagguccguggggccugggugcaggucucgcccagccccgaguuacaagaagggcaagccguugucuugagcugccagguccauacaggggucccagaaggcacuuccuacaggugguaucgggauggacagccccuucaagaauccaccucggcaaccuugagauuugccgccaucacgcugacccaggcgggagcuuaucauugucaggcccaagcaccaggcucugcaacuacaagccuugccgcuccuaucagccuccacguguccuaugcuccucgccacgugacccuaacaacuuugauggauacagguccuggaagauugggacugcuacucugccgcguggauagugacccucccgcacagcugcgauuguugcacggagauagguugguugcuuccacacuucaaggggucggagguccggagggguccagcccaagacuacauguggcugucgcuccuaauacuuuaaggcucgagauccacggcgccaugcuggaggacgagggcguguauauuugcgaagcuucuaacaccuuaggacaggcaucagccucagcugacuuugaugcacaggcugucaauguucaaguauggcccggcgcaacagugcgagaaggucagcuugugaacuuaacgugucuuguguggaccacacauccugcucagcucaccuauacuugguaccaagauggucaacagagauuggacgcccauucaauuccucuucccaacguaacuguccgagaugccacaagcuauagaugcggaguugggccgccagggcgggcccccaggcugagcagacccaucacccuagacguacuuuaugcuccccguaaccucaggcuaacuuaucuacuggagagccauggcggacagcuagcccugguccugugcacugucgacagccgcccucccgcccaguuggcccugucccacgccggccgccuucucgccaguucgaccgccgccucagucccuaacacacuucgguuggaacuacgcggaccccaacccagggaugagggguucuauuccugcucugcacguucaccucuuggucaagcuaacaccucgcuagagcuacgucuggaaggugucagggugauacucgcucccgaagcagcagucccugagggugcccccauuacagucacuugcgccgacccagccgcacaugcuccaacccuguauaccugguaccacaacggcagauggcugcaggaaggaccugcagcguccuuaucuuuuuuagucgcaacucgcgcacacgccggagcuuauucgugucaggcgcaagaugcccaggguacucguucaucuaggcccgccgcacuccaggugcuuuaugcuccacaagaugcuguucucaguucauuccgcgacucacgugccagauccauggcaguuauccaguguaccguggauucugaacccccagcugaacucgcacucucacaugacggaaagguccuagcaacuaguucugggguccacucccuugccucgggcacgggacaugugcaaguagcccggaaugcuuugcgccugcaaguucaggacgucccugcuggcgaugacacuuaugucugcacugcacaaaaccugcuugguuccauuucaacuauuggacgcuuacaggucgagggagcacgggugguugccgaaccuggccuggauguccccgagggcgccgcgcugaauuugagcugcaggcugcugggaggucccgguccagucggaaacucuacauuugccugguuuuggaacgacagacggcugcaugcugagcccgugcccacacuagcuuuuacccauguggcgcgggcacaggcuggaauguaccacuguuuggccgaacucccgacuggcgcagccgcuuccgcccccgugaugcugagagugcuauacccuccaaaaacuccaaccaugaugguguucguggaaccugaaggcggccucagggggauucuggacugccgcgucgacucagagcccuuggccucacuuacguugcaccuuggaagucgccuggucgccuccagccagccucaaggagcucccgcagagccacacauccauguccuagccuccccgaaugcacucagagucgacaucgaggccuuacgaccuagugaccagggcgaguacauuugcuccgcuagcaacgugcugggcagcgcuuccaccucaacauauuucggcguucgagcucuccaccguuugcaccaauuucaacagcuucucugggugcuaggguugcucguuggccugcugcuguugcuacuggggcucggagccuguuacaccuggagcagcuugauucugaugcaaccgcauguccgcccucaaccuguuccucacccaugggccgaucaauggugcugccugccaucugguggugaaucgggacagaaucuauag

SEQ ID NO: 322539 - DNA, 1392 bp, Artificial Sequence
  derived and/or modified sequence
taactagccctggtgctctgtacggtggattcacggccaccagctcagcttgctctgtcccatgccggaagactgttagcatcatctacggccgcttcagtcccaaatacactgagactggagctgcgcggtccacagcccagggatgagggtttttatagctgtagtgctagaagtcctttgggccaggccaacaccagtctggaactgcggctagaaggggtgagagtgatcctcgcaccagaagctgccgtgccagaaggcgcacctataacagtgacctgcgccgaccccgctgcacatgctccgactttgtacacttggtatcacaacggaaggtggcttcaggagggaccagccgcttccctgtcattcttggtggcgaccagagcgcacgcgggtgcatacagctgtcaggcacaggacgctcaaggcactagatcctccaggcccgcagcgctgcaagtattgtatgccccacaggacgctgtgctgagttcctttcgcgattcgcgcgctcgcagcatggccgtgattcagtgcacagtggatagcgagccgccagccgagttggctctgtcgcacgatggaaaggtgttagcgacctcctccggagtacactccctggcctcgggaactggccacgtacaagtggcacggaacgccctgcgcctgcaggtccaggacgtgccagccggagatgacacttatgtttgcacagcccagaacctgcttggcagtataagcaccatcggcagactacaggtcgagggggcaagggtggtggcagaacctggcctggatgtgcccgagggggcagctcttaacctgtcgtgtcgattacttggagggccaggccctgtgggcaacagtacattcgcttggttctggaatgatcggcgactgcatgccgagcctgtgcctactttggcttttacacatgtagcacgcgctcaagcaggcatgtatcattgtctcgctgagttgccgacaggcgcagcagccagcgcccctgtgatgctacgggtgctctatcctcccaaaacaccaaccatgatggtttttgtggaaccagaaggcggtctccggggtatactggattgccgagtcgactctgagcccctagcgtctctgacacttcacttggggagtcgcctggttgctagtagccagccccaaggggcacccgcagaaccccacatccatgttctggctagccccaacgccttgagagtcgatatcgaggccctccggccaagtgaccaaggagagtatatttgctctgccagtaacgtgctggggtctgcgagtacatctacttatttcggtgtgagaggagaaggaagaggtttgcatctgccgggacacagcgcacagaaaccctccagttag

SEQ ID NO: 322540 - DNA, 4326 bp, Artificial Sequence
  derived and/or modified sequence
gctggccctggtactgtgcactgtggacagccgcccgcccgcccagctggccctcagccacgccggtcgcctcttggcctcctcgacagcagcctctgtccccaacaccctgcgcctggagctgcgagggccacagcccagggatgagggtttctacagctgctctgcccgcagccctctgggccaggccaacacgtccctggagctgcggctggagggtgtgcgggtgatcctggctccggaggctgccgtgcctgaaggtgcccccatcacagtgacctgtgcggaccctgctgcccacgcacccacactctatacttggtaccacaacggtcgttggctgcaggagggtccagctgcctcactctcattcctggtggccacgcgggctcatgcaggcgcctactcttgccaggcccaggatgcccagggcacccgcagctcccgtcctgctgccctgcaagtcctctatgcccctcaggacgctgtcctgtcctccttccgggactccagggccagatccatggctgtgatacagtgcactgtggacagtgagccacctgctgagctggccctatctcatgatggcaaggtgctggccacgagcagcggggtccacagcttggcatcagggacaggccatgtccaggtggcccgaaacgccctacggctgcaggtgcaagatgtgcctgcaggtgatgacacctatgtttgcacagcccaaaacttgctgggctcaatcagcaccatcgggcggttgcaggtagaaggtgcacgcgtggtggcagagcctggcctggacgtgcctgagggcgctgccctgaacctcagctgccgcctcctgggtggccctgggcctgtgggcaactccacctttgcatggttctggaatgaccggcggctgcacgcggagcctgtgcccactctcgccttcacccacgtggctcgtgctcaagctgggatgtaccactgcctggctgagctccccactggggctgctgcctctgctccagtcatgctccgtgtgctctaccctcccaagacgcccaccatgatggtcttcgtggagcctgagggtggcctccggggcatcctggattgccgagtggacagcgagccgctcgccagcctgactctccaccttggcagtcgactggtggcctccagtcagccccagggtgctcctgcagagccacacatccatgtcctggcttcccccaatgccctgagggtggacatcgaggcgctgaggcccagcgaccaaggggaatacatctgttctgcctcaaatgtcctgggctctgcctctacctccacctactttggggtcagaggtgaggggagggggctccatctcccaggccactctgcacaaaagcccagctcttaggcccaaaggcttccttccctgtatccctcctgctgcagcatgatttgcctgtcgactctaaactgattgctcggggcacccttgtgtggagagcttcagcgataaagcaaaagttagaaggtgtcatcttgggtgggtccccttggaaggaagcactgggggcctgcagctgtggctgctctgagtcccgctctgtgttccagccctgcaccgcctgcatcagttccagcagctgctctgggtcctgggactgctggtgggcctcctgctcctgctgttgggcctgggggcctgctacacctggaggtgggtctggagctgggagtgggccagaagattggggtaaggcagcccacctcgtcttctccccaaattcccccaggtcctttaggacctcctattaagttcacaggctgcctacttcccagactgcccctccaaattggaaatcccttctagaattgtccctaaatcctccttgctgtagtttccttctttcctcctctctgccctggctgtgctaaagcaagggctagggaggaagacagaggaagcacccactctccatgaggttcccacgctcttgtggtctggagccagcctgtggggagcgggagaggaatgggggcaggaggtggggaggggagaggctctctgagtccactccgggccttgcagaaggaggcgtgtttgtaagcagagcatgggcgagaattcggtggagatggcttttcagaaagagaccacgcaggtatccattcaacacacacgggcagatataatacccagctaacccacagtgccaactggcatctggagactgctgtcatttagaggatggtgcctgggaccaaggggaggttggggagagtgtgcagggaaccaggagcccctcaggagataggagagccctgttctgctcggggcagagggaatccctgtgtcagctggcggctggcttagaggactaggggagactttctggacttggcagcatcccctccatttccaagacacgtatgttctgactcccccacctttgttctgaggcctcttccccactcccaagcctgcccgtcacctgggcagaagtgaaagtcagtttctcctcccctgtggtgtgtcccttctgcagctgattcacctggtaggccagggctccaagtcacacttccagccatgcacactcccaccaatcctcttgggaccccacctgaggctgggggcctgggggcctgccctggctcccagaggcctcctgtgaccagggttttctctgtgggaagctcattgatcctgatgcagccacatgtgagacctcaacctgtgccccacccctgggctgaccagtggtgttgcctgccctccggaggagaaagtggccagaatctgtgatgactccagcctatgaatgtgaatgaggcagtgttgagtcctgcccgcctctacgaaaacagctctgtgacatctgactttttatgacctggccccaagcctcttgcccccccaaaaatgggtggtgagaggtctgcccaggagggtgttgaccctggaggacactgaagagcactgagctgatctcgctctctcttctctggatctcctcccttctctccatttctccctcaaaggaagccctgccctttcacatccttctcctcgaaagtcaccctggactttggttggattgcagcatcctgcatcctcagaggctcaccaaggcattctgtattcaacagagtatcagtcagcctgctctaacaagagaccaaatacagtgacttcaacatgatagaattttatttttctctcccacgctagtctggctgttacgatggtttatgatgttggggctcaggatccttctatcttccttttctctatccctaaaatgatgcctttgattgtgaggctcaccatggccccgctttgtccacatgccctccagccagaagaaggaagagtggaggtagaagcacacccatgcccatggtggacgcaactcagaagctgcacaggacttttccactcacttcccattggctggagtattgtcacatggctactgcaagctacaagggagactgggaaatgtagtttttattttgagtccagaggacatttggaattggacttccaaaggactcccaactgtgagctcatccctgagacttttgacattgttgggaatgccaccagcaggccatgttttgtctcagtgcccatctactgagggccagggtgtgcccctggccattctggttgtgggcttcctggaagaggtgatcactctcacactaagactgaggaaataaaaaaggtttggtgttttcctagggagagagcatgccaggcagtggagttgcctaagcagacatccttgtgccagatttggcccctgaaagaagagatgccctcattcccaccaccaccccccctacccccagggactgggtactaccttactggcccttacaagagtggagggcagacacagatgttgtcagcatccttattcctgctccagatgcatctctgttcatgactgtgtgagctcctgtccttttcctggagaccctgtgtcgggctgttaaagagaatgagttaccaagaaggaatgacgtgcccctgcgaatcagggaccaacaggagagagctcttgagtgggctagtgactccccctgcagcctggtggagatggtgtgaggagcgaagagccctctgctctaggatttgggttgaaaaacagagagagaagtggggagttgccacaggagctaacacgctgggaggcagttgggggcgggtgaactttgtgtagccgaggccgcaccctccctcattccaggctcattcattttcatgctccattgccagactcttgctgggagcccgtccagaatgtcctcccaataaaactccatcctatgacgcaa

SEQ ID NO: 322541 - DNA, 1392 bp, Artificial Sequence
  derived and/or modified sequence
tgactggcactggtcctgtgcactgttgacagccggcctcccgcccagctagctctgtcccacgctggtaggttgctcgcgtctagcaccgcagccagcgtgcctaatactctgcgtttagaattacgagggcctcagccccgcgatgaaggattttactcatgctccgcccgttctccactgggccaagccaacacttctctcgagcttcggcttgagggcgttagggtcatcttagccccagaggccgccgtgcccgaaggggctcctataaccgtgacatgcgcagatcccgctgcccacgccccaactctctacacgtggtatcacaatgggcggtggctccaggaggggcctgctgcttccctatcattccttgtggctaccagggctcacgcgggagcatactcctgccaggcacaggatgcacaaggtaccagaagttcaagaccagctgcactccaggttttatacgccccccaagacgcggtgctcagctccttcagggattcccgcgcccgcagtatggccgtgatccagtgtaccgtggactcagagcctcccgccgagcttgctctaagtcatgatggcaaagtgttagcaacatcctccggcgtgcacagccttgcttcagggacaggtcatgtacaggtcgccagaaacgcactgcggctacaagtgcaggacgtacctgcaggcgacgatacctacgtatgtacggcccaaaaccttctcggttcaatctccacaattggtagactacaggttgagggcgcacgcgtggttgctgagccagggctggacgttcctgaaggcgctgcacttaacctgagctgtcgactgctcggtggcccaggacccgttgggaactccacattcgcgtggttctggaacgaccgccggctgcacgccgagcctgtacccaccttagctttcacccatgtcgcaagagcgcaggccggaatgtatcactgtctcgccgagctgccgaccggcgcagcagcatcagctcccgtaatgttgagggtcctgtatcccccaaaaacgcctacaatgatggtgtttgtggaacctgaagggggcctcagaggaatactggattgccgggtggacagcgaacctctcgctagcctgacgctacatctgggtagcagactggtggcttcatctcagccccagggagcccctgccgagccgcacattcatgttctggcaagccctaatgcactcagggttgacattgaggcactgaggccttctgatcagggcgaatacatttgttccgcgtctaacgtacttggttccgcctccacctcgacctactttggcgtcaggggagagggacgcgggctccacttaccggggcactccgcgcagaaaccatcatcctag

SEQ ID NO: 322542 - DNA, 1392 bp, Artificial Sequence
  derived and/or modified sequence
tagcttgctttggtgctgtgcaccgttgattcaagaccccccgctcaattagctctgtcccacgctggccgcctgctcgccagctcaactgccgcctcagtccctaatacacttagactagaactccgcggcccacaacccagagacgagggcttttattcttgctctgccaggtcacctctgggtcaagcaaacacttctctagaactgcgtctcgagggcgtcagagtgatcttggccccggaagccgcagtcccggaaggagccccgattacagtgacttgcgctgaccccgccgcacacgcacctactttgtatacttggtaccataacggccgctggttgcaggaaggccccgccgcctctctaagttttctggtcgcgactcgggcacacgccggagcttattcctgtcaggctcaggacgctcaaggtacacgctcgagcagacccgctgcccttcaggtgctctatgccccccaagacgctgtactttcctcattcagggattcccgggctcgctccatggcagtcatccaatgtacggttgattcagaaccccctgccgagttagcactcagccatgacggaaaagtgctggctacctcctcgggcgttcactcattagcttccggaactggccacgtacaagtagctcggaatgcactccggttgcaggtccaggacgtacccgccggagacgatacttatgtctgtacagctcagaatcttctcggctccatttcgacgattggcagattacaggtagaaggcgcgagagtcgttgccgagccgggcctcgatgtccccgaaggggccgcgctaaatctttcttgccgtctgttaggcgggccgggtccagtcggcaactccacattcgcatggttttggaacgatcgccgcctccatgcggaacccgtacctacacttgctttcacacacgtggctagagcccaggctggaatgtaccactgtctcgcagagcttcccacaggcgctgctgcttctgctcccgtcatgctcagggtgctttatcctcccaaaacgcctacgatgatggtgttcgtggagcctgaaggcggacttcgcggtatcttagattgtcgggttgactccgagcccctcgcaagcttaactctccacttaggcagtcgcctggtggccagctcacaaccacaaggtgcccccgcagagcctcatatacacgtactcgcctcccccaacgcactccgagtagacatcgaagcacttagacccagcgatcagggggaatacatttgctcagccagtaacgtgctcgggagtgctagtacctcaacttacttcggcgttcggggagagggcagagggctgcaccttccagggcactccgcacagaaaccatcttcctag

SEQ ID NO: 322543 - DNA, 1392 bp, Artificial Sequence
  derived and/or modified sequence
tgactggccctggtgctgtgcaccgtggacagcagaccccccgcccagctggccctgagccacgccggcagactgctggccagcagcaccgccgccagcgtgcccaacaccctgagactggagctgagaggcccccagcccagagacgagggcttctacagctgcagcgccagaagccccctgggccaggccaacaccagcctggagctgagactggagggcgtgagagtgatcctggcccccgaggccgccgtgcccgagggcgcccccatcaccgtgacctgcgccgaccccgccgcccacgcccccaccctgtacacctggtaccacaacggcagatggctgcaggagggccccgccgccagcctgagcttcctggtggccaccagagcccacgccggcgcctacagctgccaggcccaggacgcccagggcaccagaagcagcagacccgccgccctgcaggtgctgtacgccccccaggacgccgtgctgagcagcttcagagacagcagagccagaagcatggccgtgatccagtgcaccgtggacagcgagccccccgccgagctggccctgagccacgacggcaaggtgctggccaccagcagcggcgtgcacagcctggccagcggcaccggccacgtgcaggtggccagaaacgccctgagactgcaggtgcaggacgtgcccgccggcgacgacacctacgtgtgcaccgcccagaacctgctgggcagcatcagcaccatcggcagactgcaggtggagggcgccagagtggtggccgagcccggcctggacgtgcccgagggcgccgccctgaacctgagctgcagactgctgggcggccccggccccgtgggcaacagcaccttcgcctggttctggaacgacagaagactgcacgccgagcccgtgcccaccctggccttcacccacgtggccagagcccaggccggcatgtaccactgcctggccgagctgcccaccggcgccgccgccagcgcccccgtgatgctgagagtgctgtacccccccaagacccccaccatgatggtgttcgtggagcccgagggcggcctgagaggcatcctggactgcagagtggacagcgagcccctggccagcctgaccctgcacctgggcagcagactggtggccagcagccagccccagggcgcccccgccgagccccacatccacgtgctggccagccccaacgccctgagagtggacatcgaggccctgagacccagcgaccagggcgagtacatctgcagcgccagcaacgtgctgggcagcgccagcaccagcacctacttcggcgtgagaggcgagggcagaggcctgcacctgcccggccacagcgcccagaagcccagcagctag

SEQ ID NO: 322544 - DNA, 1392 bp, Artificial Sequence
  derived and/or modified sequence
taattagcactggttctgtgtaccgttgacagtcggccccccgcacagctggcactgtcacatgctggccggctgttagctagttctacagccgccagcgtacccaacactctgcgcttagaacttaggggtccccagccaagggacgaaggattctactcttgctccgctagaagccccctaggtcaggcaaacaccagtctggaactaaggctggagggcgtgcgagtgatactagccccagaggcggccgtaccagaaggggcccctattacggtgacgtgcgctgatcctgctgctcacgcgcccacgttatacacttggtaccacaacgggaggtggctgcaggaagggccggctgcctcactgtcattcctggtagccacgcgggctcatgccggcgcatactcttgccaagcccaggatgcacagggcacaaggtcttcccgccccgcagcacttcaggtgctctatgcaccacaggacgcggtcttatcttcatttcgggactcgcgagcgaggagcatggctgtgatacagtgtactgttgattctgagccgccagccgagctcgctctctcccacgatgggaaagtcctcgcaacaagttctggggtgcattcgctggcaagcggaacagggcatgtgcaggtggctagaaatgccctacgtttgcaggtgcaggatgtaccagccggggacgacacatacgtgtgcacagcccagaatctgctgggttctatctcaaccatcggacggcttcaggtggagggggcacgggtcgtggccgaacctgggctggacgtacctgaaggagctgcactcaatctctcctgtcgcctgttggggggcccaggcccggttggcaacagcactttcgcttggttttggaacgataggcggttgcatgccgagcctgtgcccactctggcattcacacatgtggctcgtgcgcaggctgggatgtatcactgtctcgccgaactgccaaccggcgctgcagccagcgcacctgtgatgttgagggtcctctatcctccaaagaccccaactatgatggtctttgttgaacctgagggcgggctgcggggaatcttagactgcagggtggactcagagccgttggccagccttacattacacctgggatctagactggtggcgtcctcacagccccagggggcgcccgccgagccacatattcacgtgctggcttccccgaacgccttaagagtggatatcgaggcgttgcggccaagtgaccagggcgaatacatttgttcagcctctaacgttctgggatcagcttctacatcaacttatttcggcgtaaggggcgaaggacgcgggcttcacctacccgggcatagcgctcagaaaccctcttcttag

SEQ ID NO: 322545 - DNA, 1392 bp, Artificial Sequence
  derived and/or modified sequence
tgactggccctggtgctgtgcaccgtggacagccggcccccagcccagctggccctgagccacgccggccgcctgctggccagcagcacagctgcctctgtgcccaacaccctgcggctggagctgcggggcccccagcccagagatgagggcttctacagctgcagcgcccggagccccctgggccaggccaacaccagcctggagctgcggctggagggcgtgcgggtcatcctggcccctgaggccgctgtgcctgagggcgcccccatcaccgtgacctgtgccgaccctgctgcccacgcccccaccctgtacacctggtaccacaacggccgctggctgcaggagggccctgctgccagcctgtccttcctggtggccacccgggcccatgctggggcctacagctgccaggcccaggatgcccagggcaccaggagcagcaggcctgctgccctgcaggtgctgtatgccccccaggatgctgtgctgagcagcttccgggacagccgggcccgctccatggctgtgatccagtgcaccgtggacagcgagcccccagctgagctggccctgagccatgatggcaaggtgctggccaccagcagcggcgtgcacagcctggccagcggcactggacatgtgcaggtggccagaaatgccctgcggctgcaggtgcaggatgtgcctgctggagatgacacctacgtgtgcacagcccagaacctgctgggcagcatcagcaccatcggccgcctgcaggtggagggcgcccgggtggtggccgagcccggcctggatgtgcctgagggcgccgccctgaacctgagctgccgcctgctgggcggccctggccctgtgggcaacagcacctttgcctggttctggaatgaccggcggctgcacgccgagcctgtgcccaccctggccttcacccacgtggcccgggcccaggccggcatgtaccactgcctggccgagctgcccactggagctgctgccagcgcccctgtgatgctgcgggtgctgtacccacccaagacccccaccatgatggtgtttgtggagcctgagggcggcctgcggggcatcctggactgccgggtggacagcgagcccctggccagcctgaccctgcacctgggcagccggctggtggccagcagccagccccagggcgccccagctgagccccacatccacgtgctggccagccccaatgccctgcgggtggacatcgaggccctgcggcccagcgaccagggcgagtacatctgcagcgccagcaatgtgctgggcagcgccagcaccagcacctactttggagtgcggggggagggccggggcctgcacctgcccggccacagcgcccagaagcccagcagctag

SEQ ID NO: 322546 - DNA, 1392 bp, Artificial Sequence
  derived and/or modified sequence
tgactggccctggtgctgtgcaccgtggacagccggccccccgcccagctggctctttcacacgccggcagactgttggcctcttccacggctgccagcgtgccaaacacacttcgtcttgagttgaggggccctcaaccacgggacgaagggttctactcctgctcagctcggtccccgcttggccaggccaatacttctctggagttgcgcttggagggggtcagagtaattcttgcacctgaggcggctgtgcccgagggcgctccaatcaccgtgacctgcgctgatccagctgcccacgccccgaccctctacacgtggtaccacaatgggcgttggttgcaggagggtcctgccgcgagcctctcttttctggtcgctacgagggcccatgctggcgcttactcctgtcaagcccaggacgcccagggcaccaggtcctcaagacccgctgcccttcaagtgctatatgccccccaagacgcagttttgtcgagttttcgagactcacgcgctcggagcatggccgtgatacagtgtactgtggactctgagccgcccgctgagttggccttgtcccatgacggcaaggttctggcaacctcgtcaggcgtgcacagcctggcaagcggaaccggccatgtgcaggtcgcccggaatgctctgcgcttacaggtacaggacgtgccagcaggtgacgatacctacgtgtgtaccgcccagaatcttctgggaagtataagcactatcggacgtctgcaagtggagggagctagggtggtagctgagcccggcctcgatgttcccgagggagcggctctcaacttatcttgcagattgttgggtggcccaggtcccgtggggaacagcacgttcgcttggttctggaacgataggcgacttcacgccgagccagtgccaacccttgcctttactcacgtcgcacgcgcacaggcaggcatgtatcattgtctcgctgagctgccgacaggagcggcagccagtgctccggtgatgttaagagttctctacccacccaaaacacccacgatgatggtgtttgtggagccagagggggggctacgaggaatcctcgactgtcgggtcgacagcgagcctctggcgtccttgacactccatctcggatctcgtctcgtcgcctcctctcagccacaaggcgcccccgccgagccccacattcacgtcttagcttcacctaacgctctccgtgtggacatcgaggccctaagaccctcagatcaaggcgaatacatatgttccgcaagtaacgttctggggtcagcctccactagcacctatttcggggtgcggggagaagggcgcggcttacacctcccaggacactcagcacagaagccgtcatcgtag

SEQ ID NO: 322547 - RNA, 1392 nt, Artificial Sequence
  derived and/or modified sequence
ugacuggcacugguccugugcacuguugacagccggccucccgcccagcuagcucugucccacgcugguagguugcucgcgucuagcaccgcagccagcgugccuaauacucugcguuuagaauuacgagggccucagccccgcgaugaaggauuuuacucaugcuccgcccguucuccacugggccaagccaacacuucucucgagcuucggcuugagggcguuagggucaucuuagccccagaggccgccgugcccgaaggggcuccuauaaccgugacaugcgcagaucccgcugcccacgccccaacucucuacacgugguaucacaaugggcgguggcuccaggaggggccugcugcuucccuaucauuccuuguggcuaccagggcucacgcgggagcauacuccugccaggcacaggaugcacaagguaccagaaguucaagaccagcugcacuccagguuuuauacgccccccaagacgcggugcucagcuccuucagggauucccgcgcccgcaguauggccgugauccaguguaccguggacucagagccucccgccgagcuugcucuaagucaugauggcaaaguguuagcaacauccuccggcgugcacagccuugcuucagggacaggucauguacaggucgccagaaacgcacugcggcuacaagugcaggacguaccugcaggcgacgauaccuacguauguacggcccaaaaccuucucgguucaaucuccacaauugguagacuacagguugagggcgcacgcgugguugcugagccagggcuggacguuccugaaggcgcugcacuuaaccugagcugucgacugcucgguggcccaggacccguugggaacuccacauucgcgugguucuggaacgaccgccggcugcacgccgagccuguacccaccuuagcuuucacccaugucgcaagagcgcaggccggaauguaucacugucucgccgagcugccgaccggcgcagcagcaucagcucccguaauguugaggguccuguaucccccaaaaacgccuacaaugaugguguuuguggaaccugaagggggccucagaggaauacuggauugccggguggacagcgaaccucucgcuagccugacgcuacaucuggguagcagacugguggcuucaucucagccccagggagccccugccgagccgcacauucauguucuggcaagcccuaaugcacucaggguugacauugaggcacugaggccuucugaucagggcgaauacauuuguuccgcgucuaacguacuugguuccgccuccaccucgaccuacuuuggcgucaggggagagggacgcgggcuccacuuaccggggcacuccgcgcagaaaccaucauccuag

SEQ ID NO: 322548 - RNA, 1392 nt, Artificial Sequence
  derived and/or modified sequence
uagcuugcuuuggugcugugcaccguugauucaagaccccccgcucaauuagcucugucccacgcuggccgccugcucgccagcucaacugccgccucagucccuaauacacuuagacuagaacuccgcggcccacaacccagagacgagggcuuuuauucuugcucugccaggucaccucugggucaagcaaacacuucucuagaacugcgucucgagggcgucagagugaucuuggccccggaagccgcagucccggaaggagccccgauuacagugacuugcgcugaccccgccgcacacgcaccuacuuuguauacuugguaccauaacggccgcugguugcaggaaggccccgccgccucucuaaguuuucuggucgcgacucgggcacacgccggagcuuauuccugucaggcucaggacgcucaagguacacgcucgagcagacccgcugcccuucaggugcucuaugccccccaagacgcuguacuuuccucauucagggauucccgggcucgcuccauggcagucauccaauguacgguugauucagaacccccugccgaguuagcacucagccaugacggaaaagugcuggcuaccuccucgggcguucacucauuagcuuccggaacuggccacguacaaguagcucggaaugcacuccgguugcagguccaggacguacccgccggagacgauacuuaugucuguacagcucagaaucuucucggcuccauuucgacgauuggcagauuacagguagaaggcgcgagagucguugccgagccgggccucgauguccccgaaggggccgcgcuaaaucuuucuugccgucuguuaggcgggccggguccagucggcaacuccacauucgcaugguuuuggaacgaucgccgccuccaugcggaacccguaccuacacuugcuuucacacacguggcuagagcccaggcuggaauguaccacugucucgcagagcuucccacaggcgcugcugcuucugcucccgucaugcucagggugcuuuauccucccaaaacgccuacgaugaugguguucguggagccugaaggcggacuucgcgguaucuuagauugucggguugacuccgagccccucgcaagcuuaacucuccacuuaggcagucgccugguggccagcucacaaccacaaggugcccccgcagagccucauauacacguacucgccucccccaacgcacuccgaguagacaucgaagcacuuagacccagcgaucagggggaauacauuugcucagccaguaacgugcucgggagugcuaguaccucaacuuacuucggcguucggggagagggcagagggcugcaccuuccagggcacuccgcacagaaaccaucuuccuag

SEQ ID NO: 322549 - protein, 654 aa, Artificial Sequence
  derived and/or modified sequence
MAFRDVAVDFTQDEWRLLSPAQRTLYREVMLENYSNLVSLGISFSKPELITQLEQGKETWREEKKCSPATCPADPEPELYLDPFCPPGFSSQKFPMQHVLCNHPPWIFTCLCAEGNIQPGDPGPGDQEKQQQASEGRPWSDQAEGPEGEGAMPLFGRTKKRTLGAFSRPPQRQPVSSRNGLRGVELEASPAQSGNPEETDKLLKRIEVLGFGTVNCGECGLSFSKMTNLLSHQRIHSGEKPYVCGVCEKGFSLKKSLARHQKAHSGEKPIVCRECGRGFNRKSTLIIHERTHSGEKPYMCSECGRGFSQKSNLIIHQRTHSGEKPYVCRECGKGFSQKSAVVRHQRTHLEEKTIVCSDCGLGFSDRSNLISHQRTHSGEKPYACKECGRCFRQRTTLVNHQRTHSKEKPYVCGVCGHSFSQNSTLISHRRTHTGEKPYVCGVCGRGFSLKSHLNRHQNIHSGEKPIVCKDCGRGFSQQSNLIRHQRTHSGEKPMVCGECGRGFSQKSNLVAHQRTHSGERPYVCRECGRGFSHQAGLIRHKRKHSREKPYMCRQCGLGFGNKSALITHKRAHSEEKPCVCRECGQGFLQKSHLTLHQMTHTGEKPYVCKTCGRGFSLKSHLSRHRKTTSVHHRLPVQPDPEPCAGQPSDSLYSL

SEQ ID NO: 322550 - protein, 657 aa, Artificial Sequence
  derived and/or modified sequence
MAHMAFRDVAVDFTQDEWRLLSPAQRTLYREVMLENYSNLVSLGISFSKPELITQLEQGKETWREEKKCSPATCPADPEPELYLDPFCPPGFSSQKFPMQHVLCNHPPWIFTCLCAEGNIQPGDPGPGDQEKQQQASEGRPWSDQAEGPEGEGAMPLFGRTKKRTLGAFSRPPQRQPVSSRNGLRGVELEASPAQSGNPEETDKLLKRIEVLGFGTVNCGECGLSFSKMTNLLSHQRIHSGEKPYVCGVCEKGFSLKKSLARHQKAHSGEKPIVCRECGRGFNRKSTLIIHERTHSGEKPYMCSECGRGFSQKSNLIIHQRTHSGEKPYVCRECGKGFSQKSAVVRHQRTHLEEKTIVCSDCGLGFSDRSNLISHQRTHSGEKPYACKECGRCFRQRTTLVNHQRTHSKEKPYVCGVCGHSFSQNSTLISHRRTHTGEKPYVCGVCGRGFSLKSHLNRHQNIHSGEKPIVCKDCGRGFSQQSNLIRHQRTHSGEKPMVCGECGRGFSQKSNLVAHQRTHSGERPYVCRECGRGFSHQAGLIRHKRKHSREKPYMCRQCGLGFGNKSALITHKRAHSEEKPCVCRECGQGFLQKSHLTLHQMTHTGEKPYVCKTCGRGFSLKSHLSRHRKTTSVHHRLPVQPDPEPCAGQPSDSLYSL

SEQ ID NO: 322551 - protein, 179 aa, Artificial Sequence
  derived and/or modified sequence
MAFRDVAVDFTQDEWRLLSPAQRTLYREVMLENYSNLVSLGISFSKPELITQLEQGKETWREEKKCSPATCPADPEPELYLDPFCPPGFSSQKFPMQHVLCNHPPWIFTCLCAEGNIQPGDPGPGDQEKQQQASEGRPWSDQAEGPEGEGAMPLFGRTKKRTLGAFSRPPQRQPVSSRN

SEQ ID NO: 322552 - DNA, 1974 bp, Artificial Sequence
  derived and/or modified sequence
atggcccacatggccttcagagacgtggccgtggacttcacccaggacgagtggagactgctgagccccgcccagagaaccctgtacagagaggtgatgctggagaactacagcaacctggtgagcctgggcatcagcttcagcaagcccgagctgatcacccagctggagcagggcaaggagacctggagagaggagaagaagtgcagccccgccacctgccccgccgaccccgagcccgagctgtacctggaccccttctgcccccccggcttcagcagccagaagttccccatgcagcacgtgctgtgcaaccaccccccctggatcttcacctgcctgtgcgccgagggcaacatccagcccggcgaccccggccccggcgaccaggagaagcagcagcaggccagcgagggcagaccctggagcgaccaggccgagggccccgagggcgagggcgccatgcccctgttcggcagaaccaagaagagaaccctgggcgccttcagcagacccccccagagacagcccgtgagcagcagaaacggcctgagaggcgtggagctggaggccagccccgcccagagcggcaaccccgaggagaccgacaagctgctgaagagaatcgaggtgctgggcttcggcaccgtgaactgcggcgagtgcggcctgagcttcagcaagatgaccaacctgctgagccaccagagaatccacagcggcgagaagccctacgtgtgcggcgtgtgcgagaagggcttcagcctgaagaagagcctggccagacaccagaaggcccacagcggcgagaagcccatcgtgtgcagagagtgcggcagaggcttcaacagaaagagcaccctgatcatccacgagagaacccacagcggcgagaagccctacatgtgcagcgagtgcggcagaggcttcagccagaagagcaacctgatcatccaccagagaacccacagcggcgagaagccctacgtgtgcagagagtgcggcaagggcttcagccagaagagcgccgtggtgagacaccagagaacccacctggaggagaagaccatcgtgtgcagcgactgcggcctgggcttcagcgacagaagcaacctgatcagccaccagagaacccacagcggcgagaagccctacgcctgcaaggagtgcggcagatgcttcagacagagaaccaccctggtgaaccaccagagaacccacagcaaggagaagccctacgtgtgcggcgtgtgcggccacagcttcagccagaacagcaccctgatcagccacagaagaacccacaccggcgagaagccctacgtgtgcggcgtgtgcggcagaggcttcagcctgaagagccacctgaacagacaccagaacatccacagcggcgagaagcccatcgtgtgcaaggactgcggcagaggcttcagccagcagagcaacctgatcagacaccagagaacccacagcggcgagaagcccatggtgtgcggcgagtgcggcagaggcttcagccagaagagcaacctggtggcccaccagagaacccacagcggcgagagaccctacgtgtgcagagagtgcggcagaggcttcagccaccaggccggcctgatcagacacaagagaaagcacagcagagagaagccctacatgtgcagacagtgcggcctgggcttcggcaacaagagcgccctgatcacccacaagagagcccacagcgaggagaagccctgcgtgtgcagagagtgcggccagggcttcctgcagaagagccacctgaccctgcaccagatgacccacaccggcgagaagccctacgtgtgcaagacctgcggcagaggcttcagcctgaagagccacctgagcagacacagaaagaccaccagcgtgcaccacagactgcccgtgcagcccgaccccgagccctgcgccggccagcccagcgacagcctgtacagcctgtag

SEQ ID NO: 322553 - DNA, 1974 bp, Artificial Sequence
  derived and/or modified sequence
atggctcatatggcttttcgcgacgtggcggttgacttcacacaggatgagtggcgcctgctcagccccgctcaacggaccctgtatagggaagttatgcttgagaactactctaatctggtaagccttggaatcagcttcagtaagccagagcttatcacccagcttgagcagggaaaggagacatggcgcgaggaaaaaaagtgttcccctgcaacatgccctgcagaccctgaaccagagttatatctggatccattctgtcccccaggattttcctctcaaaaatttcccatgcagcacgtgctgtgcaaccaccctccttggatcttcacttgcttatgtgccgaaggtaatattcagccaggtgaccctggcccgggcgaccaggagaaacagcagcaagcttccgaaggcagaccctggtccgatcaagcagaaggccccgagggcgagggggctatgccgttatttggaaggaccaagaagagaacactgggcgccttcagccggccaccacaaaggcaaccagtttccagcaggaacggactgcgtggcgttgaactggaggcatcacccgcccaatccgggaatcccgaagaaaccgacaaactgttaaagcgcattgaggtgttggggtttggtacagtgaactgtggcgagtgtggtctgagttttagtaagatgactaacctgctgtctcatcagagaatacattcaggagagaaaccatacgtttgtggcgtctgtgaaaaaggcttctccctgaagaaatcccttgccagacatcagaaggcccactctggagaaaagcccatcgtgtgccgcgagtgcggacgaggatttaacagaaaaagtacactcataattcacgaaagaacgcactctggcgagaagccatatatgtgtagcgaatgtggaagaggattttcccaaaaatccaacctgataattcaccagcgaactcatagtggggagaagccttatgtctgcagagaatgtgggaaggggttttctcaaaagagcgcagtcgtcagacaccagcggacgcacctagaggaaaagaccatagtgtgttctgactgtggtctgggcttctctgacagaagcaatctcatttcccaccagaggacacactccggggaaaaaccctatgcctgcaaggagtgcggaagatgcttcaggcaaaggacaacccttgttaatcaccagcgaacacactcaaaggaaaagccatacgtgtgtggggtctgcggacactcctttagccagaacagtacactaattagtcatagaagaactcataccggggaaaagccatacgtctgcggagtgtgtggaagggggttctctttaaaaagtcatctcaaccgacatcaaaatatccactccggagaaaagcccattgtctgtaaggactgcgggcgggggtttagccagcagtctaacctaatccgccaccagaggactcacagtggtgagaagcccatggtatgcggagagtgcggccggggatttagtcaaaaatccaatctagtcgctcaccaaaggacccactctggagaacgaccctacgtgtgtcgggaatgtgggagaggcttttcgcaccaggctggcctaattcggcacaagcgcaaacattctcgggaaaagccttacatgtgtcgacaatgcgggctcggtttcggaaacaagagcgcccttatcacacacaagcgggcccattcagaggaaaaaccctgcgtctgtcgcgaatgtggtcaaggattcctgcagaaatcccacctcaccctccaccagatgacacacacgggcgaaaagccttacgtgtgtaagacctgcggccggggtttcagcctgaaaagtcatttgagcaggcacaggaagaccacctcagtgcatcacagacttcctgtgcaacctgatccggagccttgtgccggacaacctagtgactctctctatagcctgtag

SEQ ID NO: 322554 - DNA, 1974 bp, Artificial Sequence
  derived and/or modified sequence
atggcccacatggccttcagagatgtggccgtggacttcacccaggatgagtggaggctgctgagccctgcccagaggaccctgtaccgggaggtgatgctggagaactacagcaacctggtgtccctgggcatctccttcagcaagccagagctgatcacccagctggagcagggcaaggagacctggagggaggagaagaagtgcagccctgccacctgcccagctgaccctgagcctgagctgtacctggaccccttctgccccccaggcttcagcagccagaagttccccatgcagcacgtgctgtgcaaccaccccccctggatcttcacctgcctgtgtgccgagggcaacatccagcccggggaccccggccctggggaccaggagaagcagcagcaggccagcgagggccggccctggagcgaccaggccgagggccctgagggggagggcgccatgcccctgtttggccgcaccaagaagaggaccctgggcgccttcagccggcccccccagaggcagcctgtgagcagcagaaatggcctgcggggcgtggagctggaggccagccctgcccagagcggcaaccctgaggagacagacaagctgctgaagagaattgaggtgctgggcttcggcaccgtgaactgtggagaatgtggcctgtccttcagcaagatgaccaacctgctgagccaccagaggatccacagcggggagaagccctacgtgtgtggggtgtgtgagaagggcttcagcctgaagaagagcctggcccggcaccagaaggcccacagcggggagaagcccatcgtgtgcagagaatgtggccggggcttcaacaggaagagcaccctcatcatccacgagaggacccacagcggggagaagccctacatgtgcagtgaatgtggccggggcttcagccagaagagcaacctgatcatccaccagaggacccacagcggggagaagccctacgtgtgcagagaatgtgggaagggcttcagccagaagtctgctgtggtgcgccaccagaggacccacctggaggagaagaccatcgtgtgcagcgactgtggcctgggcttcagtgacaggagcaacctgatcagccaccagaggacccacagcggggagaagccctatgcctgcaaggaatgtggccgctgcttccggcagaggaccaccctggtgaaccaccagaggacccacagcaaggagaagccctacgtgtgtggggtgtgtggccacagcttcagccagaacagcaccctcatcagccacaggaggacccacactggagagaagccctacgtgtgtggggtgtgtggccggggcttcagcctgaagagccacctgaacagacaccagaacatccacagcggggagaagcccatcgtgtgcaaggactgtggccggggcttcagccagcagagcaacctgatccgccaccagaggacccacagcggggagaagcccatggtgtgtggagaatgtggccggggcttcagccagaagagcaacctggtggcccaccagaggacccacagcggggagcggccctacgtgtgcagagaatgtggccggggcttcagccaccaggccggcctcatccgccacaagaggaagcacagccgggagaagccctacatgtgccggcagtgtggcctgggcttcggcaacaagagcgccctgatcacccacaagagggcccacagcgaggagaagccctgtgtgtgcagagaatgtggccagggcttcctgcagaagagccacctgaccctgcaccagatgacccacactggagagaagccctacgtgtgcaagacctgtggccggggcttcagcctgaagagccacctgagccgccacaggaagaccacctctgtgcaccaccggctgcctgtgcagcctgaccctgagccctgtgccggccagcccagcgacagcctgtacagcctgtag

SEQ ID NO: 322555 - DNA, 1974 bp, Artificial Sequence
  derived and/or modified sequence
atggcccacatggccttccgggacgtggccgtggacttcacccaggatgaatggcgtctgcttagccctgcgcagagaaccctgtatcgcgaggtcatgctggaaaattactcaaacttggtcagtctgggtatctcattttcaaagcccgagctcattactcagctggagcaggggaaggagacctggagagaggagaaaaagtgttccccagcaacctgcccggctgatcccgagccagagctgtacctggatcctttttgtccccccggcttttcctcccaaaagttcccaatgcagcatgtcctgtgcaatcatccaccatggatctttacctgtctttgcgccgaaggcaacattcaacccggcgaccccggtccaggagaccaggaaaagcagcagcaggccagcgaggggagaccctggagcgaccaagccgagggccctgagggtgaaggagccatgcccttattcgggcgtacgaaaaagcgaaccctgggagccttctcaagacctccacagcgacagcctgtttcttcaagaaatggtttgaggggtgtcgagctggaggccagccctgctcagtctggcaatcctgaggaaacagacaagctcctgaagcgcattgaagtgctgggattcggaacggtcaactgtggcgagtgtggactgtccttcagcaagatgactaacctcctctcacaccaacgcatccattccggcgagaagccttacgtttgcggggtttgcgagaagggtttctccctgaagaaatcgcttgcccgccatcagaaagcccactcaggggaaaagcctatagtgtgccgcgagtgcggacgtggattcaatcgcaagtccaccttgattatccacgaacgtactcactcaggagagaaaccttacatgtgtagtgagtgtggtagagggttcagtcagaagtcaaatcttattattcatcaacggacacacagcggagagaaaccgtatgtgtgcagggaatgtggcaagggcttcagtcagaaaagcgccgtagtaagacaccaacgcacacaccttgaggagaaaactatcgtctgctccgactgtgggctggggttcagcgataggtctaacttgatctcacaccagcgcactcattctggcgagaagccatacgcatgtaaggagtgtggacgctgtttcagacagcgcacaaccttagtgaaccatcagcggacacactccaaggagaagccctatgtgtgtggcgtttgtggacactccttctcacagaactcaaccctgatctcccatcgtcgcacccacactggggagaaaccgtacgtttgtggtgtatgcggaaggggctttagcctaaagagccatctcaataggcaccaaaacatacattccggcgagaaacccatcgtgtgcaaagactgtgggcgtgggttctcacagcagtctaacctcattcgccatcaaaggacccacagcggagagaaaccaatggtctgtggtgagtgcggtcgaggattcagtcagaagtcaaatttggtggcccatcagaggacacactcaggggaacggccttatgtctgccgggagtgtggtcggggattctcccatcaggccggcctcattaggcacaaaaggaaacattcaagagaaaagccgtacatgtgtcggcaatgcggactcggttttggaaacaaatcggctctgattactcataaacgggcccattcagaggagaaaccttgcgtgtgcagagagtgtgggcaagggtttttacagaaaagccatctcaccctgcatcagatgacacacactggagagaagccctacgtgtgtaagacctgcggcaggggctttagtttaaagagccacctgagcaggcacaggaagactacttcggtgcaccacaggctgcccgtacagcccgaccctgagccctgcgccggtcagccctctgattccctgtattctctctag

SEQ ID NO: 322556 - DNA, 1974 bp, Artificial Sequence
  derived and/or modified sequence
atggcccacatggcctttagggacgtcgcggtggatttcacccaagatgaatggcgcctcctaagcccggctcagagaacactgtatagggaagtgatgcttgagaactactcgaacctcgtgtctttgggcatctcattctcaaagccggaactgatcacgcagctcgaacaaggaaaggagacctggagggaagaaaaaaagtgttcacctgccacttgccctgccgatccagaacccgaactgtacctagatccgttttgcccacctggctttagcagccagaagtttccaatgcagcacgttctgtgcaaccacccaccttggatcttcacttgtctgtgcgccgaagggaacatccagcctggggatcccggtcccggtgaccaggagaaacagcagcaagcctccgagggacgtccctggagtgatcaggccgaaggccctgagggcgagggcgcaatgcccctgttcgggaggactaagaagcggaccctcggagccttctcccgcccaccacaaaggcagcccgtcagctcccgcaatggactgaggggcgtggagttagaggcaagccctgctcagtctggcaatcccgaagagaccgataagctcttaaaaaggatcgaggtgttaggatttgggacagtaaactgtggagagtgcggcctgtctttcagcaaaatgaccaaccttctctcccaccagcggattcattccggggaaaagccatatgtgtgtggagtgtgcgagaaggggttttcactgaagaagtccctcgcacggcatcagaaggcacactctggagaaaagccaatagtgtgtagagaatgcggccgtgggtttaataggaaatccacactgataattcatgagcgtactcactctggggagaaaccctatatgtgctccgagtgtggcagaggcttctcacagaagtcgaacttgatcatccaccagcggactcattctggagagaagccctacgtctgcagagagtgtggcaaaggtttcagtcaaaaaagtgctgtcgtgcgccatcagagaacacatctagaggagaagacaatcgtctgctctgattgtggtctagggtttagcgaccggtcgaatctgatctcccaccaacgtacccactcaggcgaaaagccatatgcctgcaaagagtgcggcaggtgtttccgtcagcggaccacactcgtcaaccaccaacgcacccactccaaagaaaaaccatatgtgtgtggtgtctgcgggcactccttcagccagaattctactttaatatcacatcgtagaacccataccggcgaaaaaccatatgtttgtggtgtatgcggaagagggttcagcttaaagtctcacctgaaccgccatcagaatattcattctggggaaaagcccattgtctgcaaagattgcggccgtggtttcagccagcagagtaatctaatccggcatcagagaacccattcaggagaaaaacctatggtgtgcggcgagtgcggccgtggatttagccagaagagtaacctcgtcgcccaccagcgcactcacagtggagaacgcccttacgtgtgccgcgaatgtggaagagggttctcacaccaggcgggactcatccgacacaagcggaaacacagccgtgaaaaaccatatatgtgccgacagtgcgggttgggatttggaaacaaatctgcgttaatcactcataaacgtgctcactctgaagaaaagccatgcgtttgccgtgagtgtggtcaaggctttctccagaaatcccatctgaccctccatcagatgacacacactggagagaaaccatacgtgtgtaaaacatgtgggagagggtttagtctgaaatcccatctgtcgagacatcgcaaaaccacgtcagtccaccataggcttcccgtacagcccgatcctgagccatgcgcgggacaaccttctgattccctgtattctctatag

SEQ ID NO: 322557 - DNA, 2242 bp, Artificial Sequence
  derived and/or modified sequence
atctaccttctgagatatcatccttcttcagggagataaggaaaaaaagccacagggtcccggagagccaggggaatgttttgtgttacaggcacacatggcattcagggatgtggctgtggatttcacccaggatgagtggaggctgctgagccctgctcaaaggactctgtacagagaggtgatgctggagaactacagcaacctggtctcactgggaatttcattttctaaaccagaactcatcacccagctggagcaagggaaagagacctggagagaggaaaaaaaatgttcaccggcaacctgtccagcagatccagagccagagctctacctcgatcctttctgccctccgggtttctccagtcagaaattccccatgcagcatgtgctgtgtaatcatcccccctggatcttcacatgcttgtgtgcagaaggtaacatccagcctggggatccgggcccaggggaccaggagaagcagcaacaagcctctgaggggagaccctggagtgatcaagcagaaggtcctgagggagaaggtgccatgcctttgtttggaagaaccaagaaaaggactctgggagcgttctccaggccaccccagaggcagccagtcagctctcggaacggcctcagaggggtggagttagaagccagcccagctcagtcagggaaccctgaggaaacagacaaattgttgaagaggatagaagtcttaggatttggaacagtcaactgtggagagtgtggactgagcttcagcaagatgacaaacctgctcagtcaccagcggatacactcaggggagaagccctacgtgtgtggggtatgtgagaagggcttcagcctaaagaagagcctcgccagacaccagaaggcacactcgggggagaagccaattgtgtgcagggagtgtggacgaggctttaaccggaagtcaacgctaatcatacacgaacggacacactccggtgagaaaccttacatgtgcagtgagtgtgggcgaggcttcagccagaagtcaaacctcatcatacaccagaggacacactcaggggaaaagccttacgtgtgccgggaatgtggcaaaggcttcagccagaagtcagctgtcgtgagacaccagaggacacacttggaggagaagaccatcgtgtgcagtgactgtggcctgggcttcagcgacaggtcaaacctcatctcccaccagaggacgcactctggggagaagccctacgcctgcaaggagtgtgggcgatgcttcaggcagaggaccacccttgtcaaccaccagaggacacactcaaaggagaagccctatgtgtgcggggtgtgtgggcacagcttcagccagaattcaaccctcatctctcacaggcggacacacactggggagaagccgtatgtttgtggggtgtgtgggcgaggctttagtctcaagtcacacctcaacagacaccagaacatacactcaggagagaagcccattgtgtgcaaggactgtggccggggcttcagccagcaatccaacctcatcagacaccagaggacgcactcaggcgagaagcccatggtgtgtggggagtgcgggcgaggcttcagccagaagtcaaaccttgttgcacaccagaggacgcactcaggggagaggccgtatgtgtgccgagagtgcgggcgaggctttagccaccaggccggtctcatcaggcacaagcggaagcactcgagggagaagccctacatgtgcaggcagtgtggactgggctttggcaataagtcagctctaattacacacaagcgggctcactcggaagagaagccttgtgtgtgcagagagtgtggccaaggctttctccaaaagtcacacctcaccttacatcaaatgacacatacgggggagaagccatatgtgtgcaagacgtgtgggcggggcttcagcctcaagtctcacctcagcagacacaggaagaccacgtctgtccaccacagactgccagtgcagcccgaccctgagccgtgtgcagggcaaccttcggattccttatactctctctgaaggcaaagatggggacaaggactaagagtcagaatgttgacactttgatgaaatggagtagagaaatgcattctgtaagtggtcaaaggacatttgactgtttactttctccacactaagtcttctccatgttttgtggccttcggttgtaataaacttggcttctttatacatctgtaa

SEQ ID NO: 322558 - DNA, 2318 bp, Artificial Sequence
  derived and/or modified sequence
gtgccgaggattcggggtagtgtagtcctggcgccccgctggaggagctccccagctggtggctggagcgaccccttgttctttggtggcgctgatctaccttctgagatatcatccttcttcagggagataaggaaaaaaagccacagggtcccggagagccaggggaatggcacacatggcattcagggatgtggctgtggatttcacccaggatgagtggaggctgctgagccctgctcaaaggactctgtacagagaggtgatgctggagaactacagcaacctggtctcactgggaatttcattttctaaaccagaactcatcacccagctggagcaagggaaagagacctggagagaggaaaaaaaatgttcaccggcaacctgtccagcagatccagagccagagctctacctcgatcctttctgccctccgggtttctccagtcagaaattccccatgcagcatgtgctgtgtaatcatcccccctggatcttcacatgcttgtgtgcagaaggtaacatccagcctggggatccgggcccaggggaccaggagaagcagcaacaagcctctgaggggagaccctggagtgatcaagcagaaggtcctgagggagaaggtgccatgcctttgtttggaagaaccaagaaaaggactctgggagcgttctccaggccaccccagaggcagccagtcagctctcggaacggcctcagaggggtggagttagaagccagcccagctcagtcagggaaccctgaggaaacagacaaattgttgaagaggatagaagtcttaggatttggaacagtcaactgtggagagtgtggactgagcttcagcaagatgacaaacctgctcagtcaccagcggatacactcaggggagaagccctacgtgtgtggggtatgtgagaagggcttcagcctaaagaagagcctcgccagacaccagaaggcacactcgggggagaagccaattgtgtgcagggagtgtggacgaggctttaaccggaagtcaacgctaatcatacacgaacggacacactccggtgagaaaccttacatgtgcagtgagtgtgggcgaggcttcagccagaagtcaaacctcatcatacaccagaggacacactcaggggaaaagccttacgtgtgccgggaatgtggcaaaggcttcagccagaagtcagctgtcgtgagacaccagaggacacacttggaggagaagaccatcgtgtgcagtgactgtggcctgggcttcagcgacaggtcaaacctcatctcccaccagaggacgcactctggggagaagccctacgcctgcaaggagtgtgggcgatgcttcaggcagaggaccacccttgtcaaccaccagaggacacactcaaaggagaagccctatgtgtgcggggtgtgtgggcacagcttcagccagaattcaaccctcatctctcacaggcggacacacactggggagaagccgtatgtttgtggggtgtgtgggcgaggctttagtctcaagtcacacctcaacagacaccagaacatacactcaggagagaagcccattgtgtgcaaggactgtggccggggcttcagccagcaatccaacctcatcagacaccagaggacgcactcaggcgagaagcccatggtgtgtggggagtgcgggcgaggcttcagccagaagtcaaaccttgttgcacaccagaggacgcactcaggggagaggccgtatgtgtgccgagagtgcgggcgaggctttagccaccaggccggtctcatcaggcacaagcggaagcactcgagggagaagccctacatgtgcaggcagtgtggactgggctttggcaataagtcagctctaattacacacaagcgggctcactcggaagagaagccttgtgtgtgcagagagtgtggccaaggctttctccaaaagtcacacctcaccttacatcaaatgacacatacgggggagaagccatatgtgtgcaagacgtgtgggcggggcttcagcctcaagtctcacctcagcagacacaggaagaccacgtctgtccaccacagactgccagtgcagcccgaccctgagccgtgtgcagggcaaccttcggattccttatactctctctgaaggcaaagatggggacaaggactaagagtcagaatgttgacactttgatgaaatggagtagagaaatgcattctgtaagtggtcaaaggacatttgactgtttactttctccacactaagtcttctccatgttttgtggccttcggttgtaataaacttggcttctttatacatc

SEQ ID NO: 322559 - DNA, 2397 bp, Artificial Sequence
  derived and/or modified sequence
gtagtgtagtcctggcgccccgctggaggagctccccagctggtggctggagcgaccccttgttctttggtggcgctgtgtgtcctccatttggaagtagtgctaagaaaattaaaagaataaaactgggcaggggcatgagaataggatgcaaagatgaatttttggactgagtggccaagaagctccatggtgagcactcacagtctaaggctggaagtttaatgaactgttttctacatttcacaggcacacatggcattcagggatgtggctgtggatttcacccaggatgagtggaggctgctgagccctgctcaaaggactctgtacagagaggtgatgctggagaactacagcaacctggtctcactgggaatttcattttctaaaccagaactcatcacccagctggagcaagggaaagagacctggagagaggaaaaaaaatgttcaccggcaacctgtccagcagatccagagccagagctctacctcgatcctttctgccctccgggtttctccagtcagaaattccccatgcagcatgtgctgtgtaatcatcccccctggatcttcacatgcttgtgtgcagaaggtaacatccagcctggggatccgggcccaggggaccaggagaagcagcaacaagcctctgaggggagaccctggagtgatcaagcagaaggtcctgagggagaaggtgccatgcctttgtttggaagaaccaagaaaaggactctgggagcgttctccaggccaccccagaggcagccagtcagctctcggaacggcctcagaggggtggagttagaagccagcccagctcagtcagggaaccctgaggaaacagacaaattgttgaagaggatagaagtcttaggatttggaacagtcaactgtggagagtgtggactgagcttcagcaagatgacaaacctgctcagtcaccagcggatacactcaggggagaagccctacgtgtgtggggtatgtgagaagggcttcagcctaaagaagagcctcgccagacaccagaaggcacactcgggggagaagccaattgtgtgcagggagtgtggacgaggctttaaccggaagtcaacgctaatcatacacgaacggacacactccggtgagaaaccttacatgtgcagtgagtgtgggcgaggcttcagccagaagtcaaacctcatcatacaccagaggacacactcaggggaaaagccttacgtgtgccgggaatgtggcaaaggcttcagccagaagtcagctgtcgtgagacaccagaggacacacttggaggagaagaccatcgtgtgcagtgactgtggcctgggcttcagcgacaggtcaaacctcatctcccaccagaggacgcactctggggagaagccctacgcctgcaaggagtgtgggcgatgcttcaggcagaggaccacccttgtcaaccaccagaggacacactcaaaggagaagccctatgtgtgcggggtgtgtgggcacagcttcagccagaattcaaccctcatctctcacaggcggacacacactggggagaagccgtatgtttgtggggtgtgtgggcgaggctttagtctcaagtcacacctcaacagacaccagaacatacactcaggagagaagcccattgtgtgcaaggactgtggccggggcttcagccagcaatccaacctcatcagacaccagaggacgcactcaggcgagaagcccatggtgtgtggggagtgcgggcgaggcttcagccagaagtcaaaccttgttgcacaccagaggacgcactcaggggagaggccgtatgtgtgccgagagtgcgggcgaggctttagccaccaggccggtctcatcaggcacaagcggaagcactcgagggagaagccctacatgtgcaggcagtgtggactgggctttggcaataagtcagctctaattacacacaagcgggctcactcggaagagaagccttgtgtgtgcagagagtgtggccaaggctttctccaaaagtcacacctcaccttacatcaaatgacacatacgggggagaagccatatgtgtgcaagacgtgtgggcggggcttcagcctcaagtctcacctcagcagacacaggaagaccacgtctgtccaccacagactgccagtgcagcccgaccctgagccgtgtgcagggcaaccttcggattccttatactctctctgaaggcaaagatggggacaaggactaagagtcagaatgttgacactttgatgaaatggagtagagaaatgcattctgtaagtggtcaaaggacatttgactgtttactttctccacactaagtcttctccatgttttgtggccttcggttgtaataaacttggcttctttatacatctg

SEQ ID NO: 322560 - protein, 267 aa, Artificial Sequence
  derived and/or modified sequence
MLRPAGLWRLCRRPWAARVPAENLGRREVTSGVSPRGSTSPRTLNIFDRDLKRKQKNWAARQPEPTKFDYLKEEVGSRIADRVYDIPRNFPLALDLGCGRGYIAQYLNKETIGKFFQADIAENALKNSSETEIPTVSVLADEEFLPFKENTFDLVVSSLSLHWVNDLPRALEQIHYILKPDGVFIGAMFGGDTLYELRCSLQLAETEREGGFSPHISPFTAVNDLGHLLGRAGFNTLTVDTDEIQVNYPGMFELMEDLQEQKSRMLT

SEQ ID NO: 322561 - DNA, 804 bp, Artificial Sequence
  derived and/or modified sequence
atgcttaggccagcgggcttgtggagactatgccggaggccttgggctgcccgcgttcccgcagagaacctgggcaggcgtgaggtgactagtggtgtgtctccacgaggatcgaccagtcctcgcactctgaatatcttcgacagagatttgaaaaggaaacagaaaaactgggcagcgcggcaacctgaacccacgaaattcgactaccttaaagaagaggtgggctcgaggatcgcagatagagtgtatgatatcccacgcaacttccccttggcccttgatctaggttgcggaagaggatatatcgcacagtatctaaacaaggagaccatagggaagttttttcaagcagacattgcagagaacgccctgaaaaactccagcgagaccgaaatacccacagtaagcgtcctagcagatgaagagttcttgcccttcaaagaaaacactttcgacttggtggtaagcagcctttctttgcattgggtgaatgatctcccaagggcgctggaacagatccactatatattaaagccagacggcgtctttattggggctatgtttggaggcgatacactgtatgaattgagatgctctcttcagttagccgagaccgagcgggagggtgggttctccccccacatttcgccctttactgccgtgaacgacctcgggcatctcctcggacgggccgggtttaataccctgacggtggacaccgacgaaatccaggtgaactacccagggatgttcgagcttatggaggatctgcaggagcaaaaatcccgcatgcttacatag

SEQ ID NO: 322562 - DNA, 804 bp, Artificial Sequence
  derived and/or modified sequence
atgctgcggcctgctggcctgtggaggctgtgccggcggccctgggccgcccgggtgcctgctgagaacctgggccggcgggaggtgaccagcggcgtgagcccccggggcagcaccagccccaggaccctgaacatctttgaccgggacctgaagaggaagcagaagaactgggccgcccggcagcctgagcccaccaagtttgactacctgaaggaggaggtgggcagcagaattgctgacagagtgtatgacatccccaggaacttccccctggccctggacctgggctgcggccggggctacatcgcccagtacctgaacaaggagaccatcggcaagttcttccaggccgacattgctgaaaatgccctgaagaacagcagcgagacagagatccccaccgtgtctgtgctggctgatgaggagttcctgcccttcaaggagaacacctttgacctggtggtgagcagcctgagcctgcactgggtgaatgacctgccccgggccctggagcagatccactacatcctgaagccagatggagtcttcatcggggccatgtttggaggagacaccctgtatgagctgcgctgcagcctgcagctggccgagacagagcgggagggcggcttcagcccccacatcagccccttcaccgctgtgaatgacctgggccacctgctgggccgggccggcttcaacaccctgactgtggacacagatgagatccaggtgaactacccaggcatgtttgagctgatggaggacctgcaggagcagaagagcaggatgctgacctag

SEQ ID NO: 322563 - DNA, 804 bp, Artificial Sequence
  derived and/or modified sequence
atgctgcggcccgccggcctgtggcggctgtgccggcggccctgggctgccagagtacccgcagaaaatctgggtaggagagaggttaccagcggcgtgagcccgaggggttcaaccagtccaaggaccttgaacatttttgaccgagacctcaagcgtaaacaaaagaactgggccgctaggcaacccgagcccactaagtttgactatttgaaagaggaagttggatcccggattgcagatcgagtctacgatattccccggaactttccacttgccctggacctgggttgtgggcgcggttatatcgcccaatatctcaataaagagacaattgggaagttttttcaggctgacatcgcagagaacgccctgaaaaactctagtgaaacagaaataccgacagtgtctgttcttgcggacgaggaatttctgcccttcaaagagaataccttcgatcttgtggtgtcgtctctgagcctccattgggtcaacgatctgcctagggcgctggaacagattcactatatcctgaaacctgacggcgttttcattggggctatgttcggtggcgatacactctacgagctccgctgctctcttcaactggcagaaacggagagggagggagggttcagtccccacatctcaccctttactgcagtcaatgacctcgggcatctgctgggtcgggccggttttaacactctgaccgtcgatactgacgagattcaagttaattatcccggcatgtttgaactcatggaagatctccaggaacaaaagagccgtatgctcacatag

SEQ ID NO: 322564 - DNA, 804 bp, Artificial Sequence
  derived and/or modified sequence
atgttaaggcccgcaggtctgtggaggctttgccggaggccatgggctgcaagagtgcccgctgagaacctcggaaggcgagaagtgacgtccggggttagccctagggggagcacatctccgaggacattaaatattttcgaccgcgatctgaagcgtaagcagaagaactgggccgctcgccaaccggagcctaccaagttcgattatcttaaagaggaggtgggcagtcggatcgccgatcgggtgtatgacatcccacgcaattttccactggccttggatctgggctgtgggagaggctacattgcccagtatctgaacaaggagacgattggcaaatttttccaggccgatattgcagagaacgccttaaagaactctagcgaaaccgaaatccccacagtttcggttctcgctgacgaagaatttctgcccttcaaagagaatacctttgatcttgtcgtatctagtttgtcgctgcattgggtgaacgaccttccacgggcactggagcagattcattacatcctaaagccagatggtgtctttatcggcgcaatgttcggaggggacaccctctacgaactgcgctgctccctccagctggcagagacagagcgggaaggcggattttcacctcatatctcgccgttcacagccgtgaatgacttaggccacctcctcggcagagcagggttcaacacattgaccgtagacaccgatgagatccaggtaaactatcccggaatgttcgagctcatggaagacctgcaggaacagaagagtaggatgctgacctag

SEQ ID NO: 322565 - DNA, 804 bp, Artificial Sequence
  derived and/or modified sequence
atgctgagacccgccggcctgtggagactgtgcagaagaccctgggccgccagagtgcccgccgagaacctgggcagaagagaggtgaccagcggcgtgagccccagaggcagcaccagccccagaaccctgaacatcttcgacagagacctgaagagaaagcagaagaactgggccgccagacagcccgagcccaccaagttcgactacctgaaggaggaggtgggcagcagaatcgccgacagagtgtacgacatccccagaaacttccccctggccctggacctgggctgcggcagaggctacatcgcccagtacctgaacaaggagaccatcggcaagttcttccaggccgacatcgccgagaacgccctgaagaacagcagcgagaccgagatccccaccgtgagcgtgctggccgacgaggagttcctgcccttcaaggagaacaccttcgacctggtggtgagcagcctgagcctgcactgggtgaacgacctgcccagagccctggagcagatccactacatcctgaagcccgacggcgtgttcatcggcgccatgttcggcggcgacaccctgtacgagctgagatgcagcctgcagctggccgagaccgagagagagggcggcttcagcccccacatcagccccttcaccgccgtgaacgacctgggccacctgctgggcagagccggcttcaacaccctgaccgtggacaccgacgagatccaggtgaactaccccggcatgttcgagctgatggaggacctgcaggagcagaagagcagaatgctgacctag

SEQ ID NO: 322566 - protein, 96 aa, Artificial Sequence
  derived and/or modified sequence
MGWRPRRARGTPLLLLLLLLLLWPVPGAGVLQGHIPGQPVTPHWVLDGQPWRTVSLEEPVSKPDMGLVALEAEGQELLLELEKNQFAIATITATVL

SEQ ID NO: 322567 - DNA, 336 bp, Artificial Sequence
  derived and/or modified sequence
atggggtggcggcctagacgtgcacgcggcactccactgcttcttcttctgctgctcctattactgtggcctgtccccggagccggcgtgctccagggccatatacctggccagcctgtgacaccccactgggtgctggacgggcagccgtggagaactgtcagtcttgaagagcccgttagcaaacctgatatggggttggtcgccttggaagctgaaggccaggagcttttactagagcttgaaaagaaccagttactcgccccagggtacatcgaaacccactatgggcccgcacaggaatgtagagacctgtgctgcttcgcgcataactag

SEQ ID NO: 322568 - DNA, 336 bp, Artificial Sequence
  derived and/or modified sequence
atgggctggaggccccggcgggcccggggcacccccctgctgctgctgctgctgctgctgctgctgtggcctgtgcctggggccggcgtgctgcagggccacatccctggccagcctgtgaccccccactgggtgctggatggccagccctggaggacagtgtccctggaggagcctgtgtccaagccagacatgggcctggtggccctggaggccgagggccaggagctgctgctggagctggagaagaaccagctgctggcccctggctacatcgagacccactacggccctgcccaggagtgccgggacctgtgctgctttgcccacaactag

SEQ ID NO: 322569 - DNA, 336 bp, Artificial Sequence
  derived and/or modified sequence
atgggctggcggccccggcgggcccggggcacccccctgctgctgctgctgctgttactgttgttgtggcccgtgcctggagccggcgtgcttcagggacatatacccggccaacctgtgacacctcactgggttctggatggtcagccttggagaacagttagtttggaggaaccggtctcaaagcccgacatgggactcgtggcactagaagcggagggccaggaactgctgctggaactcgaaaagaaccagctgcttgctccagggtacatagaaacccattacggccccgcacaggagtgccgcgatctctgctgttttgcccataactag

SEQ ID NO: 322570 - DNA, 336 bp, Artificial Sequence
  derived and/or modified sequence
atgggatggcgccctcgacgcgctcgagggacgccattgcttctgctcctccttttactgctcctctggcccgtaccaggcgctggtgtgctgcaaggccatattccaggtcaacctgtgacgccacactgggtcttagacggacagccctggcgtaccgtatccctagaggaacccgtctctaaaccggatatgggccttgtggccttggaagctgaaggccaagagcttctcctcgaactggagaagaaccagctgttagctcctggctatatagaaacccattatgggccagcccaggagtgcagagacctttgttgcttcgcccacaattag

SEQ ID NO: 322571 - DNA, 336 bp, Artificial Sequence
  derived and/or modified sequence
atgggctggagacccagaagagccagaggcacccccctgctgctgctgctgctgctgctgctgctgtggcccgtgcccggcgccggcgtgctgcagggccacatccccggccagcccgtgaccccccactgggtgctggacggccagccctggagaaccgtgagcctggaggagcccgtgagcaagcccgacatgggcctggtggccctggaggccgagggccaggagctgctgctggagctggagaagaaccagctgctggcccccggctacatcgagacccactacggccccgcccaggagtgcagagacctgtgctgcttcgcccacaactag

SEQ ID NO: 322572 - DNA, 380 bp, Artificial Sequence
  derived and/or modified sequence
gagccggagttgcgagccgctgcctagaggccgaggagctcacagctatgggctggaggccccggagagctcgggggaccccgttgctgctgctgctactactgctgctgctctggccagtgccaggcgccggggtgcttcaaggacatatccctgggcagccagtcaccccgcactgggtcctggatggacaaccctggcgcaccgtcagcctggaggagccggtctcgaagccagacatggggctggtggccctggaggctgaaggccaggagctcctgcttgagctggagaagaaccagctgctggccccaggatacatagaaacccactacggcccagcccaggagtgccgcgacctctgctgctttgctcacaac

SEQ ID NO: 322573 - protein, 180 aa, Artificial Sequence
  derived and/or modified sequence
MGWRPRRARGTPLLLLLLLLLLWPVPGAGVLQGHIPGQPVTPHWVLDGQPWRTVSLEEPVSKPDMGLVALEAEGQELLLELEKNQLLAPGYIETHYGPDGQPVVLAPNHTVRCFHGLWDAPPEGRREARRTRKYLELYIVADHTLFLTRHRNLNHTKQRLLEVANYVDQECRDLCCFAHN

SEQ ID NO: 322574 - protein, 173 aa, Artificial Sequence [sequence omitted]

SEQ ID NO: 322575 - DNA, 540 bp, Artificial Sequence
  derived and/or modified sequence
atgggttggcgcccaagaagagccagaggcactcccctgctcctcctactgctgctgctactcctgtggccagtgcccggcgccggggtccttcagggccacattcctgggcagcccgtcaccccccattgggtactcgacgggcaaccgtggcgcacagttagcttagaggaaccggtcagcaagcctgatatgggcctggtcgcattggaggcagaaggccaggagctgttactggagctcgaaaagaaccagctcttggcccctggctatatcgaaacccactacggccccgacggccagcctgtcgtcctggcacctaaccacaccgtacgttgcttccacgggttgtgggacgcaccccctgaagggcgccgcgaggcaaggcgcacacggaaatacttggagctgtacattgtggcagaccacacgctgttccttacgaggcaccgaaacctgaatcatacgaagcaacgtctgctcgaggtagcaaactatgtggaccaggtcgttaacagcgcaggagatgctcacggttag

SEQ ID NO: 322576 - DNA, 417 bp, Artificial Sequence
  derived and/or modified sequence
atgggctggcgcccacgaagagctagagggacccctctgctcctcctccttctccttctgttgctctggcccgttccaggtgctggtgtactacagggacatataccaggacagccggtgacccctcattgggtgcttgacggccaaccatggagaaccgtgtccttggaggagccagtgtctaaaccagacatgggcttagttgccctggaggctgaggggcaagaattactactggagctcgaaaaaaatcataggctgcttgcccccggttatatcgagacacattatgggccagacgggcaacctgtggtgctggctccgaatcacactgtgcggtgcttccacggactttgggatgccccgcccgaagtcccgccacatcattcctatccttattctagcctacacagctag

SEQ ID NO: 322577 - DNA, 543 bp, Artificial Sequence
  derived and/or modified sequence
atgggttggaggccaaggcgcgctcgcggcacacccctgctgctgctcctcttgcttctgttgctatggcctgtgccaggagcaggggttctgcaaggtcacatccctggtcagccagtgaccccacactgggttctagatggccagccctggcgaacagtgtcactcgaagagccagttagcaagcccgatatgggactggtggcacttgaagccgagggacaggaactgctgcttgaactggaaaagaaccagcttctggccccggggtacatagaaactcactacggaccagatggccagcctgtcgtgctggctcccaatcatacagtccgctgcttccacgggctgtgggatgctcccccagagggaagacgcgaggcccggcgcacccggaagtacctggaactctacatcgtagccgatcacaccttgttcttaactcggcatcggaatctgaatcacacaaagcaacgattgctggaggttgcaaattacgtggaccaagaatgtcgcgacctctgctgctttgcacacaactag

SEQ ID NO: 322578 - DNA, 522 bp, Artificial Sequence
  derived and/or modified sequence
atgggctggcgtccgcggcgcgcaagagggacgccactactccttttgctgctcttgctgctgttgtggccagtgcctggcgccggcgttctgcaggggcatataccggggcagcctgtcactccacactgggtgcttgatgggcagccctggaggacggtgtcactcgaggagcctgtgtccaaaccagatatggggctggtagccctggaagctgagggtcaagagctgctgctggagttggaaaagaaccataggctgcttgccccaggctatatcgagacacattacgggcccgatggtcaacccgtcgtccttgcgcctaaccacaccgttcggtgttttcatggtctctgggacgctccacccgaggaccactgccactaccagggtcgcgtgcgtggctttccggatagctgggtggttctgtgcacatgcagcggcatgcgggctggcgaaaagcgcgcggggccaggcagtacgtggaattgcacgctctggcagactaccccctgcagctag

SEQ ID NO: 322579 - DNA, 291 bp, Artificial Sequence
  derived and/or modified sequence
atggggtggcggccacggcgtgccagagggacaccactcctgcttctgctactacttctcttactatggcccgtgcccggcgccggcgtcttacagggccatatccctgggcaacctgtgacaccccattgggtcttggacgggcagccctggcgaacagttagccttgaagaacccgtgtctaagcctgatatgggattagttgccctcgaagccgaaggccaggaactgctcctggagctcgaaaagaatcagttcgcaatagccactattaccgccaccgttctgtag

SEQ ID NO: 322580 - DNA, 540 bp, Artificial Sequence
  derived and/or modified sequence
atgggctggaggccccggcgggcccggggcacccccctgctgctgctgctgctgctgctgctgctgtggcctgtgcctggggccggcgtgctgcagggccacatccctggccagcctgtgaccccccactgggtgctggatggccagccctggaggacagtgtccctggaggagcctgtgtccaagccagacatgggcctggtggccctggaggccgagggccaggagctgctgctggagctggagaagaaccagctgctggcccctggctacatcgagacccactacggcccagatggccagcctgtggtgctggcccccaaccacacagtgcgctgcttccacggcctgtgggatgcccctcctgagggcagaagagaggcccggaggaccaggaagtacctggagctgtacatcgtggccgaccacaccctcttcctgaccaggcacaggaacctgaaccacaccaagcagaggctgctggaggtggccaactacgtggaccaggtggtgaacagcgctggagatgcccacggctag

SEQ ID NO: 322581 - DNA, 417 bp, Artificial Sequence
  derived and/or modified sequence
atgggctggaggccccggcgggcccggggcacccccctgctgctgctgctgctgctgctgctgctgtggcctgtgcctggggccggcgtgctgcagggccacatccctggccagcctgtgaccccccactgggtgctggatggccagccctggaggacagtgtccctggaggagcctgtgtccaagccagacatgggcctggtggccctggaggccgagggccaggagctgctgctggagctggagaagaaccaccggctgctggcccctggctacatcgagacccactacggcccagatggccagcctgtggtgctggcccccaaccacacagtgcgctgcttccacggcctgtgggatgcccctcctgaggtgcccccccaccacagctacccctacagcagcctgcacagctag

SEQ ID NO: 322582 - DNA, 543 bp, Artificial Sequence
  derived and/or modified sequence
atgggctggaggccccggcgggcccggggcacccccctgctgctgctgctgctgctgctgctgctgtggcctgtgcctggggccggcgtgctgcagggccacatccctggccagcctgtgaccccccactgggtgctggatggccagccctggaggacagtgtccctggaggagcctgtgtccaagccagacatgggcctggtggccctggaggccgagggccaggagctgctgctggagctggagaagaaccagctgctggcccctggctacatcgagacccactacggcccagatggccagcctgtggtgctggcccccaaccacacagtgcgctgcttccacggcctgtgggatgcccctcctgagggcagaagagaggcccggaggaccaggaagtacctggagctgtacatcgtggccgaccacaccctcttcctgaccaggcacaggaacctgaaccacaccaagcagaggctgctggaggtggccaactacgtggaccaggagtgccgggacctgtgctgctttgcccacaactag

SEQ ID NO: 322583 - DNA, 522 bp, Artificial Sequence
  derived and/or modified sequence
atgggctggaggccccggcgggcccggggcacccccctgctgctgctgctgctgctgctgctgctgtggcctgtgcctggggccggcgtgctgcagggccacatccctggccagcctgtgaccccccactgggtgctggatggccagccctggaggacagtgtccctggaggagcctgtgtccaagccagacatgggcctggtggccctggaggccgagggccaggagctgctgctggagctggagaagaaccaccggctgctggcccctggctacatcgagacccactacggcccagatggccagcctgtggtgctggcccccaaccacacagtgcgctgcttccacggcctgtgggatgcccctcctgaggaccactgccactaccagggccgggtgcggggcttcccagacagctgggtggtgctgtgcacctgcagcggcatgagagctggggagaagagagctggccctggcagcacctggaactgcaccctgtggcagaccaccccctgcagctag

SEQ ID NO: 322584 - DNA, 291 bp, Artificial Sequence
  derived and/or modified sequence
atgggctggaggccccggcgggcccggggcacccccctgctgctgctgctgctgctgctgctgctgtggcctgtgcctggggccggcgtgctgcagggccacatccctggccagcctgtgaccccccactgggtgctggatggccagccctggaggacagtgtccctggaggagcctgtgtccaagccagacatgggcctggtggccctggaggccgagggccaggagctgctgctggagctggagaagaaccagtttgccatcgccaccatcacagccaccgtgctgtag

SEQ ID NO: 322585 - DNA, 540 bp, Artificial Sequence
  derived and/or modified sequence
atgggctggcggccccggcgggcccggggcacccccctgctgctgctcctcttgctcttgttgctgtggcccgttccaggcgccggggtcctccagggacacatacccggacagcccgtgacaccccactgggtgctcgacggccagccttggcggacagtcagtctggaggaaccagtcagcaagcctgacatgggcctggtcgctttagaggctgagggccaggagctgctgttggaactcgagaaaaaccagctgctggcaccgggctatattgagacccactacgggcctgacggacagcctgtggtgctcgcccccaaccataccgttcgctgctttcacggtctgtgggatgcacctcccgagggcagacgtgaggcccgtcgcactcgtaagtatctggagctctacattgtagcagatcatacactatttctcacaaggcatcggaatctgaaccacaccaagcagagattattggaagtagcaaactacgtcgaccaggtggtgaactctgctggggacgcccacggttag

SEQ ID NO: 322586 - DNA, 417 bp, Artificial Sequence
  derived and/or modified sequence
atgggctggcggccccggcgggcccggggcacccccctgctgctgctgctccttctcttgctgctgtggccagttccaggagctggcgtgctgcagggacacattccggggcagcctgttaccccccactgggtacttgacggccaaccctggcgaaccgtctcactggaagagcctgtttctaagccagacatgggcctcgtggctctggaggctgagggacaggagctcctactcgagttagaaaagaatcatagactgctggcacccgggtatatcgaaacacactatggtcctgacggccagccagtggtgttggctccaaatcacactgtccgatgtttccacggactctgggatgcacccccagaagtgccgccgcatcattcatacccgtactcgtcgctgcattcctag

SEQ ID NO: 322587 - DNA, 543 bp, Artificial Sequence
  derived and/or modified sequence
atgggctggcggccccggcgggcccggggcacccccctgctgctgctgttgttacttctcttgttgtggccagtccctggagccggagtcctgcaggggcacataccaggacaacctgtcacgccccactgggtactcgacgggcagccctggcgtactgtcagccttgaagaacccgtgagcaaaccagatatggggctggtcgctctagaggccgaagggcaggagttgctactagagctagaaaagaaccaactgctggcacccggatacatcgagacacactacggcccagacggccaacctgtggttcttgccccaaaccacaccgtccgctgtttccatggcctgtgggacgcgccccctgaggggagacgtgaggcacgacggacacggaagtatttggagctctacatagttgccgaccatacactcttcctgactagacaccgaaatctgaaccataccaagcagcgcctattggaggttgcaaattacgtggatcaggaatgccgggatctgtgttgcttcgcccataattag

SEQ ID NO: 322588 - DNA, 522 bp, Artificial Sequence
  derived and/or modified sequence
atgggctggcggccccggcgggcccggggcacccccctgctgctgcttctccttctgcttctactttggccagtccccggcgccggcgttctacagggccacatccccgggcagccagtgacacctcactgggtgttagacggtcaaccctggcggaccgtgtcgcttgaggaacccgtatccaagcccgatatggggttggtcgccttggaggccgaggggcaagaactgttgctggagctcgaaaagaatcaccgcctgctggctcctggttacatcgagactcactacggcccagacggccagcccgtggtcctcgcccccaaccacaccgtgcgatgcttccacggcctgtgggatgctcctcccgaggaccactgccattatcagggccgagtgcgtggctttcccgattcttgggtggtgctatgtacctgcagcggcatgagagccggggaaaaacgagcaggtcctggttccacatggaattgcaccttgtggcaaaccacaccctgcagctag

SEQ ID NO: 322589 - DNA, 291 bp, Artificial Sequence
  derived and/or modified sequence
atgggctggcggccccggcgggcccggggcacccccctgctgctgctcctgctgttgttactgctctggccagtacctggggcaggagtgctgcaaggacatatcccaggccagccagtgacacctcactgggtgctggatggccaaccgtggcgaaccgtctcgttggaggagcctgttagtaagccggacatgggcctggttgctttggaagccgagggacaggaattgttgctggagctggaaaaaaatcagttcgccatcgcaacgattactgctaccgttctctag

SEQ ID NO: 322590 - DNA, 540 bp, Artificial Sequence
  derived and/or modified sequence
atgggttggagacctcgtagggccagagggaccccgctcttgctattgctgctgctgttattattgtggcctgtcccgggagctggcgtgcttcaaggacacatccctggacagcctgtgacaccacattgggttttggacggccagccatggagaaccgtgtcccttgaggagccagtgagcaaaccagacatgggactcgtggctctcgaagcagaggggcaggaattgctgcttgaactcgaaaagaaccagcttctggctccaggctatatcgagacacattacggtcctgacggtcagcctgttgtgctcgcgccaaaccataccgtccgttgtttccatggtctgtgggacgctccacccgagggtcgcagggaggcgcgacgcacgagaaaatacttagaactgtacattgtggccgaccatacactgttcttgacccgacatcgcaatctaaatcacacgaagcagaggctgctggaagtggctaattatgtggaccaggttgtgaactcagccggtgacgcccatgggtag

SEQ ID NO: 322591 - DNA, 417 bp, Artificial Sequence
  derived and/or modified sequence
atgggatggagacccaggcgggcaagaggcacccctctgctgctgctactgttgctcctgctactctggcctgtgcctggagctggcgtgctccaggggcatattcccggacagccggtgacaccacactgggtcctggatggccagccatggcgtaccgtgagcttggaggaacctgtctccaaacccgatatgggtttagtggctcttgaggctgagggccaggaactgctcctggaactcgaaaaaaatcaccgactcttagcgcctggctacatcgagactcactatggccctgatgggcagccggtggtcctggcccctaaccataccgtgcggtgcttccacggcctctgggacgcacctcccgaggtcccaccccaccatagctacccctatagttctctgcattcatag

SEQ ID NO: 322592 - DNA, 543 bp, Artificial Sequence
  derived and/or modified sequence
atgggatggagacctagaagagccaggggtactccgctgttgctgcttctgcttctgctcctgctgtggcctgtgccaggggcaggcgtgctgcaaggccatatccctggccagcctgtgacaccacattgggtgctggatgggcaaccttggaggacagtgtctcttgaagagccagtttcaaagccagacatgggcctggtggctctggaagccgaggggcaggagctacttctcgaactggagaagaatcagctgttggctcctggttatatagaaacccactacggacccgatggtcaacccgtagtcctggcacctaaccatacggtgagatgcttccatggattgtgggatgcacccccagagggtcgccgagaggccaggcgcacacgaaagtacctcgagctgtatatcgtggccgatcacactcttttcttgactcggcacaggaacctgaaccacaccaagcaaagactcttggaagtggccaattacgtggatcaagagtgccgcgacctgtgctgctttgcacacaactag

SEQ ID NO: 322593 - DNA, 522 bp, Artificial Sequence
  derived and/or modified sequence
atgggttggaggccaaggcgcgctaggggaacccctctgttgctgctgcttcttctgctgctgctttggcctgtgcccggtgccggagtgctgcagggtcacattcctggacagcccgtcacccctcattgggttctcgatggccagccttggaggactgtttctctggaggaaccagtctctaaaccagatatgggccttgttgcgctagaagcagaggggcaggaactgttactagaattggagaaaaaccatcgactgctcgcaccaggatacattgaaacccattacggcccagacggtcaaccagtggtcctggctcctaaccacacggtgcgatgctttcacgggctatgggacgcccctcctgaagatcactgccactatcagggcagagtccggggattccctgatagttgggtggtattatgtacttgctccgggatgagagccggtgagaagcgtgccggacccggttccacttggaactgcaccctgtggcagacgaccccatgctcatag

SEQ ID NO: 322594 - DNA, 291 bp, Artificial Sequence
  derived and/or modified sequence
atgggctggaggcccagacgcgctcggggtacgcctttgctcctgctgctcctgttgctgctgctctggcccgttccaggtgccggagtcttgcaggggcacatcccaggccaacctgtgactccacactgggttctggatggtcagccttggcgaactgtgtctcttgaagaacccgtcagcaaaccagacatgggtctagtagctctggaagcagagggacaagaattgctgttggagctagaaaagaaccaatttgcgatcgccaccataaccgccacagtactttag

SEQ ID NO: 322595 - DNA, 540 bp, Artificial Sequence
  derived and/or modified sequence
atgggctggagacccagaagagccagaggcacccccctgctgctgctgctgctgctgctgctgctgtggcccgtgcccggcgccggcgtgctgcagggccacatccccggccagcccgtgaccccccactgggtgctggacggccagccctggagaaccgtgagcctggaggagcccgtgagcaagcccgacatgggcctggtggccctggaggccgagggccaggagctgctgctggagctggagaagaaccagctgctggcccccggctacatcgagacccactacggccccgacggccagcccgtggtgctggcccccaaccacaccgtgagatgcttccacggcctgtgggacgccccccccgagggcagaagagaggccagaagaaccagaaagtacctggagctgtacatcgtggccgaccacaccctgttcctgaccagacacagaaacctgaaccacaccaagcagagactgctggaggtggccaactacgtggaccaggtggtgaacagcgccggcgacgcccacggctag

SEQ ID NO: 322596 - DNA, 417 bp, Artificial Sequence
  derived and/or modified sequence
atgggctggagacccagaagagccagaggcacccccctgctgctgctgctgctgctgctgctgctgtggcccgtgcccggcgccggcgtgctgcagggccacatccccggccagcccgtgaccccccactgggtgctggacggccagccctggagaaccgtgagcctggaggagcccgtgagcaagcccgacatgggcctggtggccctggaggccgagggccaggagctgctgctggagctggagaagaaccacagactgctggcccccggctacatcgagacccactacggccccgacggccagcccgtggtgctggcccccaaccacaccgtgagatgcttccacggcctgtgggacgccccccccgaggtgcccccccaccacagctacccctacagcagcctgcacagctag

SEQ ID NO: 322597 - DNA, 543 bp, Artificial Sequence
  derived and/or modified sequence
atgggctggagacccagaagagccagaggcacccccctgctgctgctgctgctgctgctgctgctgtggcccgtgcccggcgccggcgtgctgcagggccacatccccggccagcccgtgaccccccactgggtgctggacggccagccctggagaaccgtgagcctggaggagcccgtgagcaagcccgacatgggcctggtggccctggaggccgagggccaggagctgctgctggagctggagaagaaccagctgctggcccccggctacatcgagacccactacggccccgacggccagcccgtggtgctggcccccaaccacaccgtgagatgcttccacggcctgtgggacgccccccccgagggcagaagagaggccagaagaaccagaaagtacctggagctgtacatcgtggccgaccacaccctgttcctgaccagacacagaaacctgaaccacaccaagcagagactgctggaggtggccaactacgtggaccaggagtgcagagacctgtgctgcttcgcccacaactag

SEQ ID NO: 322598 - DNA, 522 bp, Artificial Sequence
  derived and/or modified sequence
atgggctggagacccagaagagccagaggcacccccctgctgctgctgctgctgctgctgctgctgtggcccgtgcccggcgccggcgtgctgcagggccacatccccggccagcccgtgaccccccactgggtgctggacggccagccctggagaaccgtgagcctggaggagcccgtgagcaagcccgacatgggcctggtggccctggaggccgagggccaggagctgctgctggagctggagaagaaccacagactgctggcccccggctacatcgagacccactacggccccgacggccagcccgtggtgctggcccccaaccacaccgtgagatgcttccacggcctgtgggacgccccccccgaggaccactgccactaccagggcagagtgagaggcttccccgacagctgggtggtgctgtgcacctgcagcggcatgagagccggcgagaagagagccggccccggcagcacctggaactgcaccctgtggcagaccaccccctgcagctag

SEQ ID NO: 322599 - DNA, 291 bp, Artificial Sequence
  derived and/or modified sequence
atgggctggagacccagaagagccagaggcacccccctgctgctgctgctgctgctgctgctgctgtggcccgtgcccggcgccggcgtgctgcagggccacatccccggccagcccgtgaccccccactgggtgctggacggccagccctggagaaccgtgagcctggaggagcccgtgagcaagcccgacatgggcctggtggccctggaggccgagggccaggagctgctgctggagctggagaagaaccagttcgccatcgccaccatcaccgccaccgtgctgtag

SEQ ID NO: 322600 - DNA, 542 bp, Artificial Sequence
  derived and/or modified sequence
cagctatgggctggaggccccggagagctcgggggaccccgttgctgctgctgctactactgctgctgctctggccagtgccaggcgccggggtgcttcaaggacatatccctgggcagccagtcaccccgcactgggtcctggatggacaaccctggcgcaccgtcagcctggaggagccggtctcgaagccagacatggggctggtggccctggaggctgaaggccaggagctcctgcttgagctggagaagaaccagctgctggccccaggatacatagaaacccactacggcccagatgggcagccagtggtgctggcccccaaccacacggtgagatgcttccatgggctctgggatgcaccgccagagggcaggcgagaagcgcgcaggacccggaagtacctggaactgtacattgtggcagaccacaccctgttcttgactcggcaccgaaacttgaaccacaccaaacagcgtctcctggaagtcgccaactacgtggaccaggtggtgaactctgcgggagatgctcatgga

SEQ ID NO: 322601 - DNA, 456 bp, Artificial Sequence
  derived and/or modified sequence
atgggatggaggccgaggagagcccgcggcactcccctgctgctcttgttactgctcctgttgctgtggcctgtgccaggagcaggggtactccagggacacatacccggccagccggtaacaccccactgggtgctggacggccaaccttggcgcaccgtgtccttggaggaaccagtctcaaagccagatatgggactggtcgctctggaggcggaaggtcaggagctgctgttagagctggaaaaaaaccaggatgctctttgcgggaagctgcaatgccagggcgggaagccaagcctccttgctccacacatggtacccgtagactctacagttcacctagatggacaggaagtcacctgccgaggggctcttgcactgccgagcgcccagctggacctgctggggctgggactggtcgaacccggtacccagtgtgggccacggatgtag

SEQ ID NO: 322602 - DNA, 456 bp, Artificial Sequence
  derived and/or modified sequence
atgggctggaggccccggcgggcccggggcacccccctgctgctgctgctgctgctgctgctgctgtggcctgtgcctggggccggcgtgctgcagggccacatccctggccagcctgtgaccccccactgggtgctggatggccagccctggaggacagtgtccctggaggagcctgtgtccaagccagacatgggcctggtggccctggaggccgagggccaggagctgctgctggagctggagaagaaccaggatgccctgtgtgggaagctgcagtgccagggcggcaagcccagcctgctggccccccacatggtgcctgtggacagcacagtgcacctggatggccaggaggtgacctgccgcggggccctggccctgcccagcgcccagctggacctgctgggcctgggcctggtggagcccggcacccagtgtggccccaggatgtag

SEQ ID NO: 322603 - DNA, 456 bp, Artificial Sequence
  derived and/or modified sequence
atgggctggcggccccggcgggcccggggcacccccctgctgctgctcctactgttgctcctactgtggcccgtaccaggtgccggggttttgcaggggcacatcccaggccagcctgtgaccccccattgggtcctcgatggacagccctggcggacagtgagtctcgaagaacccgtgagtaagcccgatatggggctagtggctctggaggccgaagggcaggaacttctgctggaactcgaaaagaatcaggacgctctctgcggtaagttgcaatgccagggtgggaaaccgagtctactggcgcctcatatggttcctgttgactccaccgtgcatctggacgggcaagaagtgacttgccgaggagccttggctctccctagtgctcagctggatctgttggggctaggtctggtggaacccggtactcagtgcggtccacggatgtag

SEQ ID NO: 322604 - DNA, 456 bp, Artificial Sequence
  derived and/or modified sequence
atggggtggaggcctaggcgtgccaggggtacccccctgttgctgctgctgctattactgttattatggcccgtaccgggtgccggtgtgctgcaaggccacatccctggtcaaccggtaaccccacattgggttctcgacggacaaccctggcgcacagtttctctggaggaaccagtgagcaaacctgatatgggcctggtggccttagaagctgaaggtcaggagctgctgttggagctcgagaagaaccaggacgccctgtgtggaaaattacagtgtcaggggggaaaacccagcctcctggctccccacatggtgcctgtcgacagcaccgtgcacctcgatgggcaagaggtgacttgcaggggggcactggccctgcctagtgcccagctggacctcttgggacttggattggtcgagcccggaactcagtgtggaccgaggatgtag

SEQ ID NO: 322605 - DNA, 456 bp, Artificial Sequence
  derived and/or modified sequence
atgggctggagacccagaagagccagaggcacccccctgctgctgctgctgctgctgctgctgctgtggcccgtgcccggcgccggcgtgctgcagggccacatccccggccagcccgtgaccccccactgggtgctggacggccagccctggagaaccgtgagcctggaggagcccgtgagcaagcccgacatgggcctggtggccctggaggccgagggccaggagctgctgctggagctggagaagaaccaggacgccctgtgcggcaagctgcagtgccagggcggcaagcccagcctgctggccccccacatggtgcccgtggacagcaccgtgcacctggacggccaggaggtgacctgcagaggcgccctggccctgcccagcgcccagctggacctgctgggcctgggcctggtggagcccggcacccagtgcggccccagaatgtag

SEQ ID NO: 322606 - DNA, 1971 bp, Artificial Sequence
  derived and/or modified sequence
gagccggagttgcgagccgctgcctagaggccgaggagctcacagctatgggctggaggccccggagagctcgggggaccccgttgctgctgctgctactactgctgctgctctggccagtgccaggcgccggggtgcttcaaggacatatccctgggcagccagtcaccccgcactgggtcctggatggacaaccctggcgcaccgtcagcctggaggagccggtctcgaagccagacatggggctggtggccctggaggctgaaggccaggagctcctgcttgagctggagaagaaccacaggctgctggccccaggatacatagaaacccactacggcccagatgggcagccagtggtgctggcccccaaccacacggtgagatgcttccatgggctctgggatgcaccgccagaggtacccccccaccattcctacccctactcctccttgcattcctaaggggcggttggagccagcccctaccacaccctccctcttgcccctcttgctccagccctggctgagatttggggctggccccttcctccctaggatcattgccactaccaagggcgagtaaggggcttccccgactcctgggtagtcctctgcacctgctctgggatgaggtgagctctgggagaggaggctgggcctgggatggggaaagagctccctcacacccgctcctacccctctgcaccctagtggcctgatcaccctcagcaggaatgccagctattatctgcgtccctggccaccccggggctccaaggacttctcaacccacgagatctttcggatggagcagctgctcacctggaaaggaacctgtggccacagggatcctgggaacaaagcgggcatgaccagccttcctggtggtccccagagcagggtcaggggcatcgatcggatgggagtgggaatgctgtatctatagccctccaaatcagaagagacgggaattcacaggcctcgagtcccagtatttttattgaagtctgaagaaacaagttccagaaaacatgttaaacttccttctgggagctgggattggtggtcagggctcaagcccagcagcttccacgagcttcagcgctgcctgactgcctgccacagccacggggtttgcaatagcaaccataactgccactgtgctccaggctgggctccacccttctgtgacaagccaggctttggtggcagcatggacagtggccctgtgcaggctgaaaaccatgacaccttcctgctggccatgctcctcagcgtcctgctgcctctgctcccaggggccggcctggcctggtgttgctaccgactcccaggagcccatctgcagcgatgcagctggggctgcagaagggaccctgcgtgcagtggccccaaagatggcccacacagggaccaccccctgggcggcgttcaccccatggagttgggccccacagccactggacagccctggcccctggaccctgagaactctcatgagcccagcagccaccctgagaagcctctgccagcagtctcgcctgacccccaagatcaagtccagatgccaagatcctgcctctggtgagaggtagctcctaaaatgaacagatttaaagacaggtggccactgacagccactccaggaacttgaactgcaggggcagagccagtgaatcaccggacctccagcacctgcaggcagcttggaagtttcttccccgagtggagcttcgacccacccactccaggaacccagagccacattagaagttcctgagggctggagaacactgctgggcacactctccagctcaataaaccatcagtcccagaagcaaaggtcacacagcccctgacctccctcaccagtggaggctgggtagtgctggccatcccaaaagggctctgtcctgggagtctggtgtgtctcctacatgcaatttccacggacccagctctgtggagg

SEQ ID NO: 322607 - DNA, 2619 bp, Artificial Sequence
  derived and/or modified sequence
cagctatgggctggaggccccggagagctcgggggaccccgttgctgctgctgctactactgctgctgctctggccagtgccaggcgccggggtgcttcaaggacatatccctgggcagccagtcaccccgcactgggtcctggatggacaaccctggcgcaccgtcagcctggaggagccggtctcgaagccagacatggggctggtggccctggaggctgaaggccaggagctcctgcttgagctggagaagaaccagctgctggccccaggatacatagaaacccactacggcccagatgggcagccagtggtgctggcccccaaccacacggtgagatgcttccatgggctctgggatgcaccgccagagggcaggcgagaagcgcgcaggacccggaagtacctggaactgtacattgtggcagaccacaccctgttcttgactcggcaccgaaacttgaaccacaccaaacagcgtctcctggaagtcgccaactacgtggaccaggagtgccgcgacctctgctgctttgctcacaactgctcgctgcgcccgggggcccagtgcgcccacggggactgctgcgtgcgctgcctgctgaagccggctggagcgctgtgccgccaggccatgggtgactgtgacctccctgagttttgcacgggcacctcctcccactgtcccccagacgtttacctactggacggctcaccctgtgccaggggcagtggctactgctgggatggcgcatgtcccacgctggagcagcagtgccagcagctctgggggcctggctcccacccagctcccgaggcctgtttccaggtggtgaactctgcgggagatgctcatggaaactgcggccaggacagcgagggccacttcctgccctgtgcagggagggatgccctgtgtgggaagctgcagtgccagggtggaaagcccagcctgctcgcaccgcacatggtgccagtggactctaccgttcacctagatggccaggaagtgacttgtcggggagccttggcactccccagtgcccagctggacctgcttggcctgggcctggtagagccaggcacccagtgtggacctagaatggtgtgccagagcaggcgctgcaggaagaatgccttccaggagcttcagcgctgcctgactgcctgccacagccacggggtttgcaatagcaaccataactgccactgtgctccaggctgggctccacccttctgtgacaagccaggctttggtggcagcatggacagtggccctgtgcaggctgaaaaccatgacaccttcctgctggccatgctcctcagcgtcctgctgcctctgctcccaggggccggcctggcctggtgttgctaccgactcccaggagcccatctgcagcgatgcagctggggctgcagaagggaccctgcgtgcagtggccccaaagatggcccacacagggaccaccccctgggcggcgttcaccccatggagttgggccccacagccactggacagccctggcccctggaccctgagaactctcatgagcccagcagccaccctgagaagcctctgccagcagtctcgcctgacccccaagatcaagtccagatgccaagatcctgcctctggtgagaggtagctcctaaaatgaacagatttaaagacaggtggccactgacagccactccaggaacttgaactgcaggggcagagccagtgaatcaccggacctccagcacctgcaggcagcttggaagtttcttccccgagtggagcttcgacccacccactccaggaacccagagccacattagaagttcctgagggctggagaacactgctgggcacactctccagctcaataaaccatcagtcccagaagcaaaggtcacacagcccctgacctccctcaccagtggaggctgggtagtgctggccatcccaaaagggctctgtcctgggagtctggtgtgtctcctacatgcaatttccacggacccagctctgtggagggcatgactgctggccagaagctagtggtcctggggccctatggttcgactgagtccacactcccctggagcctggctggcctctgcaaacaaacataattttggggaccttccttcctgtttcttcccaccctgtcttctcccctaggtggttcctgagcccccacccccaatcccagtgctacacctgaggttctggagctcagaatctgacagcctctcccccattctgtgtgtgtcggggggacagagggaaccatttaagaaaagataccaaagtagaagtcaaaagaaagacatgttggctataggcgtggtggctcatgcctataatcccagcactttgggaagccggggtaggaggatcaccagaggccagcaggtccacaccagcctgggcaacacagcaagacaccgcatctacagaaaaattttaaaattagctgggcgtggtggtgtgtacctgtaggcctagctgctcaggaggctgaagcaggaggatcacttgagcctgagttcaacactgcagtgagctatggtggcaccactgcactccagcctgggtgacagagcaagaccctgtctctaaaataaatttt

SEQ ID NO: 322608 - DNA, 2078 bp, Artificial Sequence
  derived and/or modified sequence
cggcggcctgaggctgcaccgggcacgggtcggccgcaatccagcctgggcggagccggagttgcgagccgctgcctagaggccgaggagctcacagctatgggctggaggccccggagagctcgggggaccccgttgctgctgctgctactactgctgctgctctggccagtgccaggcgccggggtgcttcaaggacatatccctgggcagccagtcaccccgcactgggtcctggatggacaaccctggcgcaccgtcagcctggaggagccggtctcgaagccagacatggggctggtggccctggaggctgaaggccaggagctcctgcttgagctggagaagaaccaggatgccctgtgtgggaagctgcagtgccagggtggaaagcccagcctgctcgcaccgcacatggtgccagtggactctaccgttcacctagatggccaggaagtgacttgtcggggagccttggcactccccagtgcccagctggacctgcttggcctgggcctggtagagccaggcacccagtgtggacctagaatggtgtgccagagcaggcgctgcaggaagaatgccttccaggagcttcagcgctgcctgactgcctgccacagccacggggtttgcaatagcaaccataactgccactgtgctccaggctgggctccacccttctgtgacaagccaggctttggtggcagcatggacagtggccctgtgcaggctgaaaaccatgacaccttcctgctggccatgctcctcagcgtcctgctgcctctgctcccaggggccggcctggcctggtgttgctaccgactcccaggagcccatctgcagcgatgcagctggggctgcagaagggaccctgcgtgcagtggccccaaagatggcccacacagggaccaccccctgggcggcgttcaccccatggagttgggccccacagccactggacagccctggcccctggaccctgagaactctcatgagcccagcagccaccctgagaagcctctgccagcagtctcgcctgacccccaagcagatcaagtccagatgccaagatcctgcctctggtgagaggtagctcctaaaatgaacagatttaaagacaggtggccactgacagccactccaggaacttgaactgcaggggcagagccagtgaatcaccggacctccagcacctgcaggcagcttggaagtttcttccccgagtggagcttcgacccacccactccaggaacccagagccacattagaagttcctgagggctggagaacactgctgggcacactctccagctcaataaaccatcagtcccagaagcaaaggtcacacagcccctgacctccctcaccagtggaggctgggtagtgctggccatcccaaaagggctctgtcctgggagtctggtgtgtctcctacatgcaatttccacggacccagctctgtggagggcatgactgctggccagaagctagtggtcctggggccctatggttcgactgagtccacactcccctggagcctggctggcctctgcaaacaaacataattttggggaccttccttcctgtttcttcccaccctgtcttctcccctaggtggttcctgagcccccacccccaatcccagtgctacacctgaggttctggagctcagaatctgacagcctctcccccattctgtgtgtgtcggggggacagagggaaccatttaagaaaagataccaaagtagaagtcaaaagaaagacatgttggctataggcgtggtggctcatgcctataatcccagcactttgggaagccggggtaggaggatcaccagaggccagcaggtccacaccagcctgggcaacacagcaagacaccgcatctacagaaaaattttaaaattagctgggcgtggtggtgtgtacctgtaggcctagctgctcaggaggctgaagcaggaggatcacttgagcctgagttcaacactgcagtgagctatggtggcaccactgcactccagcctgggtgacagagcaagaccctgtctctaaaataaattttaaaaagacat

SEQ ID NO: 322609 - DNA, 3029 bp, Artificial Sequence
  derived and/or modified sequence
agctatgggctggaggccccggagagctcgggggaccccgttgctgctgctgctactactgctgctgctctggccagtgccaggcgccggggtgcttcaaggacatatccctgggcagccagtcaccccgcactgggtcctggatggacaaccctggcgcaccgtcagcctggaggagccggtctcgaagccagacatggggctggtggccctggaggctgaaggccaggagctcctgcttgagctggagaagaaccacaggctgctggccccaggatacatagaaacccactacggcccagatgggcagccagtggtgctggcccccaaccacacggtgagatgcttccatgggctctgggatgcaccgccagaggatcattgccactaccaagggcgagtaaggggcttccccgactcctgggtagtcctctgcacctgctctgggatgagggcaggcgagaagcgcgcaggacccggaagtacctggaactgtacattgtggcagaccacaccctgttcttgactcggcaccgaaacttgaaccacaccaaacagcgtctcctggaagtcgccaactacgtggaccagggatgccctgtgtgggaagctgcagtgccagggtggaaagcccagcctgctcgcaccgcacatggtgccagtggactctaccgttcacctagatggccaggaagtgacttgtcggggagccttggcactccccagtgcccagctggacctgcttggcctgggcctggtagagccaggcacccagtgtggacctagaatggtgtgccagagcaggcgctgcaggaagaatgccttccaggagcttcagcgctgcctgactgcctgccacagccacggggtttgcaatagcaaccataactgccactgtgctccaggctgggctccacccttctgtgacaagccaggctttggtggcagcatggacagtggccctgtgcaggctgaaaaccatgacaccttcctgctggccatgctcctcagcgtcctgctgcctctgctcccaggggccggcctggcctggtgttgctaccgactcccaggagcccatctgcagcgatgcagctggggctgcagaagggaccctgcgtgcagtgggtaggctccgagcgcctgcttcctgagcctactcctgcggttcccctcctcagagctctgctggggctgtgggagctggggcaggccctcagccttgcccccaggtgcagagagcagccccagaggccatggaaagaagtagctttgaacaggaggttccagtggcctcccagtcaagcgagggggtggatccctgccccaccaccagcaccgcaaggcatggccctctacctcccagagatgggggcagagggcataacagacaggggcagggcaccacctgggccccgggtggcagctaagaggaccctgacaaagcgagttgtgattgagggtctgtgggcagaggagcaaggtggccagagcctggcgtgtcagcacggagggggcgctgcagagggtggcggctgcttctcatccccaggcgggagtctcagggcaggggagaatgttttgaaggaacatcacaggaaatgacaaggccttgggggatgggatggggacagtcaaagatggcttggaatcatcaagggcagcagggcacccaggggcaaggagagcagacatagctgccgaaggggcggacatccaaggttctttggaagctgagcgatgccagcatctggagagtgccaggctgctgtcagagcctggaggaaatgttaggactagagagaggaggtgccagccgagggcatgaggctcacttggagcctggatcccaaggctcccctgaagagggagcaggaagggagctgagagggtgacttggagcagatgggtgccccaagaaactcagtaaacgcagaactccctgggctggacaccatgctgcggggaggcaataacccactcaggatcactgtgccaacctcctggactcttatcacgttgctcagccccaaagatggcccacacagggaccaccccctgggcggcgttcaccccatggagttgggccccacagccactggacagccctggcccctggaccctgagaactctcatgagcccagcagccaccctgagaagcctctgccagcagtctcgcctgacccccaagatcaagtccagatgccaagatcctgcctctggtgagaggtagctcctaaaatgaacagatttaaagacaggtggccactgacagccactccaggaacttgaactgcaggggcagagccagtgaatcaccggacctccagcacctgcaggcagcttggaagtttcttccccgagtggagcttcgacccacccactccaggaacccagagccacattagaagttcctgagggctggagaacactgctgggcacactctccagctcaataaaccatcagtcccagaagcaaaggtcacacagcccctgacctccctcaccagtggaggctgggtagtgctggccatcccaaaagggctctgtcctgggagtctggtgtgtctcctacatgcaatttccacggacccagctctgtggagggcatgactgctggccagaagctagtggtcctggggccctatggttcgactgagtccacactcccctggagcctggctggcctctgcaaacaaacataattttggggaccttccttcctgtttcttcccaccctgtcttctcccctaggtggttcctgagcccccacccccaatcccagtgctacacctgaggttctggagctcagaatctgacagcctctcccccattctgtgtgtgtcggggggacagagggaaccatttaagaaaagataccaaagtagaagtcaaaagaaagacatgttggctataggcgtggtggctcatgcctataatcccagcactttgggaagccggggtaggaggatcaccagaggccagcaggtccacaccagcctgggcaacacagcaagacaccgcatctacag

SEQ ID NO: 322610 - DNA, 812 bp, Artificial Sequence
  derived and/or modified sequence
gctgcaccgggcacgggtcggccgcaatccagcctgggcggagccggagttgcgagccgctgcctagaggccgaggagctcacagctatgggctggaggccccggagagctcgggggaccccgttgctgctgctgctactactgctgctgctctggccagtgccaggcgccggggtgcttcaaggacatatccctgggcagccagtcaccccgcactgggtcctggatggacaaccctggcgcaccgtcagcctggaggagccggtctcgaagccagacatggggctggtggccctggaggctgaaggccaggagctcctgcttgagctggagaagaaccagtttgcaatagcaaccataactgccactgtgctccaggctgggctccacccttctgtgacaagccaggctttggtggcagcatggacagtggccctgtgcaggctgaaaaccatgacaccttcctgctggccatgctcctcagcgtcctgctgcctctgctcccaggggccggcctggcctggtgttgctaccgactcccaggagcccatctgcagcgatgcagctggggctgcagaagggaccctgcgtgcagtggccccaaagatggcccacacagggaccaccccctgggcggcgttcaccccatggagttgggccccacagccactggacagccctggcccctggaccctgagaactctcatgagcccagcagccaccctgagaagcctctgccagcagtctcgcctgacccccaagcagatcaagtccagatgccaagatcctgcctctggtgagaggtagctcct

SEQ ID NO: 322611 - DNA, 612 bp, Artificial Sequence
  derived and/or modified sequence
atgaacggggagtaccggggcaggggctttggtagaggcaggtttcagtcgtggaaacggggtcgcggaggaggcaacttctctggaaaatggagagaacgggagcatcgcccggacctaagtaagaccacaggtaagcggacaagcgaacagactccacaatttctactcagcacaaagacaccccaaagtatgcagtccacactggacaggttcattccttataaggggtggaagctgtatttcagcgaagtctactccgactcttcacccctgatcgaaaagattcaggcatttgaaaaattttttacaagacatattgatttgtacgacaaggacgagattgaacgtaagggatccatactggtggactttaaagagctcaccgaggggggcgaagtgacaaaccttattccagacattgccacagaactgcgagatgcccctgagaaaactttggcgtgtatgggcctggcaatacatcaagttctaactaaagatttagagagacacgccgcggagctgcaagcccaagaagggctgtccaatgacggggagacaatggtgaatgttcctcatattcactttctaaagaagaaaaagaagatctag

SEQ ID NO: 322612 - DNA, 612 bp, Artificial Sequence
  derived and/or modified sequence
atgaatggagagtaccggggccggggcttcggccggggccgcttccagagctggaagaggggccggggcggcggcaacttcagcggcaagtggagggagcgggagcacaggccagacctgagcaagaccaccgggaagaggaccagcgagcagaccccccagttcctgctgagcaccaagaccccccagagcatgcagagcaccctggaccgcttcatcccctacaagggctggaagctgtacttcagcgaggtgtacagcgacagcagccccctgattgagaagatccaggcctttgagaagttcttcaccaggcacatcgacctgtatgacaaggatgaaattgaaaggaagggcagcatcctggtggacttcaaggagctgacagaaggaggagaggtgaccaacctgatcccagacatcgccacagagctgagagatgcccctgagaagaccctggcctgcatgggcctggccatccaccaggtgctgaccaaggacctggagagacatgctgctgagctgcaggcccaggagggcctgagcaatgatggagagaccatggtgaatgtgccccacatccacttcctgaagaagaagaagaagatctag

SEQ ID NO: 322613 - DNA, 1181 bp, Artificial Sequence
  derived and/or modified sequence
gcggcgctgtgcgctacagacaccttctggaagctgcggtggggaaactgagtttcccgagccgttgagacagatggggttcagcaccgcgcggggacgacaggaaagctgcggctgaagagaactgcggacttggcaggagtcgcctgaggagctaagatcccggagactcttagccccgtggtgcttctctacgggagggagggagggagaatccggccggacagatctgcgcgtatcctggagccggcccagttgtgaactaggagagctttgggacctctgtcccaagcaagagagatgaatggagagtatagaggcagaggatttggacgaggaagatttcaaagctggaaaaggggaagaggtggtgggaacttctcaggaaaatggagagaaagagaacacagacctgatctgagtaaaaccacaggaaaacgtacttctgaacaaaccccacagtttttgctttcaacaaagaccccacagtcaatgcagtcaacattggatcgattcataccatataaaggctggaagctttatttctctgaagtttacagcgatagctctcctttgattgagaagattcaagcatttgaaaaatttttcacaaggcatattgatttgtatgacaaggatgaaatagaaagaaagggaagtattttggtagattttaaagaactgacagaaggtggtgaagtaactaacttgataccagatatagcaactgaactaagagatgcacctgagaaaaccttggcttgcatgggtttggcaatacatcaggtgttaactaaggaccttgaaaggcatgcagctgagttacaagcccaggaaggattgtctaatgatggagaaacaatggtaaatgtgccacatattcatttcttaaaaaaaaaaaaaaaaatttaaacttagctgggtatggtggcacatgcctatagtctcagctacttgtgaggctgaggcaggaggattctttgagcccaggagtttgaggttacagtgagccacaatcacaccaatcactgcactccagcctgggcaataaagtaactcttgactcaaaaaaataaaaaaaattgtagtggtagccatgtgttaattgttaaataaattctccaaagggctaaaagtaaattacttataaattttttatagttgtatttttgacctgcctt

SEQ ID NO: 322614 - DNA, 612 bp, Artificial Sequence
  derived and/or modified sequence
atgaacggcgagtaccggggccggggcttcggccggggccggttccagagctggaaacgcggccgcggaggcggcaatttcagcggtaagtggcgggagagagagcataggcctgacctctctaagactactggaaagcggacatcagaacagacacctcaatttttgctgagtactaaaacccctcagtctatgcagtcaactttagatcggtttatcccatataaaggctggaaactgtatttcagtgaagtctactcagattcatcaccactgatcgaaaagattcaggcatttgagaagttcttcactcgtcacatcgacctctatgacaaggatgagattgaacggaagggctccatactggtggactttaaggagctgactgaggggggagaggttacaaacctgatccctgatatcgccaccgagctacgggatgcccccgaaaaaacgctggcatgtatgggcttggctattcatcaggttttgactaaggatctggagaggcatgccgcagaacttcaggcccaagaaggcctgtccaatgacggcgagactatggtaaatgtgcctcacatccacttccttaagaagaagaaaaagatttag

SEQ ID NO: 322615 - DNA, 612 bp, Artificial Sequence
  derived and/or modified sequence
atgaatggggaataccgcggacggggattcggcagagggaggtttcagtcttggaaacgaggacggggaggtgggaatttctcaggtaagtggagagaaagggaacatcggcctgatctgagtaaaaccaccggtaaaagaacgtctgagcagaccccacagtttctcttaagtactaaaaccccacagtctatgcagtcaaccctcgaccggtttattccctataagggctggaaattgtacttttcggaggtgtactcagatagtagcccgttaattgaaaagatacaggcattcgagaaattcttcactaggcatatcgatctctatgataaggatgaaatcgaacgtaaggggagcattctcgttgacttcaaagagcttactgagggcggagaggttacaaatttgattcctgatatcgccaccgagctgcgagatgcgcctgaaaagactctggcctgtatgggactggctattcaccaggttctcacaaaggacctggaacgtcacgcggctgaacttcaggctcaggagggactgtccaatgatggcgagacaatggtcaacgtgcctcatatacatttcttgaagaagaagaagaagatctag

SEQ ID NO: 322616 - DNA, 612 bp, Artificial Sequence
  derived and/or modified sequence
atgaacggcgagtacagaggcagaggcttcggcagaggcagattccagagctggaagagaggcagaggcggcggcaacttcagcggcaagtggagagagagagagcacagacccgacctgagcaagaccaccggcaagagaaccagcgagcagaccccccagttcctgctgagcaccaagaccccccagagcatgcagagcaccctggacagattcatcccctacaagggctggaagctgtacttcagcgaggtgtacagcgacagcagccccctgatcgagaagatccaggccttcgagaagttcttcaccagacacatcgacctgtacgacaaggacgagatcgagagaaagggcagcatcctggtggacttcaaggagctgaccgagggcggcgaggtgaccaacctgatccccgacatcgccaccgagctgagagacgcccccgagaagaccctggcctgcatgggcctggccatccaccaggtgctgaccaaggacctggagagacacgccgccgagctgcaggcccaggagggcctgagcaacgacggcgagaccatggtgaacgtgccccacatccacttcctgaagaagaagaagaagatctag

SEQ ID NO: 322617 - DNA, 978 bp, Artificial Sequence
  derived and/or modified sequence
atgtcacgtctgaggcacccccggacacgctactttctcctctgtgtcaactactttttttacggtgagactgtcacagactactttttcaccctggtccagcgagaagaaccgttacgcattcttagcaaataccatcgattcattagcttcacactctacctgatcggcttttgcatgttcgtcctgtcattagtaaagaagcattaccggctgcagttctacatgtttggctggacgcacgttaccctgctcattgtggttacgcagagtcacctggtgattcataacctgtttgaaggcatgatctggtttatcgtgccaatctcatgcgtcatctgcaatgatatcatggcgtatatgttcggattcttctttggcagaactcccctgataaagctgtcaccaaagaagacctgggaagggttcattgggggcttctttgcgactgtggtgtttggtctcctccttagttatgtgatgagcggttatcggtgctttgtatgtcccgttgagtataataacgacaccaattcttttaccgttgactgcgaaccctcagacctgtttcgtttgcaagagtataatatccccggggtgatccagagcgtgattggctggaagaccgtccggatgtaccccttccagattcactccatagccctgtccactttcgcttcactgatcgggccttttggaggatttttcgcttctgggttcaaaagagccttcaagatcaaggatttcgccaacacaattcctgggcacggtggaatcatggacagattcgactgccagtatttaatggccacgttcgtgaatgtgtacatcgcgagctttatccgtggtcccaatcccagcaaattgattcagcagttcttgaccctgagaccagaccagcagctccacatcttcaacaccctgaggagccatttaatcgataaggggatgctgacttccaccactgaggatgaatag

SEQ ID NO: 322618 - DNA, 648 bp, Artificial Sequence
  derived and/or modified sequence
atgtttgttctaagtctggtgaaaaaacattacaggctgcaattctacatgtttggatggacacacgtgaccctgctcatcgttgtgactcagagtcatctagtcatacataatctgttcgaggggatgatatggttcatcgtgcctatcagttgtgtgatttgtaacgatattatggcgtatatgtttggtttctttttcggacgaacgcccctcatcaagctgtcaccaaagaaaacctgggagggatttattggcggattttttgctactgtcgtgttcgggttgttaaagacggtgcggatgtacccattccaaatacacagtatcgctttgagcacgttcgcatctttaatcgggcctttcggcggattcttcgcctcggggttcaagagagcttttaaaatcaaagattttgccaacactattcctggtcatggagggattatggaccgattcgactgccagtacttgatggccactttcgtcaacgtgtatattgctagctttatcagggggccaaatccttctaaactcatccaacagtttctcacattgcggcctgatcagcagctgcacatcttcaacaccctgcggtcacatctgatcgataaggggatgctgacttccactacagaagacgagtag

SEQ ID NO: 322619 - DNA, 978 bp, Artificial Sequence
  derived and/or modified sequence
atgagccggctgcggcaccccaggacccgctacttcctgctgtgtgtgaactacttcttctatggagagaccgtgacagactacttcttcaccctggtgcagcgggaggagcccctgcgcatcctgagcaagtaccaccgcttcatctccttcaccctgtacctgattggcttctgcatgtttgtgctgagcctggtgaagaagcactaccgcctgcagttctacatgtttggctggacccacgtgaccctgctgattgtggtgacccagagccacctggtgatccacaacctgtttgagggcatgatctggttcatcgtgcccatcagctgtgtgatctgcaatgacatcatggcctacatgtttggcttcttcttcggccgcacccccctcatcaagctgagccccaagaagacctgggagggcttcatcggcggcttctttgccaccgtggtgtttggcctgctgctgtcctatgtgatgagcggctaccgctgctttgtgtgccctgtggagtacaacaatgacaccaacagcttcaccgtggactgtgagcccagcgacctcttccggctgcaggagtacaacatccctggggtcatccagagcgtgattggctggaagacagtgaggatgtaccccttccagatccacagcatcgccctgagcacctttgccagcctgattggcccctttggaggcttctttgccagcggcttcaagagggccttcaagatcaaggactttgccaacaccatccctggccacggcggcatcatggacagatttgactgccagtacctgatggccacctttgtgaatgtgtacatcgccagcttcatccggggccccaaccccagcaagctgatccagcagttcctgaccctgcggccagaccagcagctgcacatcttcaacaccctgcggagccacctgattgacaagggcatgctgaccagcaccacagaagatgaatag

SEQ ID NO: 322620 - DNA, 648 bp, Artificial Sequence
  derived and/or modified sequence
atgtttgtgctgagcctggtgaagaagcactaccgcctgcagttctacatgtttggctggacccacgtgaccctgctgattgtggtgacccagagccacctggtgatccacaacctgtttgagggcatgatctggttcatcgtgcccatcagctgtgtgatctgcaatgacatcatggcctacatgtttggcttcttctttggaagaacacccctcatcaagctgagccccaagaagacctgggagggcttcatcggcggcttctttgccaccgtggtgtttggcctgctgaagacagtgaggatgtaccccttccagatccacagcatcgccctgagcacctttgccagcctgattggcccctttggaggcttctttgccagcggcttcaagagggccttcaagatcaaggactttgccaacaccatccctggccacggcggcatcatggacagatttgactgccagtacctgatggccacctttgtgaatgtgtacatcgccagcttcatccggggccccaaccccagcaagctgatccagcagttcctgaccctgcggccagaccagcagctgcacatcttcaacaccctgcggagccacctgattgacaagggcatgctgaccagcaccacagaagatgaatag

SEQ ID NO: 322621 - DNA, 978 bp, Artificial Sequence
  derived and/or modified sequence
atgagccggctgcggcacccccggacccggtacttcctgctgtgcgtgaactactttttctatggcgagacggtaacagattatttcttcacactcgtccagcgcgaggaaccgttgcgcatactgagcaaataccaccgcttcattagcttcactctgtatctgataggattttgcatgttcgtgttgtcactggtcaagaaacactaccggctgcagttttacatgttcgggtggacacacgttacattgctcatcgtagtgactcaaagccacctagtgattcataacctgttcgaaggaatgatttggttcattgttccgatctcctgcgtcatttgcaacgatatcatggcctacatgtttggcttctttttcgggagaactcctctaattaaactatcccccaagaagacctgggagggcttcataggcggcttttttgccactgtggtcttcgggttactgcttagttacgtgatgtctggatatcgatgcttcgtgtgcccagtagaatacaacaatgatacgaattctttcactgtcgattgcgagccatccgatctcttcaggctgcaggagtacaatattcccggcgtcatccagagcgtcatcggctggaagacagtgcggatgtatccgtttcagatccacagtatcgcattatccactttcgcatcgttgatcggtccatttgggggcttcttcgcgtcaggatttaagcgggcatttaagattaaagacttcgccaatactatccccggccatggtggcattatggaccggttcgattgccaatatttgatggccactttcgtgaacgtctacatcgcaagctttatccggggtcccaacccctctaagttgatccaacagttcctcactttaaggcctgatcagcagctccatatttttaacactctgcgaagtcatctgattgacaaggggatgcttacctccaccacagaggacgagtag

SEQ ID NO: 322622 - DNA, 648 bp, Artificial Sequence
  derived and/or modified sequence
atgttcgtgctgagcctggtgaagaagcactaccggctgcagttctatatgtttggatggacacacgtgacattgctaattgtggtgacccagtcccatctcgtcatacataatctatttgagggcatgatatggttcattgtgcccatttcttgtgttatctgtaacgacattatggcctatatgtttggttttttcttcgggcgcacgcccttgattaaactgtcccctaagaaaacatgggagggattcatcggcggtttcttcgcgaccgtggtcttcggcttgctgaaaactgtcaggatgtaccctttccagattcatagtatcgccctatctacgtttgctagccttattggtccattcggtggatttttcgcctctggattcaaacgagcctttaagatcaaagactttgcaaacaccatcccgggccacggcggcattatggatagattcgattgccaatacctaatggccacgttcgtaaacgtgtacattgcaagctttattcgtggacccaatccatctaagctcatccagcaattccttacccttaggcccgaccaacagttacacatctttaacaccttgaggtcccacctgattgacaaggggatgttgacctctacaaccgaagatgagtag

SEQ ID NO: 322623 - DNA, 978 bp, Artificial Sequence
  derived and/or modified sequence
atgtcccgcttgcgacatccacgcactcggtacttcctgttatgtgtcaactatttcttttacggcgagaccgtgactgactatttcttcaccctggtccagcgagaggagcctttgagaattttgagcaaataccaccggttcatcagttttactctttacctcataggattttgcatgtttgtgctatccctggtgaaaaagcattaccgactgcagttttatatgttcgggtggacacacgtgaccttactgatagtggtcacacagagccacttagtcattcataacctgttcgaaggaatgatttggttcatcgttcccatcagttgcgtgatctgcaacgacattatggcctatatgtttggattcttcttcgggagaactcccctcattaagctgtctcctaagaaaacctgggaaggatttatcgggggatttttcgcaacagtggtgtttggtcttctgctgagctacgtgatgtcgggatacaggtgttttgtatgccctgtggagtacaacaacgacactaactcatttacagtcgactgtgagccgagtgacctctttcggctgcaagagtacaacattcccggtgtgatccaatcggttattggatggaagacagtgaggatgtaccctttccagatacacagtatcgcactgtctacattcgcaagcctcataggtccgttcggaggcttctttgcctccggattcaagcgggctttcaagattaaggatttcgctaacacaatcccaggccatggtggcatcatggataggtttgattgccaatatctgatggcaacctttgtgaatgtgtacatcgcctccttcattcgcggaccaaacccgtctaagctcatacaacagttcctgactttacgtcccgaccagcaactgcacattttcaatacattgcgtagccaccttatcgacaaaggcatgctgacgtctaccacagaagacgagtag

SEQ ID NO: 322624 - DNA, 648 bp, Artificial Sequence
  derived and/or modified sequence
atgttcgtgctgtctttggtcaagaagcattataggctgcaattttatatgtttggatggactcatgttacactccttattgtcgtgacccagagtcacctggttatccacaacctctttgagggcatgatctggtttatcgtacccatcagctgtgtcatttgcaacgacattatggcttacatgttcggtttttttttcgggaggacccccttgatcaaactgtcccccaagaagacctgggaggggtttattggaggctttttcgctacagttgtgtttggtctcttaaagacagtgcgcatgtatccctttcaaattcactctatagctctgagtactttcgcctcactgatcgggccttttggaggtttcttcgcaagcggcttcaaaagggccttcaaaatcaaggacttcgccaacactatacccggacacggcggaatcatggacagattcgactgccagtacctgatggccacgttcgtgaacgtgtacatcgcctccttcattagaggcccaaacccgtccaagctgatccagcagttcctcaccctgagacctgaccagcagctgcacatattcaatacattacggtctcacctcatcgataaaggcatgctgacctcaaccaccgaggacgagtag

SEQ ID NO: 322625 - DNA, 1264 bp, Artificial Sequence
  derived and/or modified sequence
cgctcagagccgcgcgcctcccgggcggggcggggccggccgtgggagtccgcgcgtgcccgcgccgagctgcctgctccggcggcttcgctgctagctcgcggcgacgtcgggccgattttcccaggatgacagagctgaggcagagggtggcccatgagccggttgcgccacccgaggacaaggtactttctcctgtgtgtaaactatttcttctatggtgagacagtgacggattacttcttcaccctggtccagagagaagagcctttgcggattctcagtaaataccaccggttcatttcctttactctctatctaataggattctgcatgtttgtactgagtctggtcaagaagcattatcgactgcagttctacatgtttggctggacccatgtgacattgctgattgttgtaacacagtcacatcttgttatccacaacctatttgaaggaatgatctggttcattgtccccatatcttgtgtgatctgtaatgacatcatggcctatatgtttggctttttctttggtcggaccccactcatcaagctgtccccgaagaagacctgggaaggcttcattgggggcttctttgctactgtggtgtttggccttctgctgtcctatgtgatgtccgggtacagatgctttgtctgccctgtggagtacaacaatgacaccaacagcttcactgtggactgtgagccctcggacctgtttcgcctgcaggagtacaacattcctggggtgatccagtcagtcattggctggaaaacggtccggatgtaccccttccagattcacagcatcgctctctccacctttgcctcgctcattggcccctttggaggattcttcgcaagtggattcaaacgagcctttaaaatcaaagactttgccaataccattcctggccatggaggcatcatggatcgctttgactgccagtatctgatggccacctttgtcaatgtatacatcgccagttttatcagaggccctaacccaagcaaactgattcagcagttcctgactttacggccagatcagcagctccacatcttcaacacgctgcggtctcatctgatcgacaaagggatgctgacatccaccacagaggacgagtaggggccacccagggccaggagaacaggaacagaactgagcaggggcaggtctccaaggcaagcccagctggtgtgacttagacaatgacgaggcttcaactcactgtcttttttttttttttttggagggt

SEQ ID NO: 322626 - DNA, 914 bp, Artificial Sequence
  derived and/or modified sequence
ttctcctgtgtgtaaactatttcttctatggtgagacagtgacggattacttcttcaccctggtccagagagaagagcctttgcggattctcagtaaataccaccggttcatttcctttactctctatctaataggattctgcatgtttgtactgagtctggtcaagaagcattatcgactgcagttctacatgtttggctggacccatgtgacattgctgattgttgtaacacagtcacatcttgttatccacaacctatttgaaggaatgatctggttcattgtccccatatcttgtgtgatctgtaatgacatcatggcctatatgtttggctttttctttggtcggaccccactcatcaagctgtccccgaagaagacctgggaaggcttcattgggggcttctttgctactgtggtgtttggccttctgaaaacggtccggatgtaccccttccagattcacagcatcgctctctccacctttgcctcgctcattggcccctttggaggattcttcgcaagtggattcaaacgagcctttaaaatcaaagactttgccaataccattcctggccatggaggcatcatggatcgctttgactgccagtatctgatggccacctttgtcaatgtatacatcgccagttttatcagaggccctaacccaagcaaactgattcagcagttcctgactttacggccagatcagcagctccacatcttcaacacgctgcggtctcatctgatcgacaaagggatgctgacatccaccacagaggacgagtaggggccacccagggccaggagaacaggaacagaactgagcaggggcaggtctccaaggcaagcccagctggtgtgacttagacaatgacgaggcttcaactcactgtctttttttttttttttt

SEQ ID NO: 322627 - DNA, 978 bp, Artificial Sequence
  derived and/or modified sequence
atgagcagactgagacaccccagaaccagatacttcctgctgtgcgtgaactacttcttctacggcgagaccgtgaccgactacttcttcaccctggtgcagagagaggagcccctgagaatcctgagcaagtaccacagattcatcagcttcaccctgtacctgatcggcttctgcatgttcgtgctgagcctggtgaagaagcactacagactgcagttctacatgttcggctggacccacgtgaccctgctgatcgtggtgacccagagccacctggtgatccacaacctgttcgagggcatgatctggttcatcgtgcccatcagctgcgtgatctgcaacgacatcatggcctacatgttcggcttcttcttcggcagaacccccctgatcaagctgagccccaagaagacctgggagggcttcatcggcggcttcttcgccaccgtggtgttcggcctgctgctgagctacgtgatgagcggctacagatgcttcgtgtgccccgtggagtacaacaacgacaccaacagcttcaccgtggactgcgagcccagcgacctgttcagactgcaggagtacaacatccccggcgtgatccagagcgtgatcggctggaagaccgtgagaatgtaccccttccagatccacagcatcgccctgagcaccttcgccagcctgatcggccccttcggcggcttcttcgccagcggcttcaagagagccttcaagatcaaggacttcgccaacaccatccccggccacggcggcatcatggacagattcgactgccagtacctgatggccaccttcgtgaacgtgtacatcgccagcttcatcagaggccccaaccccagcaagctgatccagcagttcctgaccctgagacccgaccagcagctgcacatcttcaacaccctgagaagccacctgatcgacaagggcatgctgaccagcaccaccgaggacgagtag

SEQ ID NO: 322628 - DNA, 648 bp, Artificial Sequence
  derived and/or modified sequence
atgttcgtgctgagcctggtgaagaagcactacagactgcagttctacatgttcggctggacccacgtgaccctgctgatcgtggtgacccagagccacctggtgatccacaacctgttcgagggcatgatctggttcatcgtgcccatcagctgcgtgatctgcaacgacatcatggcctacatgttcggcttcttcttcggcagaacccccctgatcaagctgagccccaagaagacctgggagggcttcatcggcggcttcttcgccaccgtggtgttcggcctgctgaagaccgtgagaatgtaccccttccagatccacagcatcgccctgagcaccttcgccagcctgatcggccccttcggcggcttcttcgccagcggcttcaagagagccttcaagatcaaggacttcgccaacaccatccccggccacggcggcatcatggacagattcgactgccagtacctgatggccaccttcgtgaacgtgtacatcgccagcttcatcagaggccccaaccccagcaagctgatccagcagttcctgaccctgagacccgaccagcagctgcacatcttcaacaccctgagaagccacctgatcgacaagggcatgctgaccagcaccaccgaggacgagtag

SEQ ID NO: 322629 - protein, 264 aa, Artificial Sequence
  derived and/or modified sequence
MKMKLFQTICRQLRSSKFSVESAALVAFSTSSYSCGRKKKVNPYEEVDQEKYSNLVQSVLSSRGVAQTPGSVEEDALLCGPVSKHKLPNQDVFLQGKRFHEALESILSPQETLKERDENLLKSGYIESVQHILKDVSGVRALESAVQHETLNYIGLLDCVAEYQGKLCVIDWKTSEKPKPFIQSTFDNPLQVVAYMGAMNHDTNYSFQVQCGLIVVAYKDGSPAHPHFMDAELCSQYWTKWLLRLEEYTEKKKNQNIQKPEYSE

SEQ ID NO: 322630 - DNA, 1936 bp, Artificial Sequence
  derived and/or modified sequence
ggatgaaagtacgggtcgcgagaggttgttcgcgccttgagagttaagcgaagtgtggtggcttccaaggaatacaaacataaaggccttcgaccgttgcaaatagactaaagtgaaaacaaatctgaatgaagatgaagttatttcagaccatttgcaggcagctcaggagttcaaagttttctgtggaatcagctgcccttgtggctttctctacttcctcttactcatgtggccggaagaaaaaagtgaacccatatgaagaagtggaccaagaaaaatactctaatttagttcagtctgtcttgtcatccagaggcgtcgcccagaccccgggatcggtggaggaagatgctttgctctgtggacccgtgagcaagcataagctgccaaaccaagacgtctttttacaagggaaacggttccacgaagccttggaaagcatactttcaccccaggaaaccttaaaagagagagatgaaaatctcctcaagtctggttacattgaaagtgtccagcatattctgaaagatgtcagtggagtgcgagctcttgaaagtgctgttcaacatgaaaccttaaactatataggtctgctggactgtgtggctgagtatcagggcaagctctgtgtgattgattggaagacatcagagaaaccaaagccttttattcaaagtacatttgacaacccactgcaagttgtggcatacatgggtgccatgaaccatgataccaactacagctttcaggttcaatgtggcttaattgtggtggcctacaaagatggatcacctgcccacccacatttcatggatgcagagctctgttcccagtactggaccaagtggcttcttcgactagaagaatatacggaaaagaaaaagaaccagaatattcagaaaccagaatattcagaatagggagcaagttgctatttgggaacattcagcaccttctcacagtttgggaacatatattgctgtttactccagtgtaaaaatgaggtgccactggatctgagtgctacacgaacacaagtagaagtattaatttgttgaaatgtgttgttaccaaaaagactgaaaagccccaaagtctagatataaagacctagacttcggcacgcgaaatcccagctatgctacctcttatttacctgaaaggaggacacgcaggatgggcagtcatgctggtgactcttgtactcccttgagggacattgggggggggggggcgtggtcccaggcaggatgcccagtctttgagctgagattggaaggcagtgaggctgagggtgccaagatttccccagggttcacccagaggggaaggggctacatgcccccagctgtgtgcagggaggacacatcagcccactaccgctgccaacaccaatgcctaaaacttgtttcatacattggggttttctatatatttcagctgggaaaagcttacatttaaccttttgaaaaaataaatacgtgattagcctcaactaaacattgctgactataaagacagtatattcaccatgtcgctggcaatatgtcattgcgtaacaccaaataaccccccagaagtagccagaggccagtttgaacatcacaattctaagtgttttagtaactatttctggcgtgagtcaacagatcatgtagatagagtcaattattgtttgtggagtttttcagctataggggaggggaactattaaaatccatttgtttctattcaataggtaataaaaattagttgtccctgggtttgggaaacttaaatgcccattacagccctggggaagggttttctgtcttatggagtgagtcttagcatttaagttatacagttgctgccttaaaatagtagcctgctacaatgacttctttgggtagccattttcataagaaataaaatacaagatatgagtaatgaa

SEQ ID NO: 322631 - DNA, 795 bp, Artificial Sequence
  derived and/or modified sequence
atgaagatgaagctgttccagaccatctgcagacagctgagaagcagcaagttcagcgtggagagcgccgccctggtggccttcagcaccagcagctacagctgcggcagaaagaagaaggtgaacccctacgaggaggtggaccaggagaagtacagcaacctggtgcagagcgtgctgagcagcagaggcgtggcccagacccccggcagcgtggaggaggacgccctgctgtgcggccccgtgagcaagcacaagctgcccaaccaggacgtgttcctgcagggcaagagattccacgaggccctggagagcatcctgagcccccaggagaccctgaaggagagagacgagaacctgctgaagagcggctacatcgagagcgtgcagcacatcctgaaggacgtgagcggcgtgagagccctggagagcgccgtgcagcacgagaccctgaactacatcggcctgctggactgcgtggccgagtaccagggcaagctgtgcgtgatcgactggaagaccagcgagaagcccaagcccttcatccagagcaccttcgacaaccccctgcaggtggtggcctacatgggcgccatgaaccacgacaccaactacagcttccaggtgcagtgcggcctgatcgtggtggcctacaaggacggcagccccgcccacccccacttcatggacgccgagctgtgcagccagtactggaccaagtggctgctgagactggaggagtacaccgagaagaagaagaaccagaacatccagaagcccgagtacagcgagtag

SEQ ID NO: 322632 - DNA, 795 bp, Artificial Sequence
  derived and/or modified sequence
atgaagatgaagctgttccagacgatctgtcggcaactgaggtcttcaaagttctctgtggaaagtgctgccctggttgccttcagtaccagcagctactcatgcggacggaaaaagaaggtgaacccctacgaggaagtggaccaggagaaatactcaaatctcgtacaatcagttctgtccagccggggagtcgcacaaactcccggctctgtggaagaagacgccctgctgtgcggaccagtgagcaagcataagctacctaatcaggacgtgtttcttcagggcaagagatttcacgaagcgctcgaaagcatcctttccccccaagagacactcaaagagcgcgatgagaatctcctgaaaagcggctatatcgagtcagtgcaacatatcttgaaggacgtgtccggcgtgcgcgccttagagtcagccgtgcaacacgaaacactgaactacatcggtctcctcgactgcgtggcggaatatcagggtaagctgtgtgtgatcgactggaagacctctgaaaagcccaaaccctttatccagtcaactttcgataatcctttgcaagtcgtcgcatatatgggggctatgaaccacgacaccaactactctttccaagtacagtgtggtctgattgtggtcgcatacaaggacgggtcaccggcacaccctcactttatggatgccgagttgtgcagtcaatattggactaagtggctactgaggctggaggagtataccgagaagaagaagaatcagaatattcagaagcccgaatattcagagtag

SEQ ID NO: 322633 - DNA, 795 bp, Artificial Sequence
  derived and/or modified sequence
atgaagatgaagctgttccagaccatctgccggcagctgcggagcagcaagttctctgtggagagcgctgccctggtggccttcagcaccagcagctacagctgtggcaggaagaagaaggtgaacccctatgaggaggtggaccaggagaagtacagcaacctggtgcagagcgtgctgagcagccggggcgtggcccagaccccaggctctgtggaggaggatgccctgctgtgtggccctgtgtccaagcacaagctgcccaaccaggatgtgttcctgcagggcaagcgcttccacgaggccctggagagcatcctgagcccccaggagaccctgaaggagagagatgagaacctgctgaagagcggctacatcgagagcgtgcagcacatcctgaaggatgtgtctggagtgcgggccctggagagcgctgtgcagcacgagaccctgaactacatcggcctgctggactgtgtggccgagtaccagggcaagctgtgtgtgattgactggaagaccagcgagaagcccaagcccttcatccagagcacctttgacaaccccctgcaggtggtggcctacatgggcgccatgaaccacgacaccaactacagcttccaggtgcagtgtggcctcatcgtggtggcctacaaggatggcagccctgcccacccccacttcatggatgctgagctgtgcagccagtactggaccaagtggctgctgcggctggaggagtacacagagaagaagaagaaccagaacatccagaagccagagtacagcgagtag

SEQ ID NO: 322634 - DNA, 795 bp, Artificial Sequence
  derived and/or modified sequence
atgaagatgaagctgttccagaccatctgccggcagctgcggagcagtaagttttcagttgaatcggccgctcttgtggccttttcgaccagctcgtattcatgcgggcgcaaaaagaaggtgaacccttacgaagaggtggaccaggaaaaatacagtaacctggtgcaatctgtgctgagctctcggggagtggcacaaacacctgggtcagtggaagaggacgcactactttgtggcccagtctctaagcacaaactacccaatcaggatgtcttcctccaggggaaaaggttccatgaggcattggagtctatcctttccccccaagagaccttgaaggagagagatgaaaatctgttaaagagcggatacatagaatctgtgcagcacatcctgaaagatgtttcaggtgttagagccctggagagtgctgttcagcatgagaccctgaattacatcggtctactggattgcgtggcagagtaccaagggaaactgtgtgtgattgactggaagacaagcgaaaagcctaagccgtttatccagagcacctttgataatccactgcaagtggttgcgtacatgggagccatgaatcatgacactaattactcttttcaagtgcagtgcggacttattgtcgtggcttataaagacggaagccccgcgcacccacatttcatggacgccgagctgtgctcccagtactggaccaagtggcttcttcggctagaggagtacacagaaaaaaagaagaaccagaatatacaaaagcccgaatacagcgagtag

SEQ ID NO: 322635 - DNA, 795 bp, Artificial Sequence
  derived and/or modified sequence
atgaaaatgaagctgtttcagacaatttgccggcagttacgctcatcaaaattctctgtggagtctgctgccttagtagcattctcaacttcaagctactcttgcggcagaaagaaaaaggtgaatccttacgaagaagtcgaccaggaaaaatattcaaatcttgtgcagagtgtacttagttcacgcggtgtggcccaaacacctggtagcgtcgaggaagacgctctcctgtgtgggccagtcagcaagcacaaactacctaaccaagacgtgttccttcaaggaaaaagattccacgaggcactcgagtccatcctgtctcctcaggagacattgaaggaaagggacgaaaacctgttgaaaagtgggtatattgagagcgtccagcacattctgaaggatgtctccggagtgcgtgctctggaatcagctgtacagcatgagactttgaattacattggcctgctagattgtgtggccgagtaccagggaaaattatgtgtcatcgactggaagacaagcgaaaaacctaagcccttcatacaatccacatttgacaacccgctgcaagttgtcgcttacatgggcgcaatgaaccacgacacaaattactccttccaggtgcagtgcggcttgattgtggtggcctacaaggatggctcaccagcacatccccactttatggatgcagaactctgctcacagtactggacgaagtggcttctccggctggaagagtacactgagaagaagaaaaaccaaaatatccagaagcctgagtatagcgagtag

SEQ ID NO: 322636 - protein, 484 aa, Artificial Sequence
  derived and/or modified sequence
MKKGIRYETSRKTSYIFQQPQHGPWQTRMRKISNHGSLRVAKVAYPLGLCVGVFIYVAYIKWHRATATQAFFSITRAAPGARWGQQAHSPLGTAADGHEVFYGIMFDAGSTGTRVHVFQFTRPPRETPTLTHETFKALKPGLSAYADDVEKSAQGIRELLDVAKQDIPFDFWKATPLVLKATAGLRLLPGEKAQKLLQKVKKVFKASPFLVGDDCVSIMNGTDEGVSAWITINFLTGSLKTPGGSSVGMLDLGGGSTQIAFLPRVEGTLQASPPGYLTALRMFNRTYKLYSYSYLGLGLMSARLAILGGVEGQPAKDGKELVSPCLSPSFKGEWEHAEVTYRVSGQKAAASLHELCAARVSEVLQNRVHRTEEVKHVDFYAFSYYYDLAAGVGLIDAEKGGSLVVGDFEIAAKYVCRTLETQPQSSPFSCMDLTYVSLLLQEFGFPRSKVLKLTRKIDNVETSWALGAIFHYIDSLNRQKSPAS

SEQ ID NO: 322637 - protein, 483 aa, Artificial Sequence
  derived and/or modified sequence
MKKGIRYETSRKTSYIFQPQHGPWQTRMRKISNHGSLRVAKVAYPLGLCVGVFIYVAYIKWHRATATQAFFSITRAAPGARWGQQAHSPLGTAADGHEVFYGIMFDAGSTGTRVHVFQFTRPPRETPTLTHETFKALKPGLSAYADDVEKSAQGIRELLDVAKQDIPFDFWKATPLVLKATAGLRLLPGEKAQKLLQKVKKVFKASPFLVGDDCVSIMNGTDEGVSAWITINFLTGSLKTPGGSSVGMLDLGGGSTQIAFLPRVEGTLQASPPGYLTALRMFNRTYKLYSYSYLGLGLMSARLAILGGVEGQPAKDGKELVSPCLSPSFKGEWEHAEVTYRVSGQKAAASLHELCAARVSEVLQNRVHRTEEVKHVDFYAFSYYYDLAAGVGLIDAEKGGSLVVGDFEIAAKYVCRTLETQPQSSPFSCMDLTYVSLLLQEFGFPRSKVLKLTRKIDNVETSWALGAIFHYIDSLNRQKSPAS

SEQ ID NO: 322638 - protein, 314 aa, Artificial Sequence
  derived and/or modified sequence
  misc_feature (1)..(1): Xaa can be any naturally occurring amino acid
XNRGVVSRGWRPGWRRPGRGSPKDRLPPAPRKRALVSVGVAERAVHETPTLTHETFKALKPGLSAYADDVEKSAQGIRELLDVAKQDIPFDFWKATPLVLKATAGLRLLPGEKAQKLLQKVKKVFKASPFLVGDDCVSIMNGTDEGVSAWITINFLTGSLKTPGGSSVGMLDLGGGSTQIAFLPRVEGTLQASPPGYLTALRMFNRTYKLYSYSYLGLGLMSARLAILGGVEGQPAKDGKELVSPCLSPSFKGEWEHAEVTYRVSGQKAAASLHELCAARVSEVLQNRVHRTEEVKHVDFYAFSYYYDLAAGVG

SEQ ID NO: 322639 - protein, 313 aa, Artificial Sequence
  derived and/or modified sequence
NRGVVSRGWRPGWRRPGRGSPKDRLPPAPRKRALVSVGVAERAVHETPTLTHETFKALKPGLSAYADDVEKSAQGIRELLDVAKQDIPFDFWKATPLVLKATAGLRLLPGEKAQKLLQKVKKVFKASPFLVGDDCVSIMNGTDEGVSAWITINFLTGSLKTPGGSSVGMLDLGGGSTQIAFLPRVEGTLQASPPGYLTALRMFNRTYKLYSYSYLGLGLMSARLAILGGVEGQPAKDGKELVSPCLSPSFKGEWEHAEVTYRVSGQKAAASLHELCAARVSEVLQNRVHRTEEVKHVDFYAFSYYYDLAAGVG

SEQ ID NO: 322640 - protein, 226 aa, Artificial Sequence
  derived and/or modified sequence
MPQHGPWQTRMRKISNHGSLRVAKVAYPLGLCVGVFIYVAYIKWHRATATQAFFSITRAAPGARWGQQAHSPLGTAADGHEVFYGIMFDAGSTGTRVHVFQFTRPPRETPTLTHETFKALKPGLSAYADDVEKVKKVFKASPFLVGDDCVSIMNGTDEGVSAWITINFLTGSLKTPGGSSVGMLDLGGGSTQIAFLPRVEGTLQASPPGYLTALRMFNRTYKLYSY

SEQ ID NO: 322641 - protein, 300 aa, Artificial Sequence
  derived and/or modified sequence
MKKGIRYETSRKTSYIFQQPQHGPWQTRMRKISNHGSLRVAKVAYPLGLCVGVFIYVAYIKWHRATATQAFFSITRAAPGARWGQQAHSPLGTAADGHEVFYGIMFDAGSTGTRVHVFQFTRPPRETPTLTHETFKALKPGLSAYADDVEKVKKVFKASPFLVGDDCVSIMNGTDEGVSAWITINFLTGSLKTPGGSSVGMLDLGGGSTQIAFLPRVEGTLQASPPGYLTALRMFNRTYKLYSYSYLGLGLMSARLAILGGVEGQPAKDGKELVSPCLSPSFKGEWEHAEVTYRVSGQKA

SEQ ID NO: 322642 - protein, 150 aa, Artificial Sequence
  derived and/or modified sequence
  misc_feature (1)..(1): Xaa can be any naturally occurring amino acid
XPGRGSPKDRLPPAPRKRALVSVGVAERAVHETPTLTHETFKALKPGLSAYADDVEKVKKVFKASPFLVGDDCVSIMNGTDEGVSAWITINFLTGSLKTPGGSSVGMLDLGGGSTQIAFLPRVEGTLQASPPGYLTALRMFNRTYKLYSY

SEQ ID NO: 322643 - DNA, 903 bp, Artificial Sequence
  derived and/or modified sequence
atgaagaaaggtattcgatatgaaacaagcagaaagacgtcttatatcttccaacaacctcaacatggaccgtggcagacaagaatgaggaaaattagcaatcacgggagtctgcgcgtggcgaaggtggcttacccacttggcctttgcgtgggagtttttatctatgtggcatatatcaagtggcaccgcgccacagccacacaggcattcttcagcatcacgcgggcagcgcccggcgcccgttgggggcagcaagcccatagtcccctgggaaccgccgctgatgggcacgaggtgttttacggaatcatgtttgacgcgggtagtactggtacgagggtgcacgtgttccagtttacaaggccaccaagagagacccctacccttactcacgagactttcaaggccctaaaacccgggctctctgcctacgctgacgacgtcgagaaggttaaaaaggtcttcaaagcctccccctttctagtcggggacgattgcgtttctataatgaatggaacagatgaaggcgtgagcgcctggataactatcaacttccttactgggagcctcaaaacacccggcggcagctctgtgggcatgctggacctgggggggggctctacccagatcgccttcttgccgagagtggagggtaccctacaagcttcccctcccggttatctaaccgcgctgagaatgtttaaccggacgtataagctgtacagctacagctatctaggcttggggctgatgagcgcgcgactggccattctgggcggagtagagggacagcctgctaaagacggaaaggaattggtgagcccatgtctctccccgtcttttaagggagagtgggagcatgctgaagtgacatatcgtgtgagcggacagaaagcctag

SEQ ID NO: 322644 - DNA, 903 bp, Artificial Sequence
  derived and/or modified sequence
atgaagaagggcatccgctatgagaccagcaggaagaccagctacatcttccagcagccccagcacggcccctggcagaccaggatgaggaagatcagcaaccacggcagcctgcgggtggccaaggtggcctaccccctgggcctgtgtgtgggcgtcttcatctacgtggcctacatcaagtggcaccgggccacagccacccaggccttcttcagcatcaccagggctgcccctggggcccgctggggccagcaggcccacagccccctgggcacagctgctgatggccacgaggtgttctacggcatcatgtttgatgctggcagcacaggcaccagggtgcacgtgttccagttcaccaggcctccccgggagacccccaccctgacccatgagaccttcaaggccctgaagccaggcctgagcgcctatgcagatgatgtggagaaggtgaagaaggtgttcaaggccagccccttcctggtgggagatgactgtgtgtccatcatgaatggaacagatgaaggagtgtctgcctggatcaccatcaacttcctgaccggcagcctgaagacccctgggggcagctctgtgggcatgctggacctgggcggcggcagcacccagatcgccttcctgccccgggtggagggcaccctgcaggccagccccccaggctacctgacagccctgaggatgttcaacagaacctacaagctgtacagctacagctacctgggcctgggcctgatgtctgcccggctggccatcctgggcggcgtggagggccagcctgccaaggatggcaaggagctggtgagcccctgcctgagccccagcttcaagggggagtgggagcacgccgaggtgacctacagagtgtctggccagaaggcctag

SEQ ID NO: 322645 - DNA, 903 bp, Artificial Sequence
  derived and/or modified sequence
atgaagaagggcatccggtacgagaccagccggaagaccagctacatatttcagcaacctcagcatggaccttggcagaccaggatgaggaagatttccaaccatggcagtctgcgtgtggccaaggtggcctacccgctagggttgtgcgtcggagtgttcatttacgtggcctatatcaagtggcatagggcgactgccacccaggcattctttagcattacccgagccgcaccaggggctcgatggggtcagcaggcccactcacccctgggaacagccgcagacggacacgaggttttctacggaatcatgttcgatgctgggtcaaccggcacgcgcgttcacgtttttcaatttactaggccaccccgggagacacccactctgactcatgagacctttaaagctctgaaaccggggttgtccgcctacgccgatgatgtggagaaggtgaaaaaggtgttcaaggcttcccccttccttgtgggagacgattgtgtaagtatcatgaacggaacagacgagggggtatcggcttggattacgatcaacttcctgactggttctctcaagacacccggcgggagcagcgtggggatgctcgatctcggaggtggcagcactcagatagcctttttgcccagagtggaaggtactctgcaggcttctccgcccggttacctaactgcactgaggatgtttaatagaacatacaaactatacagctacagctatctaggactaggcctgatgagcgcccgcctggctatcctgggcggcgtggaaggtcagcctgcaaaagacggaaaggaactcgtatctccctgtctctcccccagttttaagggtgaatgggagcacgccgaggttacttatagggtttctgggcagaaggcttag

SEQ ID NO: 322646 - DNA, 903 bp, Artificial Sequence
  derived and/or modified sequence
atgaaaaaggggattcggtatgaaacttctcgtaagacctcttatattttccaacagcctcagcacggaccctggcagacacgaatgcgaaagattagtaaccacggtagtctccgggtggccaaggtggcttatcccctggggctctgcgtcggagttttcatctacgtggcttacatcaagtggcacagggcgaccgcgacacaagccttcttcagcatcactcgcgcagcgcctggcgcacgctggggtcagcaggcccactccccgctcgggactgccgcagacgggcacgaagtgttttatggaattatgtttgacgccggttccaccggcactcgggtccatgtgtttcagttcacacggccacctagagagacaccaactctgacccacgagacctttaaggcactaaagccgggtctgtctgcctatgcggacgacgttgaaaaagtaaagaaggtctttaaggcaagtccatttctcgttggcgatgattgcgtctctattatgaacgggacagatgaaggggtgtccgcctggattacgattaactttttaacggggtcgttaaaaacccccggaggcagtagcgtcggcatgctggacctggggggaggttctacccagatcgcctttctgccacgggtggagggcaccctgcaagccagccctcccggatacctgacggccctgcggatgtttaatcgaacctataagctgtattcatatagttaccttgggctcggtctgatgtccgcccgtttagctatactaggtggggtagagggtcagccagccaaggacggcaaagaattagtgagtccatgtctgtccccgagtttcaaaggggaatgggaacacgccgaagtaacttatcgggtcagcggtcagaaggcgtag

SEQ ID NO: 322647 - DNA, 903 bp, Artificial Sequence
  derived and/or modified sequence
atgaagaagggcatcagatacgagaccagcagaaagaccagctacatcttccagcagccccagcacggcccctggcagaccagaatgagaaagatcagcaaccacggcagcctgagagtggccaaggtggcctaccccctgggcctgtgcgtgggcgtgttcatctacgtggcctacatcaagtggcacagagccaccgccacccaggccttcttcagcatcaccagagccgcccccggcgccagatggggccagcaggcccacagccccctgggcaccgccgccgacggccacgaggtgttctacggcatcatgttcgacgccggcagcaccggcaccagagtgcacgtgttccagttcaccagaccccccagagagacccccaccctgacccacgagaccttcaaggccctgaagcccggcctgagcgcctacgccgacgacgtggagaaggtgaagaaggtgttcaaggccagccccttcctggtgggcgacgactgcgtgagcatcatgaacggcaccgacgagggcgtgagcgcctggatcaccatcaacttcctgaccggcagcctgaagacccccggcggcagcagcgtgggcatgctggacctgggcggcggcagcacccagatcgccttcctgcccagagtggagggcaccctgcaggccagcccccccggctacctgaccgccctgagaatgttcaacagaacctacaagctgtacagctacagctacctgggcctgggcctgatgagcgccagactggccatcctgggcggcgtggagggccagcccgccaaggacggcaaggagctggtgagcccctgcctgagccccagcttcaagggcgagtgggagcacgccgaggtgacctacagagtgagcggccagaaggcctag

SEQ ID NO: 322648 - DNA, 945 bp, Artificial Sequence
  derived and/or modified sequence
cgtgggtgtggcggagcgcgcggtgcatggaatgggctatgtgaatgaaaaaaggtatccgttatgaaacttccagaaaaacgagctacatttttcagcagccgcagcacggtccttggcaaacaaggatgagaaaaatatccaaccacgggagcctgcgggtggcgaaggtggcataccccctggggctgtgtgtgggcgtgttcatctatgttgcctacatcaagtggcaccgggccaccgccacccaggccttcttcagcatcaccagggcagccccgggggcccggtggggtcagcaggcccacagccccctggggacagctgcagacgggcacgaggtcttctacgggatcatgtttgatgcaggaagcactggcacccgagtacacgtcttccagttcacccggccccccagagaaactcccacgttaacccacgaaaccttcaaagcactgaagccaggtctttctgcctatgctgatgatgttgaaaaggtgaaaaaagtatttaaagcatcgcctttccttgtaggggatgactgtgtttccatcatgaacggaacagatgaaggcgtttcggcgtggatcaccatcaacttcctgacaggcagcttgaaaactccaggagggagcagcgtgggcatgctggacttgggcggaggatccactcagatcgccttcctgccacgcgtggagggcaccctgcaggcctccccacccggctacctgacggcactgcggatgtttaacaggacctacaagctctattcctacagctacctcgggctcgggctgatgtcggcacgcctggcgatcctgggcggcgtggaggggcagcctgctaaggatggaaaggagttggtcagcccttgcttgtctcccagtttcaaaggagagtgggaacacgcagaagtcacgtacagggtttcagggcagaaagcag

SEQ ID NO: 322649 - protein, 195 aa, Artificial Sequence
  derived and/or modified sequence
MQPQHGPWQTRMRKISNHGSLRVAKVAYPLGLCVGVFIYVAYIKWHRATATQAFFSITRAAPGARWGQQAHSPLGTAADGHEVFYGIMFDAGSTGTRVHVFQFTRPPRETPTLTHETFKALKPGLSAYADDVEKVKKVFKASPFLVGDDCVSIMNGTDEGVSAWITINFLTGSLKTPGGSSVGMLDLGGGSTQIA

SEQ ID NO: 322650 - DNA, 681 bp, Artificial Sequence
  derived and/or modified sequence
atgccgcagcacggtccttggcagactcggatgaggaaaattagtaatcacgggagtctgcgggtggcaaaggtggcgtatcccctggggctgtgcgtgggtgtattcatttatgtcgcgtatatcaaatggcatagggccactgcgacacaggcctttttcagcattactagggccgcaccaggagctcgatggggtcaacaagcccatagtccactgggaactgccgctgacggtcacgaggtgttctatggaattatgttcgacgctggctccacgggtactagggtgcacgtgtttcagttcacacgcccaccacgggaaactcccaccctgacacacgagacattcaaggccctgaagcccggtttgtctgcgtatgccgatgacgttgagaaagtgaaaaaagtgttcaaagcatcaccttttctggtgggcgatgattgtgtgtctatcatgaacggaaccgatgaaggtgtttccgcatggataactatcaactttctcaccggctccttgaagactcctggcggctcctcagttgggatgttggacttgggcggggggagcacacagattgcctttctccctcgggtggaggggacactgcaggcatcccctcccggctacctcaccgcacttcgaatgttcaaccgcacttacaaactgtattcttattag

SEQ ID NO: 322651 - DNA, 588 bp, Artificial Sequence
  derived and/or modified sequence
atgcagccacaacatgggccctggcagacacgcatgcgtaagattagcaaccatggctcactgcgcgttgccaaggttgcttacccactagggctctgtgtcggggtgtttatctacgtcgcctatattaaatggcatcgggccacagccacacaggcctttttttctattacgcgcgctgcccccggagctaggtggggccagcaggcccacagcccgttggggaccgccgccgatggccatgaggtgttttacggaatcatgtttgatgccggtagtacaggaactcgggtacacgtattccagtttacacgacctccacgggaaacccccaccctcacacatgaaacttttaaggccctaaagcccggtctcagcgcatacgcagacgatgtggaaaaagtaaaaaaagtctttaaggccagccccttcctcgtgggcgacgattgcgtatccatcatgaatggcaccgatgagggcgtgtctgcctggataaccattaattttttaacgggatccctgaagacaccaggcgggtcatcagtgggcatgctcgatctgggaggcggaagcacccagatcgcctag

SEQ ID NO: 322652 - DNA, 453 bp, Artificial Sequence
  derived and/or modified sequence
tgacctggacggggctctcccaaagatcggctaccccctgccccacgcaaacgggcgttggtgagcgttggggtggccgagcgtgctgttcatgaaactcccactctgacacacgagactttcaaagccctcaaaccagggctgagcgcctatgccgacgatgtggagaaggttaagaaagtcttcaaggcttcacccttcctggttggggatgattgcgttagcatcatgaacggcacggacgagggcgtgagcgcatggatcaccataaatttcttgacaggctctctgaagacacctggaggttcttccgtcggcatgctcgatctgggaggagggtccacgcaaatcgcattcttgcctagagtcgaggggacactccaggcttcaccacctggttatttgacagcactgcgcatgttcaaccgtacttataaactctacagctattag

SEQ ID NO: 322653 - DNA, 681 bp, Artificial Sequence
  derived and/or modified sequence
atgccccagcacggcccctggcagaccaggatgaggaagatcagcaaccacggcagcctgcgggtggccaaggtggcctaccccctgggcctgtgtgtgggcgtcttcatctacgtggcctacatcaagtggcaccgggccacagccacccaggccttcttcagcatcaccagggctgcccctggggcccgctggggccagcaggcccacagccccctgggcacagctgctgatggccacgaggtgttctacggcatcatgtttgatgctggcagcacaggcaccagggtgcacgtgttccagttcaccaggcctccccgggagacccccaccctgacccatgagaccttcaaggccctgaagccaggcctgagcgcctatgcagatgatgtggagaaggtgaagaaggtgttcaaggccagccccttcctggtgggagatgactgtgtgtccatcatgaatggaacagatgaaggagtgtctgcctggatcaccatcaacttcctgaccggcagcctgaagacccctgggggcagctctgtgggcatgctggacctgggcggcggcagcacccagatcgccttcctgccccgggtggagggcaccctgcaggccagccccccaggctacctgacagccctgaggatgttcaacagaacctacaagctgtacagctactag

SEQ ID NO: 322654 - DNA, 588 bp, Artificial Sequence
  derived and/or modified sequence
atgcagccccagcacggcccctggcagaccaggatgaggaagatcagcaaccacggcagcctgcgggtggccaaggtggcctaccccctgggcctgtgtgtgggcgtcttcatctacgtggcctacatcaagtggcaccgggccacagccacccaggccttcttcagcatcacccgggccgcccctggggcccgctggggccagcaggcccacagccccctgggcacagctgctgatggccacgaggtgttctacggcatcatgtttgatgctggcagcacaggcaccagggtgcacgtgttccagttcacccggcccccccgggagacccccaccctgacccatgagaccttcaaggccctgaagccaggcctgagcgcctatgcagatgatgtggagaaggtgaagaaggtgttcaaggccagccccttcctggtgggagatgactgtgtgtccatcatgaatggaacagatgagggcgtgtctgcctggatcaccatcaacttcctgaccggcagcctgaagaccccaggcggcagctctgtgggcatgctggacctgggcggcggcagcacccagatcgcctag

SEQ ID NO: 322655 - DNA, 453 bp, Artificial Sequence
  derived and/or modified sequence
tgaccaggccggggcagccccaaggaccggctgcccccagcccccaggaagagggccctggtgtctgtgggcgtggccgagagagctgtgcatgagacccccaccctgacccatgagaccttcaaggccctgaagccaggcctgagcgcctatgcagatgatgtggagaaggtgaagaaggtgttcaaggccagccccttcctggtgggagatgactgtgtgtccatcatgaatggaacagatgaaggagtgtctgcctggatcaccatcaacttcctgaccggcagcctgaagacccctgggggcagctctgtgggcatgctggacctgggcggcggcagcacccagatcgccttcctgccccgggtggagggcaccctgcaggccagccccccaggctacctgacagccctgaggatgttcaacagaacctacaagctgtacagctactag

SEQ ID NO: 322656 - DNA, 681 bp, Artificial Sequence
  derived and/or modified sequence
atgccccagcacggcccctggcagacccggatgcggaagatcagcaaccatggaagtttgcgggttgcaaaggtggcctatccgctcgggctctgtgtaggagtgttcatttatgtggcctatatcaaatggcatcgggccaccgctacccaggcttttttcagtatcactcgcgcagcccccggagcccgctggggtcagcaggcacattcacctctaggtacggcagcagatgggcacgaagtgttctacggtattatgtttgacgccgggagcactgggaccagggtgcacgtatttcagtttacccgtcctcctcgggaaacacccactctgacccatgagaccttcaaggctctgaaacccgggcttagcgcatacgcggatgacgtggaaaaagttaagaaagtgttcaaggcaagcccatttttagttggggacgattgcgtgagtattatgaatggcaccgacgagggggtgtcagcctggatcacaataaatttcttgacagggagcctaaagacccctggaggatcatctgtcggtatgttggacttgggaggtggatccacccagatcgctttcctgccacgcgtggagggaacacttcaggcatctccacctggctatctgactgcacttcgcatgttcaacaggacttacaagctatatagctattag

SEQ ID NO: 322657 - DNA, 588 bp, Artificial Sequence
  derived and/or modified sequence
atgcagccccagcacggcccctggcagacccggatgcggaagatcagcaaccacggaagcctgcgcgtcgcaaaagtggcttacccactggggctatgcgtgggggtgttcatttatgtggcatatatcaagtggcatcgggcaactgccacgcaagccttttttagcataactcgggcagccccaggtgctcgctggggccaacaagctcacagccctctgggcactgctgccgacgggcacgaggtgttttacggcatcatgttcgatgcaggaagcacgggcactagggtgcacgtgttccagtttaccaggcctcctagagaaacccctaccctcacccatgaaaccttcaaagctctgaaacccgggctctcggcctacgccgatgacgtcgaaaaggtcaaaaaagtcttcaaggcctcaccgtttctggtgggcgacgactgcgttagcatcatgaatggtactgatgagggtgtgagtgcctggattacaatcaactttctgacgggctcgctcaagactcctgggggcagctcagttggaatgttggatcttggaggggggtctactcagatcgcctag

SEQ ID NO: 322658 - DNA, 453 bp, Artificial Sequence
  derived and/or modified sequence
tgacccggccggggcagccccaaggaccggctgccccccgccccccgcaaaagagctctcgtcagcgttggggtggccgagcgtgccgtgcacgagaccccaacactgacacacgagactttcaaagccctcaagccaggactgtctgcttacgctgatgacgttgaaaaagtcaagaaagtgttcaaagcctccccatttttggtgggagatgactgtgtgtcgatcatgaatggcactgatgaaggtgtctcagcatggataactataaactttctgaccggaagtttgaagacaccaggagggtcctcagtcggcatgctggatctcggcggtggttcaacccaaatcgcgtttttacccagagttgaaggcactcttcaagcgtccccacctggttacctgaccgcccttcggatgtttaaccgcacatataaactgtattcctactag

SEQ ID NO: 322659 - DNA, 681 bp, Artificial Sequence
  derived and/or modified sequence
atgcctcagcacggcccttggcagacacgcatgcgcaagataagtaatcatggatctttgagagtcgccaaggtggcctatccactgggcctctgcgtcggcgttttcatttatgtggcgtatatcaagtggcaccgggcaaccgctacacaggctttcttcagcatcacaagggccgcacccggtgcgcgatggggccagcaggcccactctcctctcggcactgccgctgacggccacgaagtgttttatggcatcatgttcgacgctggctctaccgggacccgcgtccacgtcttccagtttacaagacctcctcgggaaaccccaaccttgacccatgagacattcaaagccctcaagcccggattatctgcctacgcggacgatgtggagaaagttaagaaagttttcaaggctagcccttttttggtgggtgatgattgcgttagcatcatgaacggcacagatgagggagtgagcgcctggatcacaatcaactttctgaccggttccctgaaaacaccaggcggaagcagcgtcgggatgctcgatctcggcggagggtccactcaaatagcctttcttcccagggtggaaggaactctgcaggctagccccccagggtaccttaccgcactcaggatgttcaatcgaacatacaagctgtactcatactag

SEQ ID NO: 322660 - DNA, 588 bp, Artificial Sequence
  derived and/or modified sequence
atgcagccgcagcacggaccctggcagacaaggatgagaaagatttctaatcatggatccctgcgagtggctaaggtggcttaccctttgggactgtgtgtgggcgtgttcatatacgtggcatatataaagtggcaccgggcaacggcaacgcaggcctttttctctattacaagagcggcaccgggagctcggtggggtcaacaggcccacagcccgcttggaacggccgcagacggccacgaggtcttctatggtattatgtttgatgctggctctaccggaacccgagttcacgttttccagttcacaaggccgcctagagaaacgcccacactgacccatgagacatttaaggccctcaaacccggactgagcgcttacgcagacgacgtcgagaaggtaaaaaaggtgtttaaagcatctccttttttggtcggggatgactgtgtctctatcatgaacgggactgatgagggcgtgtccgcttggatcacaatcaactttttgaccggttcactcaaaactccaggaggatcgtccgtgggcatgctggatctcggtggcggatcaacacagatcgcgtag

SEQ ID NO: 322661 - DNA, 453 bp, Artificial Sequence
  derived and/or modified sequence
taacccggacggggatctcccaaggaccggctgcctccagcccctcgcaagagggccctcgttagcgttggcgtggccgagagggccgtccatgagactcccaccctcacacacgagaccttcaaggcacttaaacccggtctatctgcatacgctgacgacgttgaaaaagtgaagaaagtattcaaagctagtcctttcctggtcggagatgattgtgtctccattatgaatggcaccgatgagggggtgtctgcctggataactataaacttccttactgggtctctgaagacgcccggaggctcatcagtcggaatgctcgatctggggggtggcagtacgcaaatcgcgtttctgccacgcgttgagggcaccctccaggcatcgcctccaggctacctgactgctctcagaatgttcaacagaacctataaactgtatagttattag

SEQ ID NO: 322662 - DNA, 681 bp, Artificial Sequence
  derived and/or modified sequence
atgccccagcacggcccctggcagaccagaatgagaaagatcagcaaccacggcagcctgagagtggccaaggtggcctaccccctgggcctgtgcgtgggcgtgttcatctacgtggcctacatcaagtggcacagagccaccgccacccaggccttcttcagcatcaccagagccgcccccggcgccagatggggccagcaggcccacagccccctgggcaccgccgccgacggccacgaggtgttctacggcatcatgttcgacgccggcagcaccggcaccagagtgcacgtgttccagttcaccagaccccccagagagacccccaccctgacccacgagaccttcaaggccctgaagcccggcctgagcgcctacgccgacgacgtggagaaggtgaagaaggtgttcaaggccagccccttcctggtgggcgacgactgcgtgagcatcatgaacggcaccgacgagggcgtgagcgcctggatcaccatcaacttcctgaccggcagcctgaagacccccggcggcagcagcgtgggcatgctggacctgggcggcggcagcacccagatcgccttcctgcccagagtggagggcaccctgcaggccagcccccccggctacctgaccgccctgagaatgttcaacagaacctacaagctgtacagctactag

SEQ ID NO: 322663 - DNA, 588 bp, Artificial Sequence
  derived and/or modified sequence
atgcagccccagcacggcccctggcagaccagaatgagaaagatcagcaaccacggcagcctgagagtggccaaggtggcctaccccctgggcctgtgcgtgggcgtgttcatctacgtggcctacatcaagtggcacagagccaccgccacccaggccttcttcagcatcaccagagccgcccccggcgccagatggggccagcaggcccacagccccctgggcaccgccgccgacggccacgaggtgttctacggcatcatgttcgacgccggcagcaccggcaccagagtgcacgtgttccagttcaccagaccccccagagagacccccaccctgacccacgagaccttcaaggccctgaagcccggcctgagcgcctacgccgacgacgtggagaaggtgaagaaggtgttcaaggccagccccttcctggtgggcgacgactgcgtgagcatcatgaacggcaccgacgagggcgtgagcgcctggatcaccatcaacttcctgaccggcagcctgaagacccccggcggcagcagcgtgggcatgctggacctgggcggcggcagcacccagatcgcctag

SEQ ID NO: 322664 - DNA, 453 bp, Artificial Sequence
  derived and/or modified sequence
tgacccggcagaggcagccccaaggacagactgccccccgcccccagaaagagagccctggtgagcgtgggcgtggccgagagagccgtgcacgagacccccaccctgacccacgagaccttcaaggccctgaagcccggcctgagcgcctacgccgacgacgtggagaaggtgaagaaggtgttcaaggccagccccttcctggtgggcgacgactgcgtgagcatcatgaacggcaccgacgagggcgtgagcgcctggatcaccatcaacttcctgaccggcagcctgaagacccccggcggcagcagcgtgggcatgctggacctgggcggcggcagcacccagatcgccttcctgcccagagtggagggcaccctgcaggccagcccccccggctacctgaccgccctgagaatgttcaacagaacctacaagctgtacagctactag

SEQ ID NO: 322665 - DNA, 809 bp, Artificial Sequence
  derived and/or modified sequence
gtggggtcgtatcccgcgggtggaggccggggtggcgccggccggggcgggggagcccaaaagaccggctgccgcctgctccccggaaaagggcactcgtctccgtgggtgtggcggagcgcgcggtgcatgccgcagcacggtccttggcaaacaaggatgagaaaaatatccaaccacgggagcctgcgggtggcgaaggtggcataccccctggggctgtgtgtgggcgtgttcatctatgttgcctacatcaagtggcaccgggccaccgccacccaggccttcttcagcatcaccagggcagccccgggggcccggtggggtcagcaggcccacagccccctggggacagctgcagacgggcacgaggtcttctacgggatcatgtttgatgcaggaagcactggcacccgagtacacgtcttccagttcacccggccccccagagaaactcccacgttaacccacgaaaccttcaaagcactgaagccaggtctttctgcctatgctgatgatgttgaaaaggtgaaaaaagtatttaaagcatcgcctttccttgtaggggatgactgtgtttccatcatgaacggaacagatgaaggcgtttcggcgtggatcaccatcaacttcctgacaggcagcttgaaaactccaggagggagcagcgtgggcatgctggacttgggcggaggatccactcagatcgccttcctgccacgcgtggagggcaccctgcaggcctccccacccggctacctgacggcactgcggatgtttaacaggacctacaagctctattcctacag

SEQ ID NO: 322666 - DNA, 656 bp, Artificial Sequence
  derived and/or modified sequence
caaaagaccggctgccgcctgctccccggaaaagggcactcgtctccgtgggtgtggcggagcgcgcggtgcatgcagccgcagcacggtccttggcaaacaaggatgagaaaaatatccaaccacgggagcctgcgggtggcgaaggtggcataccccctggggctgtgtgtgggcgtgttcatctatgttgcctacatcaagtggcaccgggccaccgccacccaggccttcttcagcatcaccagggcagccccgggggcccggtggggtcagcaggcccacagccccctggggacagctgcagacgggcacgaggtcttctacgggatcatgtttgatgcaggaagcactggcacccgagtacacgtcttccagttcacccggccccccagagaaactcccacgttaacccacgaaaccttcaaagcactgaagccaggtctttctgcctatgctgatgatgttgaaaaggtgaaaaaagtatttaaagcatcgcctttccttgtaggggatgactgtgtttccatcatgaacggaacagatgaaggcgtttcggcgtggatcaccatcaacttcctgacaggcagcttgaaaactccaggagggagcagcgtgggcatgctggacttgggcggaggatccactcagatcgc

SEQ ID NO: 322667 - DNA, 451 bp, Artificial Sequence
  derived and/or modified sequence
ggccggggcgggggagcccaaaagaccggctgccgcctgctccccggaaaagggcactcgtctccgtgggtgtggcggagcgcgcggtgcatgaaactcccacgttaacccacgaaaccttcaaagcactgaagccaggtctttctgcctatgctgatgatgttgaaaaggtgaaaaaagtatttaaagcatcgcctttccttgtaggggatgactgtgtttccatcatgaacggaacagatgaaggcgtttcggcgtggatcaccatcaacttcctgacaggcagcttgaaaactccaggagggagcagcgtgggcatgctggacttgggcggaggatccactcagatcgccttcctgccacgcgtggagggcaccctgcaggcctccccacccggctacctgacggcactgcggatgtttaacaggacctacaagctctattcctacag

SEQ ID NO: 322668 - DNA, 945 bp, Artificial Sequence
  derived and/or modified sequence
tgaaatcggggagtagttagcaggggctggcgcccgggatggcggcggcctgggagaggaagccccaaagaccgactgcctcctgctccacgcaagagagccttagtcagcgtcggggttgctgaaagggcggttcacgaaacaccaacccttactcacgagacattcaaggctttaaagcccggactctctgcctacgccgatgatgtggaaaaaagcgcgcaggggatccgcgagttgctggacgttgccaaacaggacattccctttgacttttggaaggctacccccttggtccttaaagctacagcaggcctccggctgctgccaggcgagaaagcacagaagttgctccagaaggtgaagaaagtgttcaaagcgagtccgttccttgtgggagatgattgtgtgtccatcatgaacgggaccgacgaaggcgtctcagcttggattacaataaattttctgaccgggtccttgaaaaccccaggtggttcctccgttgggatgttggacctgggcgggggatccacacaaatagccttcctgccaagagtggaggggaccctccaggcttctccgccaggatatctaaccgcccttcggatgttcaatagaacgtacaaactctatagttatagctacttggggctgggactgatgagcgcaagactggccatcctcggtggagtggagggacagccagccaaggatgggaaagaactcgtctcaccatgcctctcaccctcattcaagggggagtgggagcatgctgaggtgacatacagggtgtctggtcaaaaggccgctgccagtttgcacgaactttgtgctgctcgggtgtccgaggtgctccagaaccgtgtccacaggactgaggaggttaagcatgtggacttctacgcattctcatactattacgacctcgccgctggagttggctag

SEQ ID NO: 322669 - DNA, 891 bp, Artificial Sequence
  derived and/or modified sequence
atgcctcagcacggaccatggcagacacggatgcgaaaaataagcaaccatggctctctcagggtcgccaaagttgcttaccctctcgggctgtgcgtgggcgtgttcatatatgtcgcatacataaaatggcatcgggctactgccacgcaggcctttttctcaatcacgagagcagcgccgggcgcccgatggggccaacaagcacactcccctctggggacggccgctgatggtcacgaagttttctatggaataatgttcgacgctgggtccacaggtacacgggtccacgtattccagttcacgaggcccccaagagagacaccaaccctgacccacgaaacctttaaggctctgaagcccggcctgtcagcttacgccgatgacgtagagaagagcgctcaaggtattagagaactcctggacgtagctaagcaagacatcccgttcgacttttggaaggccacgccactggtgctgaaggcaaccgccggactgaggttattaccgggggaaaaagcccagaaactgctgcagaaagtgaagaaagtatttaaagcctcgccatttcttgttggcgacgattgcgtgtcaatcatgaacggcacagatgagggggttagcgcctggatcaccattaattttctcacggggtcactcaagaccccgggtggcagttctgtgggaatgctcgatctcggaggaggtagtactcagatagcgtttctgccaagagtggagggaaccctccaagcttcgccacctggctaccttactgccttgcgaatgttcaacaggacttacaaactgtactcttacagctatctgggactgggcttaatgtccgctagactggcaatcctgggaggcgtcgaaggccagccatag

SEQ ID NO: 322670 - DNA, 942 bp, Artificial Sequence
  derived and/or modified sequence
aaccgaggagtggtaagcaggggatggaggccaggctggcggaggcccggccgaggctcacccaaggaccgcctcccgcctgcacctaggaagcgggctctggtgtcagtgggagtagctgagcgcgcagtgcacgaaacgccaacactcacccacgaaacgttcaaagccctcaagcccggcctgtctgcatacgctgacgatgtggaaaaatctgcacagggcattagggaactcctggacgtggccaagcaggacatcccattcgacttttggaaggcaactccccttgtgctgaaagccaccgccggtctgcggctgctgccaggcgaaaaggctcagaagctcctgcagaaagtgaaaaaggtgttcaaagccagtccttttttggtcggcgacgattgcgtgagtataatgaatggtaccgatgaaggtgtgagtgcttggatcaccatcaactttttgacaggttccttgaaaactccagggggaagctccgtaggaatgctggatctgggtgggggtagcactcagattgcattcttgccccgagtggagggcactctgcaagcaagcccacctggatacctgacagccttgagaatgttcaacagaacctacaaactgtatagttactcctatctgggactgggtctcatgagtgccaggttggcgatattagggggagtggaaggtcaaccggcgaaggatggtaaggagctcgtgtcaccatgcctttctccgtcattcaagggggagtgggagcacgccgaggtcacttaccgcgtgtctggccagaaggctgccgcttctcttcacgagctgtgcgctgccagggtgtcagaggtcctgcaaaatagggttcatcggactgaagaggttaagcacgtggacttctacgccttttcatattactacgatttagccgccggtgtcggatag

SEQ ID NO: 322671 - DNA, 945 bp, Artificial Sequence
  derived and/or modified sequence
tgaaacagaggagtggtgtcccggggctggaggcctggctggaggaggcctggccggggcagccccaaggaccggctgcccccagcccccaggaagagggccctggtgtctgtgggcgtggccgagagagctgtgcatgagacccccaccctgacccatgagaccttcaaggccctgaagccaggcctgagcgcctatgcagatgatgtggagaagagcgcccagggcatccgggagctgctggatgtggccaagcaggacatcccctttgacttctggaaggccacccccctggtgctgaaggccacagctggcctgcggctgctgcccggggagaaggcccagaagctgctgcagaaggtgaagaaggtgttcaaggccagccccttcctggtgggagatgactgtgtgtccatcatgaatggaacagatgagggcgtgtctgcctggatcaccatcaacttcctgaccggcagcctgaagaccccaggcggcagctctgtgggcatgctggacctgggcggcggcagcacccagatcgccttcctgccccgggtggagggcaccctgcaggccagccccccaggctacctgacagccctgaggatgttcaacagaacctacaagctgtacagctacagctacctgggcctgggcctgatgtctgcccggctggccatcctgggcggcgtggagggccagcctgccaaggatggcaaggagctggtgagcccctgcctgagccccagcttcaagggggagtgggagcacgccgaggtgacctacagagtgtctggccagaaggccgccgccagcctgcacgagctgtgtgccgcccgggtgtctgaggtgctgcagaacagagtgcacaggacagaggaggtgaagcacgtggacttctacgccttctcctactactatgacctggccgccggcgtgggctag

SEQ ID NO: 322672 - DNA, 891 bp, Artificial Sequence
  derived and/or modified sequence
atgccccagcacggcccctggcagaccaggatgaggaagatcagcaaccacggcagcctgcgggtggccaaggtggcctaccccctgggcctgtgtgtgggcgtcttcatctacgtggcctacatcaagtggcaccgggccacagccacccaggccttcttcagcatcaccagggctgcccctggggcccgctggggccagcaggcccacagccccctgggcacagctgctgatggccacgaggtgttctacggcatcatgtttgatgctggcagcacaggcaccagggtgcacgtgttccagttcaccaggcctccccgggagacccccaccctgacccatgagaccttcaaggccctgaagccaggcctgagcgcctatgcagatgatgtggagaagagcgcccagggcatccgggagctgctggatgtggccaagcaggacatcccctttgacttctggaaggccacccccctggtgctgaaggccacagctggcctgcggctgctgcctggagagaaggcccagaagctgctgcagaaggtgaagaaggtgttcaaggccagccccttcctggtgggagatgactgtgtgtccatcatgaatggaacagatgaaggagtgtctgcctggatcaccatcaacttcctgaccggcagcctgaagacccctgggggcagctctgtgggcatgctggacctgggcggcggcagcacccagatcgccttcctgccccgggtggagggcaccctgcaggccagccccccaggctacctgacagccctgaggatgttcaacagaacctacaagctgtacagctacagctacctgggcctgggcctgatgtctgcccggctggccatcctgggcggcgtggagggccagccctag

SEQ ID NO: 322673 - DNA, 942 bp, Artificial Sequence
  derived and/or modified sequence
aacagaggagtggtgtcccggggctggaggcctggctggaggcggcccggccggggcagccccaaggaccggctgcccccagcccccaggaagagggccctggtgtctgtgggcgtggccgagagagctgtgcatgagacccccaccctgacccatgagaccttcaaggccctgaagccaggcctgagcgcctatgcagatgatgtggagaagagcgcccagggcatccgggagctgctggatgtggccaagcaggacatcccctttgacttctggaaggccacccccctggtgctgaaggccacagctggcctgcggctgctgcctggagagaaggcccagaagctgctgcagaaggtgaagaaggtgttcaaggccagccccttcctggtgggagatgactgtgtgtccatcatgaatggaacagatgaaggagtgtctgcctggatcaccatcaacttcctgaccggcagcctgaagacccctgggggcagctctgtgggcatgctggacctgggcggcggcagcacccagatcgccttcctgccccgggtggagggcaccctgcaggccagccccccaggctacctgacagccctgaggatgttcaacagaacctacaagctgtacagctacagctacctgggcctgggcctgatgtctgcccggctggccatcctgggcggcgtggagggccagcctgccaaggatggcaaggagctggtgagcccctgcctgagccccagcttcaagggggagtgggagcacgccgaggtgacctacagagtgtctggccagaaggctgctgccagcctgcacgagctgtgtgccgcccgggtgtctgaggtgctgcagaacagagtgcacaggacagaggaggtgaagcacgtggacttctacgccttctcctactactatgacctggccgccggcgtgggctag

SEQ ID NO: 322674 - DNA, 945 bp, Artificial Sequence
  derived and/or modified sequence
tgaaaccggggcgtggtgagccggggctggcggcccggctggcggagacccgggagaggctcaccaaaagatcgactgcccccagctcctaggaagcgggcgctggtttcagtcggcgttgccgagcgtgctgttcatgaaacccccactctcacacacgagacattcaaagcactgaagccaggcctcagtgcatatgccgacgacgtggaaaaaagtgcacaaggcatacgcgaactgctggacgtagctaagcaggatatcccgttcgacttctggaaggcaaccccactcgttctgaaagccactgcagggctgcgactcctcccaggggaaaaggcccagaaacttctgcagaaggtgaaaaaggttttcaaggcctctcccttcctagtaggcgacgattgtgtcagcattatgaacggaacggacgagggagtgagtgcctggatcaccattaatttccttactggcagtttgaagacacccggcggatcatctgttggaatgctggatctgggagggggcagcactcagatagcgtttctgcctcgcgtcgaaggtaccctgcaggcttccccccctggctacctgactgccttacgaatgttcaatcgcacttataaactgtattcgtactcgtacctgggacttggcctcatgtctgctcgtctcgccatcctgggtggcgtggaaggccagcctgccaaggatggaaaggagcttgtctccccctgcctgtcaccttctttcaagggcgaatgggagcatgctgaggtgacgtaccgcgtgagtgggcagaaggcagctgcctcactgcatgaactctgcgctgcccgtgtttctgaggtgctgcagaatcgtgttcaccgtactgaagaagtcaagcacgtagacttctacgccttcagctactattatgacttggccgccggagtggggtag

SEQ ID NO: 322675 - DNA, 891 bp, Artificial Sequence
  derived and/or modified sequence
atgccccagcacggcccctggcagacccggatgcggaagatcagcaatcatggcagcctgcgggtggctaaggtggcctatcctctgggcctgtgtgtgggagtgttcatctacgttgcttacatcaaatggcacagagcaactgctactcaggccttcttctctatcacaagggccgccccaggcgctcggtgggggcaacaggctcacagcccacttggaactgcagcagacggtcatgaagtattttacggtattatgttcgacgctggtagtactggaactcgcgtgcacgtcttccagttcaccaggcctccccgagagacccctactctgactcatgaaacattcaaggcactcaagcctggcctgtctgcctacgcagatgatgttgagaaaagtgcccagggtattagggaactgctggacgtggccaagcaggacatccccttcgatttctggaaggctacaccactcgttttaaaggccactgccgggttgaggctgctgcccggcgagaaggctcagaaactcctgcagaaggtgaagaaagtgtttaaagcctccccattcctcgtgggggatgactgcgtcagcatcatgaatggcaccgatgagggggtgagtgcgtggattactataaatttcctcacaggctccctcaagacacccggcggttcatccgtcggaatgctcgacctcgggggcggttccacgcagatcgcctttctaccaagggtggaggggaccctgcaggcatctccacctggataccttacggccctaagaatgttcaaccgcacatataagttatacagctactcgtatctgggccttgggctgatgtctgcccgcctcgctatcctggggggagtagaaggccagccttag

SEQ ID NO: 322676 - DNA, 942 bp, Artificial Sequence
  derived and/or modified sequence
aaccggggcgtggtgagccggggctggcggcccggctggcggcggccgggacgcggatcccctaaagatcgcctgccacctgcaccacggaagcgggccttggttagcgtaggtgtggctgagcgggcagtacacgaaacacccacactgacccatgagacttttaaagcacttaaacccggacttagtgcctatgcagacgacgttgagaaatctgctcagggcataagagagctgttggacgttgcaaaacaggacattccattcgacttctggaaggccaccccattagtgctcaaggccacggcgggtctgcgattgttgcctggggagaaggcccagaagttgcttcaaaaggtgaagaaggtgtttaaagcctctccttttctggttggtgacgattgtgtctctattatgaacggcacagatgagggcgtaagtgcctggatcacgattaacttcctgactgggagcttaaagactccaggcggcagttcagtgggcatgctcgacctgggaggcggatcaacccaaatcgccttcctgccccgtgtggaaggaacactgcaagcctcaccaccaggataccttaccgcactgagaatgttcaataggacatataaactctattcctactcttatctaggactcggactgatgtccgcccggctcgccatcctgggaggcgtggaaggccagccggcaaaagatggaaaagagctggtgagtccgtgtttatctccaagttttaaaggtgaatgggagcacgcagaggttacttatcgagtgtcgggacagaaagctgcagcctcacttcacgagctctgcgcagcccgcgtctcggaggtgctgcaaaaccgggtccatcgcacggaagaagtgaaacacgtggacttctatgccttttcatactactacgaccttgccgcaggtgttggctag

SEQ ID NO: 322677 - DNA, 945 bp, Artificial Sequence
  derived and/or modified sequence
taaaacagaggtgttgtgagccggggatggaggcccggatggcgccgtccagggagagggtcccctaaggatcgactgccgcctgctccacgaaagcgggcactagtatctgtaggcgtggccgagcgtgccgttcacgaaactccaactcttactcatgaaacatttaaagcgctgaagccgggactgtccgcgtacgcagacgacgtcgaaaaatccgcccagggtattagagaacttcttgacgttgccaaacaggacatccctttcgacttctggaaagccacacctctcgtgctgaaagccaccgctggtctgcgcttactaccaggcgaaaaggcccagaagctccttcagaaagtcaaaaaggtatttaaagcttcccccttcctcgtgggcgacgactgcgtgtctatcatgaacggcacggacgagggagtgagtgcgtggatcactatcaacttcttaactggatcgctcaaaacccccggagggtctagtgtcggtatgctggacctgggcggaggctctacgcagattgccttcctcccccgtgttgagggtactttgcaagcaagcccgcctgggtacctaactgctctgcgaatgttcaatagaacttacaaactttattcatattcctatttggggctgggcttgatgtctgcacgactcgccattctcggcggtgtggaaggacagccagcgaaagatggtaaagagctggtctctccatgcctgtcacctagtttcaagggcgaatgggaacacgccgaggtgacatacagggttagcgggcagaaggcggctgcctctttgcacgagctgtgtgctgccagagtgtcagaagtgttacaaaaccgggtacacaggacggaagaagtgaagcacgtggacttctacgccttctcttattactatgatttggctgcgggagtgggatag

SEQ ID NO: 322678 - DNA, 891 bp, Artificial Sequence
  derived and/or modified sequence
atgcctcagcacggaccatggcaaacgagaatgcggaaaatatctaatcatgggtctcttcgtgtcgcaaaagttgcttacccgttaggcctgtgcgtaggggtgttcatttacgtagcctacatcaaatggcaccgtgctactgctacccaggccttcttctcaataacaagagccgctcccggtgctaggtggggccagcaggcacattcgccccttgggactgcggcagacggacatgaggtgttctacggtatcatgttcgacgcaggttctacaggaacgcgggtccatgtcttccaattcaccaggccaccgagagaaacccctacactcacacacgaaacctttaaggccctgaagcctggcctgtcagcctacgcagacgatgtcgagaagtccgcccaggggatccgcgagctgctcgacgtcgccaaacaggatattccatttgacttctggaaggctacacctctggtactgaaggccactgctggactacgcctcttacccggagagaaggcgcaaaagctgttgcagaaggtcaagaaggtgttcaaagcatccccgttcctggttggcgatgattgtgtgagcatcatgaacggcacagacgaaggtgtgagtgcttggatcacaataaattttttgacaggctccctgaaaacccccggagggagcagtgtggggatgctcgatctagggggtgggagcactcagatagccttcctccccagagtggaaggaacattgcaagccagccctccgggatatctgaccgcgctgcggatgtttaatagaacctataaactgtatagctactcctatctgggcctgggcctgatgagtgccaggctcgccattttggggggtgttgagggtcagccatag

SEQ ID NO: 322679 - DNA, 942 bp, Artificial Sequence
  derived and/or modified sequence
aacagaggagttgtgtcacgcggttggcgccctgggtggagacgccctggtcggggaagccctaaagatcgtctgccacccgctcctcgcaagagggctctggtatctgtgggagtggcagagcgcgcagtgcacgagactcctaccttgacacacgagacatttaaggccctgaagcccggacttagcgcatatgccgatgatgtggagaaatctgcccaggggattagggagctgctggatgtggccaaacaggacataccattcgacttctggaaagccaccccgttggtccttaaggctaccgcaggattacggctcctcccaggagaaaaggcccagaagctcctgcagaaggtgaaaaaagtttttaaagcatctccttttcttgtgggggatgactgtgtttcaatcatgaacggcactgatgagggggtgtccgcttggataactattaatttcttgaccggatctctcaagactcctggcggatcatcggtgggtatgttagatttgggagggggatctacccagatagcctttcttccacgcgttgagggaacactgcaggcttccccgcctggctacctgaccgcattgagaatgtttaataggacctacaagctttacagttatagctatctcggcctaggcctgatgtccgccaggcttgcaattctgggcggtgtcgagggccagcccgctaaagacggcaaggagttggtgtctccctgtttgagtccaagctttaagggagaatgggaacacgctgaggtgacataccgggtgagcggtcagaaagcagcagcatccctgcatgagctttgcgccgctagagtctccgaggtactccaaaatagggtgcaccgaacagaggaggttaaacacgtcgatttttacgccttcagttattactacgacctggcagctggagtcggatag

SEQ ID NO: 322680 - DNA, 945 bp, Artificial Sequence
  derived and/or modified sequence
tgaaacagaggcgtggtgagcagaggctggagacccggctggagaagacccggcagaggcagccccaaggacagactgccccccgcccccagaaagagagccctggtgagcgtgggcgtggccgagagagccgtgcacgagacccccaccctgacccacgagaccttcaaggccctgaagcccggcctgagcgcctacgccgacgacgtggagaagagcgcccagggcatcagagagctgctggacgtggccaagcaggacatccccttcgacttctggaaggccacccccctggtgctgaaggccaccgccggcctgagactgctgcccggcgagaaggcccagaagctgctgcagaaggtgaagaaggtgttcaaggccagccccttcctggtgggcgacgactgcgtgagcatcatgaacggcaccgacgagggcgtgagcgcctggatcaccatcaacttcctgaccggcagcctgaagacccccggcggcagcagcgtgggcatgctggacctgggcggcggcagcacccagatcgccttcctgcccagagtggagggcaccctgcaggccagcccccccggctacctgaccgccctgagaatgttcaacagaacctacaagctgtacagctacagctacctgggcctgggcctgatgagcgccagactggccatcctgggcggcgtggagggccagcccgccaaggacggcaaggagctggtgagcccctgcctgagccccagcttcaagggcgagtgggagcacgccgaggtgacctacagagtgagcggccagaaggccgccgccagcctgcacgagctgtgcgccgccagagtgagcgaggtgctgcagaacagagtgcacagaaccgaggaggtgaagcacgtggacttctacgccttcagctactactacgacctggccgccggcgtgggctag

SEQ ID NO: 322681 - DNA, 891 bp, Artificial Sequence
  derived and/or modified sequence
atgccccagcacggcccctggcagaccagaatgagaaagatcagcaaccacggcagcctgagagtggccaaggtggcctaccccctgggcctgtgcgtgggcgtgttcatctacgtggcctacatcaagtggcacagagccaccgccacccaggccttcttcagcatcaccagagccgcccccggcgccagatggggccagcaggcccacagccccctgggcaccgccgccgacggccacgaggtgttctacggcatcatgttcgacgccggcagcaccggcaccagagtgcacgtgttccagttcaccagaccccccagagagacccccaccctgacccacgagaccttcaaggccctgaagcccggcctgagcgcctacgccgacgacgtggagaagagcgcccagggcatcagagagctgctggacgtggccaagcaggacatccccttcgacttctggaaggccacccccctggtgctgaaggccaccgccggcctgagactgctgcccggcgagaaggcccagaagctgctgcagaaggtgaagaaggtgttcaaggccagccccttcctggtgggcgacgactgcgtgagcatcatgaacggcaccgacgagggcgtgagcgcctggatcaccatcaacttcctgaccggcagcctgaagacccccggcggcagcagcgtgggcatgctggacctgggcggcggcagcacccagatcgccttcctgcccagagtggagggcaccctgcaggccagcccccccggctacctgaccgccctgagaatgttcaacagaacctacaagctgtacagctacagctacctgggcctgggcctgatgagcgccagactggccatcctgggcggcgtggagggccagccctag

SEQ ID NO: 322682 - DNA, 942 bp, Artificial Sequence
  derived and/or modified sequence
aacagaggcgtggtgagcagaggctggagacccggctggagaagacccggcagaggcagccccaaggacagactgccccccgcccccagaaagagagccctggtgagcgtgggcgtggccgagagagccgtgcacgagacccccaccctgacccacgagaccttcaaggccctgaagcccggcctgagcgcctacgccgacgacgtggagaagagcgcccagggcatcagagagctgctggacgtggccaagcaggacatccccttcgacttctggaaggccacccccctggtgctgaaggccaccgccggcctgagactgctgcccggcgagaaggcccagaagctgctgcagaaggtgaagaaggtgttcaaggccagccccttcctggtgggcgacgactgcgtgagcatcatgaacggcaccgacgagggcgtgagcgcctggatcaccatcaacttcctgaccggcagcctgaagacccccggcggcagcagcgtgggcatgctggacctgggcggcggcagcacccagatcgccttcctgcccagagtggagggcaccctgcaggccagcccccccggctacctgaccgccctgagaatgttcaacagaacctacaagctgtacagctacagctacctgggcctgggcctgatgagcgccagactggccatcctgggcggcgtggagggccagcccgccaaggacggcaaggagctggtgagcccctgcctgagccccagcttcaagggcgagtgggagcacgccgaggtgacctacagagtgagcggccagaaggccgccgccagcctgcacgagctgtgcgccgccagagtgagcgaggtgctgcagaacagagtgcacagaaccgaggaggtgaagcacgtggacttctacgccttcagctactactacgacctggccgccggcgtgggctag

SEQ ID NO: 322683 - DNA, 940 bp, Artificial Sequence
  derived and/or modified sequence
ggaatcgtggggtcgtatcccgcgggtggaggccggggtggcgccggccggggcgggggagcccaaaagaccggctgccgcctgctccccggaaaagggcactcgtctccgtgggtgtggcggagcgcgcggtgcatgaaactcccacgttaacccacgaaaccttcaaagcactgaagccaggtctttctgcctatgctgatgatgttgaaaagagcgctcagggaatccgggaactactggatgttgctaaacaggacattccgttcgacttctggaaggccacccctctggtcctcaaggccacagctggcttacgcctgttacctggagaaaaggcccagaagttactgcagaaggtgaaaaaagtatttaaagcatcgcctttccttgtaggggatgactgtgtttccatcatgaacggaacagatgaaggcgtttcggcgtggatcaccatcaacttcctgacaggcagcttgaaaactccaggagggagcagcgtgggcatgctggacttgggcggaggatccactcagatcgccttcctgccacgcgtggagggcaccctgcaggcctccccacccggctacctgacggcactgcggatgtttaacaggacctacaagctctattcctacagctacctcgggctcgggctgatgtcggcacgcctggcgatcctgggcggcgtggaggggcagcctgctaaggatggaaaggagttggtcagcccttgcttgtctcccagtttcaaaggagagtgggaacacgcagaagtcacgtacagggtttcagggcagaaagcagcggcaagcctgcacgagctgtgtgctgccagagtgtcagaggtccttcaaaacagagtgcacaggacggaggaagtgaagcatgtggacttctatgctttctcctactattacgaccttgcagctggtgtggg

SEQ ID NO: 322684 - DNA, 1028 bp, Artificial Sequence
  derived and/or modified sequence
ctagggaatcgtggggtcgtatcccgcgggtggaggccggggtggcgccggccggggcgggggagcccaaaagaccggctgccgcctgctccccggaaaagggcactcgtctccgtgggtgtggcggagcgcgcggtgcatgccgcagcacggtccttggcaaacaaggatgagaaaaatatccaaccacgggagcctgcgggtggcgaaggtggcataccccctggggctgtgtgtgggcgtgttcatctatgttgcctacatcaagtggcaccgggccaccgccacccaggccttcttcagcatcaccagggcagccccgggggcccggtggggtcagcaggcccacagccccctggggacagctgcagacgggcacgaggtcttctacgggatcatgtttgatgcaggaagcactggcacccgagtacacgtcttccagttcacccggccccccagagaaactcccacgttaacccacgaaaccttcaaagcactgaagccaggtctttctgcctatgctgatgatgttgaaaagagcgctcagggaatccgggaactactggatgttgctaaacaggacattccgttcgacttctggaaggccacccctctggtcctcaaggccacagctggcttacgcctgttacctggagaaaaggcccagaagttactgcagaaggtgaaaaaagtatttaaagcatcgcctttccttgtaggggatgactgtgtttccatcatgaacggaacagatgaaggcgtttcggcgtggatcaccatcaacttcctgacaggcagcttgaaaactccaggagggagcagcgtgggcatgctggacttgggcggaggatccactcagatcgccttcctgccacgcgtggagggcaccctgcaggcctccccacccggctacctgacggcactgcggatgtttaacaggacctacaagctctattcctacagctacctcgggctcgggctgatgtcggcacgcctggcgatcctgggcggcgtggaggggcagcctg

SEQ ID NO: 322685 - protein, 698 aa, Artificial Sequence
  derived and/or modified sequence
MDIEDEENMSSSSTDVKENRNLDNVSPKDGSTPGPGEGSQLSNGGGGGPGRKRPLEEGSNGHSKYRLKKRRKTPGPVLPKNALMQLNEIKPGLQYTLLSQTGPVHAPLFVMSVEVNGQVFEGSGPTKKKAKLHAAEKALRSFVQFPNASEAHLAMGRTLSVNTDFTSDQADFPDTLFNGFETPDKAEPPFYVGSNGDDSFSSSGDLSLSASPVPASLAQPPLPVLPPFPPPSGKNPVMILNELRPGLKYDFLSESGESHAKSFVMSVVVDGQFFEGSGRNKKLAKARAAQSALAAIFNLHLDQTPSRQPIPSEGLQLHLPQVLADAVSRLVLGKFGDLTDNFSSPHARRKVLAGVVMTTGTDVKDAKVISVSTGTKCINGEYMSDRGLALNDCHAEIISRRSLLRFLYTQLELYLNNKDDQKRSIFQKSERGGFRLKENVQFHLYISTSPCGDARIFSPHEPILEGSRSYTQAGVQWCNHGSLQPRPPGLLSDPSTSTFQGAGTTEPADRHPNRKARGQLRTKIESGEGTIPVRSNASIQTWDGVLQGERLLTMSCSDKIARWNVVGIQGSLLSIFVEPIYFSSIILGSLYHGDHLSRAMYQRISNIEDLPPLYTLNKPLLSGISNAEARQPGKAPNFSVNWTVGDSAIEVINATTGKDELGRASRLCKHALYCRWACARQGSLPLTTLQDYQAQRVP

SEQ ID NO: 322686 - DNA, 39 bp, Artificial Sequence
  derived and/or modified sequence
atggatattgaggacgaggaaaatatgtccttcagttag

SEQ ID NO: 322687 - DNA, 39 bp, Artificial Sequence
  derived and/or modified sequence
atggacattgaagatgaggagaacatgtccttctcctag

SEQ ID NO: 322688 - DNA, 39 bp, Artificial Sequence
  derived and/or modified sequence
atggatatagaagacgaggagaatatgtccttttcctag

SEQ ID NO: 322689 - DNA, 39 bp, Artificial Sequence
  derived and/or modified sequence
atggacatcgaggacgaggagaacatgagcttcagctag

SEQ ID NO: 322690 - protein, 701 aa, Artificial Sequence
  derived and/or modified sequence
MDIEDEENMSSSSTDVKENRNLDNVSPKDGSTPGPGEGSQLSNGGGGGPGRKRPLEEGSNGHSKYRLKKRRKTPGPVLPKNALMQLNEIKPGLQYTLLSQTGPVHAPLFVMSVEVNGQVFEGSGPTKKKAKLHAAEKALRSFVQFPNASEAHLAMGRTLSVNTDFTSDQADFPDTLFNGFETPDKAEPPFYVGSNGDDSFSSSGDLSLSASPVPASLAQPPLPVLPPFPPPSGKNPVMILNELRPGLKYDFLSESGESHAKSFVMSVVVDGQFFEGSGRNKKLAKARAAQSALAAIFNLHLDQTPSRQPIPSEGLQLHLPQVLADAVSRLVLGKFGDLTDNFSSPHARRKVLAGVVMTTGTDVKDAKVISVSTGTKCINGEYMSDRGLALNDCHAEIISRRSLLRFLYTQLELYLNNKDDQKRSIFQKSERGGFRLKENVQFHLYISTSPCGDARIFSPHEPILEEPADRHPNRKARGQLRTKIESGEGTIPVRSNASIQTWDGVLQGERLLTMSCSDKIARWNVVGIQGSLLSIFVEPIYFSSIILGSLYHGDHLSRAMYQRISNIEDLPPLYTLNKPLLSGISNAEARQPGKAPNFSVNWTVGDSAIEVINATTGKDELGRASRLCKHALYCRWMRVHGKVPSHLLRSKITKPNVYHESKLAAKEYQAAKARLFTAFIKAGLGAWVEKPTEQDQFSLTP

SEQ ID NO: 322691 - protein, 141 aa, Artificial Sequence
  derived and/or modified sequence
MDIEDEENMSSSSTDVKENRNLDNVSPKDGSTPGPGEGSQLSNGGGGGPGRKRPLEEGSNGHSKYRLKKRRKTPGPVLPKNALMQLNEIKPGLQYTLLSQTGPVHAPLFVMSVEVNGQVFEGSGPTKKKAKLHAAEKALRS

SEQ ID NO: 322692 - DNA, 2106 bp, Artificial Sequence
  derived and/or modified sequence
atggacatagaggacgaggagaatatgtcatcttcctctacagacgtcaaggagaaccgtaatctggataacgtttccccgaaggacggctcgactcccggcccgggtgagggctcacagttgtccaacggtggcggtggagggcccggtaggaagaggccactggaggagggaagtaatggacactctaaataccgacttaagaagaggagaaagactccgggacccgtcctcccaaagaatgccctgatgcagctaaacgagataaaacccggtctccagtacacactgttgtcccaaacgggaccggtacacgccccactctttgtgatgagtgtggaggtgaacggacaggtgtttgagggttcaggtccaaccaagaagaaggcaaagcttcatgctgctgagaaggcccttcgctccttcgtccagttccctaatgcctccgaagcccacttagccatgggcaggactctttcagttaacaccgattttacatccgatcaggcagacttccccgataccctttttaatggcttcgaaacgcccgacaaagcagagccaccattttatgtcggtagcaacggggacgacagctttagctctagcggagacctgtccctgtccgcttcccctgtgcctgcctccctcgcccagcctccactcccggtgctacccccattcccaccaccgagtggtaagaatcccgtcatgatactgaacgagctgaggcctggactgaagtacgactttctctccgagagcggtgaaagtcatgctaaatcattcgtcatgtctgtagttgtagatggccagttctttgaggggtctggtcgcaataaaaaacttgcaaaagcccgcgccgcacaaagcgcactggctgcaattttcaatctccatcttgaccagactccaagtcgacaacccatcccctctgagggccttcagctgcacttaccacaagtgcttgccgatgctgtatcaaggctcgtgcttggcaaattcggagacctgacagataacttctcgtctcctcatgcacgtcgcaaagttctggccggagtcgttatgacaacaggtaccgacgtgaaagatgcaaaagtcatcagcgtgagcacaggtacaaagtgcatcaacggcgaatacatgagcgaccgcgggctggccctcaacgactgccatgccgagatcatctctcgccgctccctgctacggtttctgtacacccagttggagttatatcttaataataaggacgaccagaaacgctcgatcttccagaaaagcgagagaggcggttttcgactgaaggagaatgtacaatttcacctgtatatcagcaccagtccgtgtggcgacgccagaattttctcaccgcacgaacccatactggaagaaccagccgatcgacacccaaacaggaaagcacgaggacagctacggactaagattgaaagtggtgagggaaccatcccagtgcgttccaacgcaagcatccagacctgggatggggtgctacaaggtgaaagattgctaacgatgagctgtagcgacaagatcgccaggtggaacgtggtgggaatccagggaagcttgttgtctatttttgttgaacccatttacttttcttcaattatcctaggctcactttatcacggagaccatctgtctcgcgccatgtaccagagaataagcaacattgaggacctgccccccctctataccctcaataaaccactgttgtccggaatatctaatgccgaagcccgacaaccaggcaaggccccaaatttttccgttaattggactgttggggactccgcgatcgaggtgatcaacgcaactactgggaaagatgaactgggcagagcctcacgactatgtaagcacgctctctattgtcgctggatgagggtgcacggaaaggtaccatcccatttgcttcggtccaagattactaagcctaatgtgtaccatgaaagtaagctcgcagcgaaggagtatcaggctgcaaaggctaggctgtttacagctttcatcaaagccggtctcggagcctgggtcgagaagcccacagagcaggaccagttcagcctgacgccatag

SEQ ID NO: 322693 - DNA, 3977 bp, Artificial Sequence
  derived and/or modified sequence
gcggcggcggcggcggcggcggcagcggcggccaagcggccaggttggcggccggggctccgggccgcgcgaggccacggccacgccgcgccgctgcgcacaaccaacgaggcagagcgccgcccggcgcgagactgcggccgaagcgtggggcgcgcgtgcggaggaccaggcgcggcgcggctgcggctgagagtggagcctttcaggctggcatggagagcttaaggggcaactgaaggagacacactggccaagcgcggagttctgcttacttcagtcctgctgagatactctctcagtccgctcgcaccgaaggaagctgccttgggatcagagcagacataaagctagaaaaatttcaagacagaaacagtctccgccagtcaagaaaccctcaaaagtattttgccatggatatagaagatgaagaaaacatgagttttagctgacgctgtctcacgcctggtcctgggtaagtttggtgacctgaccgacaacttctcctcccctcacgctcgcagaaaagtgctggctggagtcgtcatgacaacaggcacagatgttaaagatgccaaggtgataagtgtttctacaggaacaaaatgtattaatggtgaatacatgagtgatcgtggccttgcattaaatgactgccatgcagaaataatatctcggagatccttgctcagatttctttatacacaacttgagctttacttaaataacaaagatgatcaaaaaagatccatctttcagaaatcagagcgaggggggtttaggctgaaggagaatgtccagtttcatctgtacatcagcacctctccctgtggagatgccagaatcttctcaccacatgagccaatcctggaagaaccagcagatagacacccaaatcgtaaagcaagaggacagctacggaccaaaatagagtctggtgaggggacgattccagtgcgctccaatgcgagcatccaaacgtgggacggggtgctgcaaggggagcggctgctcaccatgtcctgcagtgacaagattgcacgctggaacgtggtgggcatccagggatccctgctcagcattttcgtggagcccatttacttctcgagcatcatcctgggcagcctttaccacggggaccacctttccagggccatgtaccagcggatctccaacatagaggacctgccacctctctacaccctcaacaagcctttgctcagtggcatcagcaatgcagaagcacggcagccagggaaggcccccaacttcagtgtcaactggacggtaggcgactccgctattgaggtcatcaacgccacgactgggaaggatgagctgggccgcgcgtcccgcctgtgtaagcacgcgttgtactgtcgctggatgcgtgtgcacggcaaggttccctcccacttactacgctccaagattaccaagcccaacgtgtaccatgagtccaagctggcggcaaaggagtaccaggccgccaaggcgcgtctgttcacagccttcatcaaggcggggctgggggcctgggtggagaagcccaccgagcaggaccagttctcactcacgccctgacccgggcagacatgatggggggtgcagggggctgtgggcatccagcgtcatcctccagaacctcacatctgaactgggggcaggtgcataccttggggagggagtagggggacacgggggaccaccaggtgtccacggttgtccccagcatctcacatcagacctggggcaggtgcgcagtgtggggaggggatggggtgcgtcagggcccagcatcgccgcctggcatctctctgccgcagcatttccccttctgaaccgtccagtgactgctttcaatctcggtttacgtttagaaattgagttctactgagtagggcttccttaagtttaggaaaatagaaattactttgtgtgaaattcttgaataaataatttattcagagctaggaatgtggtttataaaataggaagtaattgtgtcaggtcacttttatgccacattattttaattgcaaaaaagcatctatatatggaggagggtgggaaaatagaggtaggaaatagtagcctaaaggaaatcgccacacgtctgtctaaacttaggtctcttttctccgtaggtacctccctgggtagttccacacactaggttgtaacagtctctccctgaggagcagactcccagcatggtgtagcgtggccctgtcatgcacatggggtcccgcagcagtgactgtgtgtcctgcagaggcgtgacccaggcccctgtagccctcagcctcctctagaagcttctgtactccttgtaggatcagatcatggaaaacttttctcagtttacttctaagtaatcacagataatacatggccagtaatcccaggctggccattcattcaggttttttaaaggatatttaacttttatggactagaaggaatcacgagggctactgcacaatacatggcctaagttccctctgttccttcctctgaatcgaatggatgtgggtgaccgcccgaaggccttcacaggatggaagtagaatgatttcagtagatactcattcttggaaaatgccatagttttaaattattgtttccagctttatcaaagacatgtttgaaaaataaaaagcatccaagtgagagctggtgagaccacgtgctgctggcgtagtgtaggccagacattgacagtcctgacgggagctcagggctgcccagcgcccagcgtgcacgggacggccccacgacagagggagtcagcccgggaggtcaggagcgcggcgggcgagggccctgtgtggaccacctccaccaagctcagagatttgcaccaggtgccttgttgcctccgctcaggatgaaagaggagctgagagaagtgctctgcctgccagtgcagtgcccagctccaaggctctagagggtgttcaggtacactgaggaggggacggctccgtcttcacattgtgcacagatctgaggatgggattagcgaagctgtggagactgcacatccggacctgcccatgtctcaaaacaaacacatgtacagtggctctttttccttctcaaacactttaccccagaagcaggtggtctgccccaggcataaagaaggaaaattggccatctttcccacctctaaattctgtaaaattatagacttgctcaaaagattcctttttatcatccccacgctgtgtaagtggaaagggcattgtgttccgtgtgtgtccagtttacagcgtctctgccccctagcgtgttttgtgacaatctccctgggtgaggagtgggtgcacccagccccgaggccagtggttgctcggggccttccgtgtgagttctagtgttcacttgatgccggggaatagaattagagaaaactctgacctgccgggttccagggactggtggaggtggatggcaggtccgactcgaccatgacttagttgtaagggtgtgtcggctttttcagtctcatgtgaaaatcctcctgtctctggcagcactgtctgcactttcttgtttactgtttgaagggacgagtaccaagccacaagaacacttcttttggccacagcataagctgatggtatgtaaggaaccgatgggccattaaacatgaactgaacggttaaaagcacagtctatggaacgctaatggagtcagcccctaaagctgtttgctttttcaggctttggattacatgcttttaatttgattttagaatctggacactttctatgaatgtaattcggctgagaaacatgttgctgagatgcaatcctcagtgttctctgtatgtaaatctgtgtatacaccacacgttacaactgcatgagcttcctctcgcacaagaccagctggaactgagcatgagacgctgtcaaatacagacaaaggatttgagatgttctcaataaaaagaaaatgtttcact

SEQ ID NO: 322694 - DNA, 2106 bp, Artificial Sequence
  derived and/or modified sequence
atggacattgaagatgaggagaacatgagcagcagcagcacagatgtgaaggagaacagaaacctggacaacgtgagccccaaggatggcagcaccccaggccctggagagggcagccagctgagcaatggaggcggcggcggccctggcaggaagaggcccctggaggagggcagcaatggccacagcaagtaccgcctgaagaagaggaggaagaccccaggccctgtgctgcccaagaatgccctgatgcagctgaatgagatcaagccaggcctgcagtacaccctgctgagccagacaggccctgtgcacgcccccctgtttgtgatgtctgtggaggtgaatggccaggtgtttgagggcagcggccccaccaagaagaaggccaagctgcacgccgctgagaaggccctgcggagctttgtgcagttccccaatgccagcgaggcccacctggccatgggccgcaccctgtctgtgaacacagacttcaccagtgaccaggccgacttcccagacaccctcttcaacggctttgagaccccagacaaggccgagccccccttctacgtgggcagcaatggagatgacagcttcagcagcagcggggacctgagcctgagcgccagccctgtgcctgccagcctggcccagccccccctgcctgtgctgccccccttccccccacccagcggcaagaaccctgtgatgatcctgaatgagctgcggcccggcctgaagtatgacttcctgtctgagagcggggagagccacgccaagagctttgtgatgtctgtggtggtggatggccagttctttgagggcagcggcaggaacaagaagctggccaaggcccgggccgcccagagcgccctggccgccatcttcaacctgcacctggaccagacccccagccggcagcccatccccagcgagggcctgcagctgcacctgccccaggtgctggctgatgctgtgtcccggctggtgctgggcaagtttggagacctgacagacaacttcagcagcccccacgcccggaggaaggtgctggccggcgtggtgatgaccactggaacagatgtgaaggatgccaaggtgatctctgtgtccacaggcaccaagtgcatcaatggagagtacatgtctgaccggggcctggccctgaatgactgccacgccgagatcatcagccgccgcagcctgctgcgcttcctgtacacccagctggagctgtacctgaacaacaaggatgaccagaagaggagcatcttccagaagtctgagcggggcggcttccggctgaaggaaaatgtgcagttccacctgtacatcagcaccagcccctgtggagatgcccgcatcttcagcccccatgagcccatcctggaggagcctgctgacagacaccccaacaggaaggcccggggccagctgcggaccaagattgagagcggggagggcaccatccctgtgcgcagcaatgccagcatccagacctgggatggagtgctgcagggcgagcggctgctgaccatgagctgcagcgacaagatcgcccgctggaatgtggtgggcatccagggcagcctgctgagcatctttgtggagcccatctacttcagcagcatcatcctgggcagcctgtaccacggggaccacctgagccgggccatgtaccagaggatcagcaacatcgaggacctgccccccctgtacaccctgaacaagcccctgctgagcggcatcagcaatgctgaggcccggcagcccgggaaggcccccaacttctctgtgaactggacagtgggggacagcgccattgaagtcatcaatgccaccaccgggaaggatgagctgggccgggccagccggctgtgcaagcacgccctgtactgccgctggatgagggtgcacggcaaggtgcccagccacctgctgcggagcaagatcaccaagcccaacgtgtaccacgagagcaagctggccgccaaggagtaccaggccgccaaggcccggctcttcaccgccttcatcaaggccggcctgggcgcctgggtggagaagcccacagagcaggaccagttcagcctgaccccctag

SEQ ID NO: 322695 - DNA, 2106 bp, Artificial Sequence
  derived and/or modified sequence
atggacatcgaggacgaggagaacatgagcagcagcagcaccgacgtcaaagaaaatcggaacctggacaacgtgagtcccaaagacggttccacccccggccctggtgagggaagtcagttaagtaacggtgggggaggcgggcccggcagaaaaagaccgctggaagaggggtctaatgggcatagtaagtaccgcctgaagaagagacgcaaaacacctggacctgtcctgccgaaaaatgccttgatgcagctgaatgagatcaaacccggtctacagtatacactcctttcccagactggcccggtccatgcaccactgttcgttatgtccgtggaagtgaacggccaggtgttcgaaggcagcggccccacaaagaaaaaggccaagcttcacgcggcagagaaggctctgcgttcgtttgttcagtttccgaatgcctccgaagcccatctcgcaatggggcgaacactgagcgtaaataccgattttactagcgaccaagccgatttcccagatacactgtttaacggttttgagacgcccgataaagccgagcctcctttttacgttgggtcaaacggagacgacagcttctcaagcagcggagacttgagtctctcagctagccccgtgcctgcctctcttgcccagccaccactgccggtgttgccgcccttcccaccacccagcggcaaaaatcctgtgatgattctgaatgagctgcggcccgggttaaagtacgacttcttgagtgaatcaggcgaatctcatgcaaagtccttcgtgatgtccgtcgtggttgatggccagttttttgaaggaagcggccgaaataagaagctggccaaggctcgggccgcccagagcgctctggccgctattttcaatcttcacttagaccagaccccatcgaggcagcccatcccttcagaaggcctacagctgcatctacctcaggtgcttgctgacgctgtgtcacgccttgtcctcggaaaatttggtgacctaacagataacttctctagcccacatgcccgtaggaaagttttagctggcgtcgtgatgactacaggtacggacgtcaaggacgccaaggtgatctccgtgtcaaccggaacaaagtgtatcaacggggagtatatgagtgatcgaggcctagctctgaatgactgtcatgccgaaattatctcaagacgtagtctcctcagattcctctatacccagttagaactctacctgaataataaggatgaccagaaaaggtccatttttcagaagtcagagagggggggattcagactgaaggagaacgtgcagttccacctgtacatcagcacttcaccctgtggtgatgccagaatcttttctccccatgaaccaatcctggaggagccagcagataggcaccccaacaggaaggccagagggcaactcaggaccaagatcgagtctggggagggtacaattccagtgcgctcgaacgcctctatccagacatgggatggcgttctgcaaggcgagagactgctgacaatgtcctgcagcgataaaatagccaggtggaatgtggtgggcatacagggcagcctgctgtcgatttttgttgagcctatttacttcagtagtatcattctggggagcctgtaccatggagatcacctgtcccgtgccatgtaccagaggatatccaacattgaggatctccctccactctacaccctgaataaacccttgctctccggaattagcaacgcagaagctcggcagcctgggaaagcccccaattttagcgtcaactggaccgtgggtgacagtgccatcgaggtcattaatgccactactggaaaggacgagttgggccgcgcaagtcggctttgcaaacacgccctgtactgtaggtggatgcgagttcatggcaaagtcccaagccacctgctcaggagcaaaatcactaagcccaacgtgtatcacgaatcaaagctcgccgccaaagagtatcaggctgccaaggcaaggctattcactgccttcattaaggctggtctgggcgcatgggtagagaagccgactgagcaggaccagttctccctcaccccatag

SEQ ID NO: 322696 - DNA, 2106 bp, Artificial Sequence
  derived and/or modified sequence
atggacattgaagatgaggagaacatgtcgagttccagcaccgatgtgaaggagaaccgcaacctagacaatgtgtcgccaaaagatgggagcacccccggacccggtgagggctcacaactctccaacggagggggaggcggaccgggacgcaagagaccactggaggaaggatccaatggtcactctaagtaccggcttaaaaaacgccgtaagaccccagggcctgtgttgcctaagaatgccctcatgcagctcaacgaaatcaaacctggattacagtatacattgctcagccagactgggccagtgcatgcccctctgtttgtgatgtcagttgaggtcaatggtcaggtgtttgaagggagtgggccaaccaaaaaaaaagcgaaattacatgctgcggagaaagctctgagatccttcgtccagtttcccaatgccagcgaggcgcatttagccatggggcgaaccctcagcgtgaacaccgatttcacatccgatcaagcagacttccccgacacgctgttcaacgggtttgaaacacccgataaagcggaaccaccattttacgtggggagtaatggagacgatagcttctctagctccggagacctgtccctctcggcgtctccagtgccagcctctctcgcgcagcctcctctgccagtccttcctccatttccacctccctccgggaaaaatcctgtgatgatactgaatgagctcagaccaggacttaaatatgactttctttccgaaagcggtgaaagtcacgccaaatctttcgtgatgtcagtggtcgtggacggtcagttctttgagggctcaggcagaaataaaaagctcgccaaagcccgagcagcccagtctgccctggctgctatttttaacctgcatctggatcagactccctcacgccaacccatcccttccgaaggccttcaactgcatctgccccaggtgctcgcggacgctgtgtctagactggtgctcggaaagtttggagaccttaccgacaactttagctcaccacatgctaggcgcaaagttctggccggagtcgtgatgacgaccggcactgatgtgaaagatgcaaaagtaatcagtgtgtctaccgggactaagtgcatcaatggagagtacatgagtgaccggggtttggctctgaacgattgtcatgcggagatcatctctcgaaggtcactccttcggtttctctacactcagttggagctgtatcttaataataaggatgatcagaagcgcagcattttccagaaatccgagagggggggattccggttgaaggagaatgtgcagttccatctctatatcagtactagcccatgtggtgacgcacgcattttcagcccacacgagcccatcctggaagagcctgcagatagacaccctaaccgaaaagcccgtggccagctgcgcactaaaatcgagtcaggtgaagggactatccctgtgagatctaacgcttcaatccaaacctgggatggggttcttcaaggtgagaggctgttgaccatgtcttgttctgacaagattgccaggtggaacgtggtgggaatacagggaagcttactgtcaatctttgtggagccaatctatttctcttcaatcatcctcggaagtttgtaccacggggatcatctttcacgtgctatgtaccaacgaatcagcaacattgaggaccttcctccgttgtacaccctgaacaagccactgctctcaggcatctcaaacgcagaagctaggcaaccagggaaagctcctaacttctccgtcaactggacagtcggggactctgcgattgaggtgattaatgccacaactggtaaggacgagctggggcgtgcaagcaggctttgcaagcatgctctttactgcagatggatgagggtgcacgggaaagtcccatcccaccttctgagatccaaaattacaaaacccaacgtctatcatgagagtaagttggcagctaaagagtatcaggcggctaaagccaggctgttcaccgcgttcataaaagcagggctgggcgcttgggtggaaaagcccactgaacaggaccagttttccttgactccctag

SEQ ID NO: 322697 - DNA, 2106 bp, Artificial Sequence
  derived and/or modified sequence
atggacatcgaggacgaggagaacatgagcagcagcagcaccgacgtgaaggagaacagaaacctggacaacgtgagccccaaggacggcagcacccccggccccggcgagggcagccagctgagcaacggcggcggcggcggccccggcagaaagagacccctggaggagggcagcaacggccacagcaagtacagactgaagaagagaagaaagacccccggccccgtgctgcccaagaacgccctgatgcagctgaacgagatcaagcccggcctgcagtacaccctgctgagccagaccggccccgtgcacgcccccctgttcgtgatgagcgtggaggtgaacggccaggtgttcgagggcagcggccccaccaagaagaaggccaagctgcacgccgccgagaaggccctgagaagcttcgtgcagttccccaacgccagcgaggcccacctggccatgggcagaaccctgagcgtgaacaccgacttcaccagcgaccaggccgacttccccgacaccctgttcaacggcttcgagacccccgacaaggccgagccccccttctacgtgggcagcaacggcgacgacagcttcagcagcagcggcgacctgagcctgagcgccagccccgtgcccgccagcctggcccagccccccctgcccgtgctgccccccttccccccccccagcggcaagaaccccgtgatgatcctgaacgagctgagacccggcctgaagtacgacttcctgagcgagagcggcgagagccacgccaagagcttcgtgatgagcgtggtggtggacggccagttcttcgagggcagcggcagaaacaagaagctggccaaggccagagccgcccagagcgccctggccgccatcttcaacctgcacctggaccagacccccagcagacagcccatccccagcgagggcctgcagctgcacctgccccaggtgctggccgacgccgtgagcagactggtgctgggcaagttcggcgacctgaccgacaacttcagcagcccccacgccagaagaaaggtgctggccggcgtggtgatgaccaccggcaccgacgtgaaggacgccaaggtgatcagcgtgagcaccggcaccaagtgcatcaacggcgagtacatgagcgacagaggcctggccctgaacgactgccacgccgagatcatcagcagaagaagcctgctgagattcctgtacacccagctggagctgtacctgaacaacaaggacgaccagaagagaagcatcttccagaagagcgagagaggcggcttcagactgaaggagaacgtgcagttccacctgtacatcagcaccagcccctgcggcgacgccagaatcttcagcccccacgagcccatcctggaggagcccgccgacagacaccccaacagaaaggccagaggccagctgagaaccaagatcgagagcggcgagggcaccatccccgtgagaagcaacgccagcatccagacctgggacggcgtgctgcagggcgagagactgctgaccatgagctgcagcgacaagatcgccagatggaacgtggtgggcatccagggcagcctgctgagcatcttcgtggagcccatctacttcagcagcatcatcctgggcagcctgtaccacggcgaccacctgagcagagccatgtaccagagaatcagcaacatcgaggacctgccccccctgtacaccctgaacaagcccctgctgagcggcatcagcaacgccgaggccagacagcccggcaaggcccccaacttcagcgtgaactggaccgtgggcgacagcgccatcgaggtgatcaacgccaccaccggcaaggacgagctgggcagagccagcagactgtgcaagcacgccctgtactgcagatggatgagagtgcacggcaaggtgcccagccacctgctgagaagcaagatcaccaagcccaacgtgtaccacgagagcaagctggccgccaaggagtaccaggccgccaaggccagactgttcaccgccttcatcaaggccggcctgggcgcctgggtggagaagcccaccgagcaggaccagttcagcctgaccccctag

SEQ ID NO: 322698 - DNA, 426 bp, Artificial Sequence
  derived and/or modified sequence
atggatatcgaggatgaagaaaatatgagtagctccagtacagacgtcaaagagaaccggaacttggacaatgtgtccccaaaagacggttcaacccccggccccggggaagggtctcagctgtctaacggtgggggcggcgggccagggcggaagcgacccctagaggagggcagtaacggccactccaagtataggctcaagaaaaggcgcaaaacaccaggacctgtactgcctaaaaatgctttgatgcagcttaatgaaataaagcccggcctgcagtacaccttactgtctcagaccggtccagtgcacgcgccccttttcgtcatgagcgtggaggtgaacggccaggttttcgagggatcgggccccaccaagaagaaagccaagctacacgcggccgaaaaggccttgcgatcttag

SEQ ID NO: 322699 - DNA, 426 bp, Artificial Sequence
  derived and/or modified sequence
atggacattgaagatgaggagaacatgagcagcagcagcacagatgtgaaggagaacagaaacctggacaacgtgagccccaaggatggcagcaccccaggccctggagagggcagccagctgagcaatggaggcggcggcggccctggcaggaagaggcccctggaggagggcagcaatggccacagcaagtaccgcctgaagaagaggaggaagaccccaggccctgtgctgcccaagaatgccctgatgcagctgaatgagatcaagccaggcctgcagtacaccctgctgagccagacaggccctgtgcacgcccccctgtttgtgatgtctgtggaggtgaatggccaggtgtttgagggcagcggccccaccaagaagaaggccaagctgcacgccgctgagaaggccctgcggagctag

SEQ ID NO: 322700 - DNA, 426 bp, Artificial Sequence
  derived and/or modified sequence
atggacatcgaggacgaggagaacatgagcagcagcagcaccgacgtgaaggagaaccgcaacctggacaatgtgtctcctaaggatggctccacacctggcccaggggaagggagccagcttagtaacggcggcggggggggcccaggtagaaagcggcctcttgaggaagggagcaatggacactccaaataccggctgaaaaagcgacggaagacccctgggcccgtccttcctaaaaacgcactcatgcaactgaacgagataaaacctggcctccagtacacactactctctcagaccggtcccgtgcacgcacctttgttcgtcatgagtgtggaggtgaacggccaggtttttgagggctccggcccgaccaaaaagaaagccaagctgcacgcagccgaaaaggccctgcgaagctag

SEQ ID NO: 322701 - DNA, 426 bp, Artificial Sequence
  derived and/or modified sequence
atggacatcgaggacgaagagaacatgtcctctagcagtaccgacgtcaaagagaatcggaacctcgataacgtgtcccccaaagatggtagcactccgggaccaggtgaaggaagtcaattgagtaacggaggagggggtggaccgggaagaaaaaggccccttgaagaggggtcaaatgggcacagtaagtatcgcctcaagaagaggcgcaagacacccggacccgtcctccccaaaaacgcactcatgcaactgaatgaaatcaagcccggattgcagtacacactgctcagccagaccggtcctgtccacgcccctctgtttgtgatgtcagttgaagtaaacggccaggttttcgaaggctcgggacccaccaagaaaaaggccaagttacacgcggcagagaaagccctacgatcttag

SEQ ID NO: 322702 - DNA, 426 bp, Artificial Sequence
  derived and/or modified sequence
atggacatcgaggacgaggagaacatgagcagcagcagcaccgacgtgaaggagaacagaaacctggacaacgtgagccccaaggacggcagcacccccggccccggcgagggcagccagctgagcaacggcggcggcggcggccccggcagaaagagacccctggaggagggcagcaacggccacagcaagtacagactgaagaagagaagaaagacccccggccccgtgctgcccaagaacgccctgatgcagctgaacgagatcaagcccggcctgcagtacaccctgctgagccagaccggccccgtgcacgcccccctgttcgtgatgagcgtggaggtgaacggccaggtgttcgagggcagcggccccaccaagaagaaggccaagctgcacgccgccgagaaggccctgagaagctag

SEQ ID NO: 322703 - DNA, 1860 bp, Artificial Sequence
  derived and/or modified sequence
cttccatctgcccagagaggagcatctggatcaaggtgctggccatgtcccagctggtggaatgcgtccccaacttttcggaggggaagaaccaggaggtgatcgacgccatctctggagccatcacacagaccccgggctgcgtgctgctggatgtggacgcaggcccttccaccaaccgcaccgtgtacaccttcgtggggccgccggagtgcgtggtggagggggccctcaacgctgcccgggtagcttcccgacttatcgacatgagcaggcaccaaggtgagcacccccgcatgggggccctagacgtctgccccttcatccccgtgaggggcgtcagcgtggatgagtgtgtgctctgcgcccaggcctttggccagaggctggcagaggagctggacgtgccagtttacctgtacggcgaggcagccaggatggacagtcgccggaccctgccggccatccgggccggggagtacgaggccctccctaagaagctccagcaggccgactgggcgcccgactttggtcccagctcctttgtccccagttggggggccacggccacgggggcgaggaagttcctcattgcttttaacatcaacctgctcggcacaaaggagcaagcccaccgcatcgcgctcaacctgcgggagcagggccgcgggaaggaccagccaggacgtctgaagaaagttcagggcattggctggtacctggatgagaagaacctggctcaggtgtccaccaatcttctggactttgaggtcacggcactgcacacggtctacgaggagacctgccgagaagcacaggagctgagcctcccagtggtgggctcacagctggtgggcctggtgcccctgaaggctctgctggatgcggccgccttctactgcgagaaggagaacctcttcatcctggaggaggagcagcggatcaggctggtggtgagccggctgggcctggactccctgtgccccttcagccctaaggagcggatcatcgagtacctggtccctgagcgcgggcctgagcgaggcctgggcagcaagtccctgcgcgccttcgtgggggaggtgggtgcccgctctgcggcccccgggggcggctcggtggcggcggccgctgcggccatgggtgcggcgctgggctccatggtgggcctcatgacctacgggcggcgccaattccagtccctggacacgacgatgcggcgcctgatcccgcccttccgcgaggcttcggccaagctaaccacgctggtggatgccgacgccgaggccttcaccgcctacctggcgcacggcggccctacaggagggtctgaggcgggcagtctctgtgccgctgacgctggcggagacggtggcctcgctgtggccggccctgcaggaactggcccggtgtgggaacctggcctgccggtcagacctccaggtggcggccaaagccctggagatgggcgtgtttggcgcatatttcaacgtgctcatcaacctgagggacatcacagacgaggcatttaaggaccagatccaccatcgtgtttccagcctcctgcaggaagccaagacccaggctgcactggtgctggactgcttggagacccggcaggagtgacgaaaccccagggacagcaggaccttcgacgctggaaggatagcctcgcttcccaggtgcagctcccggcaggtctggacagttccacagagcacggtactggccctgtcctcagttcccgtccacccttcaaccagtggctcctgggagacttttcctccctgcctcagctccctgcccagccagcctcctgtctccagagaagttctccattaaaaaataatttagcaaatc

SEQ ID NO: 322704 - DNA, 1905 bp, Artificial Sequence
  derived and/or modified sequence
cttccatctgcccagagaggagcatctggatcaaggtgctggccatgtcccagctggtggaatgcgtccccaacttttcggaggggaagaaccaggaggtgatcgacgccatctctggagccatcacacagaccccgggctgcgtgctgctggatgtggacgcaggcccttccaccaaccgcaccgtgtacaccttcgtggggccgccggagtgcgtggtggagggggccctcaacgctgcccgggtagcttcccgacttatcgacatgagcaggcaccaaggagagcacccccgcatgggggccctagacgtctgccccttcatccccgtgaggggcgtcagcgtggatgagtgtgtgctctgcgcccaggcctttggccagaggctggcagaggagctggacgtgccagtttacctgtacggcgaggcagccaggatggacagtcgccggaccctgccggccatccgggccggggagtacgaggccctccctaagaagctccagcaggccgactgggcgcccgactttggtcccagctcctttgtccccagttggggggccacggccacgggggcgaggaagttcctcattgcttttaacatcaacctgctcggcacaaaggagcaagcccaccgcatcgcgctcaacctgcgggagcagggccgcgggaaggaccagccaggacgtctgaagaaagttcagggcattggctggtacctggatgagaagaacctggctcaggtgtccaccaatcttctggactttgaggtcacggcactgcacacggtctacgaggagacctgccgagaagcacaggagctgagcctcccagtggtgggctcacagctggtgggcctggtgcccctgaaggctctgctggatgcggccgccttctactgcgagaaggagaacctcttcatcctggaggaggagcagcggatcaggctggtggtgagccggctgggcctggactccctgtgccccttcagccctaaggagcggatcatcgagtacctggtccctgagcgcgggcctgagcgaggcctgggcagcaagtccctgcgcgccttcgtgggggaggtgggtgcccgctctgcggcccccgggggcggctcggtggcggcggccgctgcggccatgggtgcggcgctgggctccatggtgggcctcatgacctacgggcggcgccaattccagtccctggacacgacgatgcggcgcctgatcccgcccttccgcgaggcttcggccaagctaaccacgctggtggatgccgacgccgaggccttcaccgcctacctggaagcaatgaggctccccaagaacacacctgaggaaaaggacaggcgcacggcggccctacaggagggtctgaggcgggcagtctctgtgccgctgacgctggcggagacggtggcctcgctgtggccggccctgcaggaactggcccggtgtgggaacctggcctgccggtcagacctccaggtggcggccaaagccctggagatgggcgtgtttggcgcatatttcaacgtgctcatcaacctgagggacatcacagacgaggcatttaaggaccagatccaccatcgtgtttccagcctcctgcaggaagccaagacccaggctgcactggtgctggactgcttggagacccggcaggagtgacgaaaccccagggacagcaggaccttcgacgctggaaggatagcctcgcttcccaggtgcagctcccggcaggtctggacagttccacagagcacggtactggccctgtcctcagttcccgtccacccttcaaccagtggctcctgggagacttttcctccctgcctcagctccctgcccagccagcctcctgtctccagagaagttctccattaaaaaataatttagcaaatca

SEQ ID NO: 322705 - DNA, 1878 bp, Artificial Sequence
  derived and/or modified sequence
cttccatctgcccagagaggagcatctggatcaaggtgctggccatgtcccagctggtggaatgcgtccccaacttttcggaggggaagaaccaggaggtgatcgacgccatctctggagccatcacacagaccccgggctgcgtgctgctggatgtggacgcaggcccttccaccaaccgcaccgtgtacaccttcgtggggccgccggagtgcgtggtggagggggccctcaacgctgcccgggtagcttcccgacttatcgacatgagcaggcaccaaggagagcacccccgcatgggggccctagacgtctgccccttcatccccgtgaggggcgtcagcgtggatgagtgtgtgctctgcgcccaggcctttggccagaggctggcagaggagctggacgtgccagtttacctgtacggcgaggcagccaggatggacagtcgccggaccctgccggccatccgggccggggagtacgaggccctccctaagaagctccagcaggccgactgggcgcccgactttggtcccagctcctttgtccccagttggggggccacggccacgggggcgaggaagttcctcattgcttttaacatcaacctgctcggcacaaaggagcaagcccaccgcatcgcgctcaacctgcgggagcagggccgcgggaaggaccagccaggacgtctgaagaaagttcagggcattggctggtacctggatgagaagaacctggctcaggtgtccaccaatcttctggactttgaggtcacggcactgcacacggtctacgaggagacctgccgagaagcacaggagctgagcctcccagtggtgggctcacagctggtgggcctggtgcccctgaaggctctgctggatgcggccgccttctactgcgagaaggagaacctcttcatcctggaggaggagcagcggatcaggctggtggtgagccggctgggcctggactccctgtgccccttcagccctaaggagcggatcatcgagtacctggtccctgagcgcgggcctgagcgaggcctgggcagcaagtccctgcgcgccttcgtgggggaggtgggtgcccgctctgcggcccccgggggcggctcggtggcggcggccgctgcggccatgggtgcggcgctgggctccatggtgggcctcatgacctacgggcggcgccaattccagtccctggacacgacgatgcggcgcctgatcccgcccttccgcgaggcttcggccaagctaaccacgctggtggatgccgacgccgaggccttcaccgcctacctggaagcaatgaggctccccaagaacacacctgaggaaaaggacaggcgcacggcggccctacaggagggtctgaggcgggcagtctctgtgccgctgacgctggcggagacggtggcctcgctgtggccggccctgcaggaactggcccggtgtgggaacctggcctgccggtcagacctccaggtggcggccaaagccctggagatgggcgtgtttggcgcatatttcaacgtgctcatcaacctgagggacatcacagacgaggcatttaaggaccagatccaccatcgtgtttccagcctcctgcaggaagccaagacccaggctgcactggtgctggactgcttggagacccggcaggagtgacggtgcgggaggcctctccgggctctgtggcccctccctcgcccatccccagagggcagagctgtgacctcggtggggacacagcttgttcgtgtggggcccggagggtaggtgggcaggcagcggggcatcgcctgggaatggaggcgctggcagggacagaaggcccctagtcccatgtgacctccagtaaagttttggcaccaaa

SEQ ID NO: 322706 - protein, 572 aa, Artificial Sequence
  derived and/or modified sequence
MSQLVECVPNFSEGKNQEVIDAISGAITQTPGCVLLDVDAGPSTNRTVYTFVGPPECVVEGALNAARVASRLIDMSRHQGEHPRMGALDVCPFIPVRGVSVDECVLCAQAFGQRLAEELDVPVYLYGEAARMDSRRTLPAIRAGEYEALPKKLQQADWAPDFGPSSFVPSWGATATGARKFLIAFNINLLGTKEQAHRIALNLREQGRGKDQPGRLKKVQGIGWYLDEKNLAQVSTNLLDFEVTALHTVYEETCREAQELSLPVVGSQLVGLVPLKALLDAAAFYCEKENLFILEEEQRIRLVVSRLGLDSLCPFSPKERIIEYLVPERGPERGLGSKSLRAFVGEVGARSAAPGGGSVAAAAAAMGAALGSMVGLMTYGRRQFQSLDTTMRRLIPPFREASAKLTTLVDADAEAFTAYLEAMRLPKNTPEEKDRRTAALQEGLRRAVSVPLTLAETVASLWPALQELARCGNLACRSDLQVAAKALEMGVFGAYFNVLINLRDITDEAFKDQPPAGSQDPGCTGAGLLGDPAGVTVREASPGSVAPPSPIPRGQSCDLETPGTAGPSTLEG

SEQ ID NO: 322707 - DNA, 1954 bp, Artificial Sequence
  derived and/or modified sequence
cttccatctgcccagagaggagcatctggatcaaggtgctggccatgtcccagctggtggaatgcgtccccaacttttcggaggggaagaaccaggaggtgatcgacgccatctctggagccatcacacagaccccgggctgcgtgctgctggatgtggacgcaggcccttccaccaaccgcaccgtgtacaccttcgtggggccgccggagtgcgtggtggagggggccctcaacgctgcccgggtagcttcccgacttatcgacatgagcaggcaccaaggtgagcacccccgcatgggggccctagacgtctgccccttcatccccgtgaggggcgtcagcgtggatgagtgtgtgctctgcgcccaggcctttggccagaggctggcagaggagctggacgtgccagtttacctgtacggcgaggcagccaggatggacagtcgccggaccctgccggccatccgggccggggagtacgaggccctccctaagaagctccagcaggccgactgggcgcccgactttggtcccagctcctttgtccccagttggggggccacggccacgggggcgaggaagttcctcattgcttttaacatcaacctgctcggcacaaaggagcaagcccaccgcatcgcgctcaacctgcgggagcagggccgcgggaaggaccagccaggacgtctgaagaaagttcagggcattggctggtacctggatgagaagaacctggctcaggtgtccaccaatcttctggactttgaggtcacggcactgcacacggtctacgaggagacctgccgagaagcacaggagctgagcctcccagtggtgggctcacagctggtgggcctggtgcccctgaaggctctgctggatgcggccgccttctactgcgagaaggagaacctcttcatcctggaggaggagcagcggatcaggctggtggtgagccggctgggcctggactccctgtgccccttcagccctaaggagcggatcatcgagtacctggtccctgagcgcgggcctgagcgaggcctgggcagcaagtccctgcgcgccttcgtgggggaggtgggtgcccgctctgcggcccccgggggcggctcggtggcggcggccgctgcggccatgggtgcggcgctgggctccatggtgggcctcatgacctacgggcggcgccaattccagtccctggacacgacgatgcggcgcctgatcccgcccttccgcgaggcttcggccaagctaaccacgctggtggatgccgacgccgaggccttcaccgcctacctggaagcaatgaggctccccaagaacacacctgaggaaaaggacaggcgcacggcggccctacaggagggtctgaggcgggcagtctctgtgccgctgacgctggcggagacggtggcctcgctgtggccggccctgcaggaactggcccggtgtgggaacctggcctgccggtcagacctccaggtggcggccaaagccctggagatgggcgtgtttggcgcatatttcaacgtgctcatcaacctgagggacatcacagacgaggcatttaaggaccagcctcctgcaggaagccaagacccaggctgcactggtgctggactgcttggagacccggcaggagtgacggtgcgggaggcctctccgggctctgtggcccctccctcgcccatccccagagggcagagctgtgacctcgaaaccccagggacagcaggaccttcgacgctggaaggatagcctcgcttcccaggtgcagctcccggcaggtctggacagttccacagagcacggtactggccctgtcctcagttcccgtccacccttcaaccagtggctcctgggagacttttcctccctgcctcagctccctgcccagccagcctcctgtctccagagaagttctccattaaaaaataatttagcaaatc

SEQ ID NO: 322708 - DNA, 1834 bp, Artificial Sequence
  derived and/or modified sequence
cttccatctgcccagagaggagcatctggatcaaggtgctggccatgtcccagctggtggaatgcgtccccaacttttcggaggggaagaaccaggaggtgatcgacgccatctctggagccatcacacagaccccgggctgcgtgctgctggatgtggacgcaggcccttccaccaaccgcaccgtgtacaccttcgtggggccgccggagtgcgtggtggagggggccctcaacgctgcccgggtagcttcccgacttatcgacatgagcaggcaccaaggagagcacccccgcatgggggccctagacgtctgccccttcatccccgtgaggggcgtcagcgtggatgagtgtgtgctctgcgcccaggcctttggccagaggctggcagaggagctggacgtgccagtttacctgtacggcgaggcagccaggatggacagtcgccggaccctgccggccatccgggccggggagtacgaggccctccctaagaagctccagcaggccgactgggcgcccgactttggtcccagctcctttgtccccagttggggggccacggccacgggggcgaggaagttcctcattgcttttaacatcaacctgctcggcacaaaggagcaagcccaccgcatcgcgctcaacctgcgggagcagggccgcgggaaggaccagccaggacgtctgaagaaagttcagggcattggctggtacctggatgagaagaacctggctcaggtgtccaccaatcttctggactttgaggtcacggcactgcacacggtctacgaggagacctgccgagaagcacaggagctgagcctcccagtggtgggctcacagctggtgggcctggtgcccctgaaggctctgctggatgcggccgccttctactgcgagaaggagaacctcttcatcctggaggaggagcagcggatcaggctggtggtgagccggctgggcctggactccctgtgccccttcagccctaaggagcggatcatcgagtacctggtccctgagcgcgggcctgagcgaggcctgggcagcaagtccctgcgcgccttcgtgggggaggtgggtgcccgctctgcggcccccgggggcggctcggtggcggcggccgctgcggccatgggtgcggcgctgggctccatggtgggcctcatgacctacgggcggcgccaattccagtccctggacacgacgatgcggcgcctgatcccgcccttccgcgaggcttcggccaagctaaccacgctggtggatgccgacgccgaggccttcaccgcctacctggcgcacggcggccctacaggagggtctgaggcgggcagtctctgtgccgctgacgctggcggagacggtggcctcgctgtggccggccctgcaggaactggcccggtgtgggaacctggcctgccggtcagacctccaggtggcggccaaagccctggagatgggcgtgtttggcgcatatttcaacgtgctcatcaacctgagggacatcacagacgaggcatttaaggaccagatccaccatcgtgtttccagcctcctgcaggaagccaagacccaggctgcactggtgctggactgcttggagacccggcaggagtgacggtgcgggaggcctctccgggctctgtggcccctccctcgcccatccccagagggcagagctgtgacctcggtggggacacagcttgttcgtgtggggcccggagggtaggtgggcaggcagcggggcatcgcctgggaatggaggcgctggcagggacagaaggcccctagtcccatgtgacctccagtaaagttttggcaccaaa

SEQ ID NO: 322709 - DNA, 1955 bp, Artificial Sequence
  derived and/or modified sequence
cttccatctgcccagagaggagcatctggatcaaggtgctggccatgtcccagctggtggaatgcgtccccaacttttcggaggggaagaaccaggaggtgatcgacgccatctctggagccatcacacagaccccgggctgcgtgctgctggatgtggacgcaggcccttccaccaaccgcaccgtgtacaccttcgtggggccgccggagtgcgtggtggagggggccctcaacgctgcccgggtagcttcccgacttatcgacatgagcaggcaccaaggagagcacccccgcatgggggccctagacgtctgccccttcatccccgtgaggggcgtcagcgtggatgagtgtgtgctctgcgcccaggcctttggccagaggctggcagaggagctggacgtgccagtttacctgtacggcgaggcagccaggatggacagtcgccggaccctgccggccatccgggccggggagtacgaggccctccctaagaagctccagcaggccgactgggcgcccgactttggtcccagctcctttgtccccagttggggggccacggccacgggggcgaggaagttcctcattgcttttaacatcaacctgctcggcacaaaggagcaagcccaccgcatcgcgctcaacctgcgggagcagggccgcgggaaggaccagccaggacgtctgaagaaagttcagggcattggctggtacctggatgagaagaacctggctcaggtgtccaccaatcttctggactttgaggtcacggcactgcacacggtctacgaggagacctgccgagaagcacaggagctgagcctcccagtggtgggctcacagctggtgggcctggtgcccctgaaggctctgctggatgcggccgccttctactgcgagaaggagaacctcttcatcctggaggaggagcagcggatcaggctggtggtgagccggctgggcctggactccctgtgccccttcagccctaaggagcggatcatcgagtacctggtccctgagcgcgggcctgagcgaggcctgggcagcaagtccctgcgcgccttcgtgggggaggtgggtgcccgctctgcggcccccgggggcggctcggtggcggcggccgctgcggccatgggtgcggcgctgggctccatggtgggcctcatgacctacgggcggcgccaattccagtccctggacacgacgatgcggcgcctgatcccgcccttccgcgaggcttcggccaagctaaccacgctggtggatgccgacgccgaggccttcaccgcctacctggaagcaatgaggctccccaagaacacacctgaggaaaaggacaggcgcacggcggccctacaggagggtctgaggcgggcagtctctgtgccgctgacgctggcggagacggtggcctcgctgtggccggccctgcaggaactggcccggtgtgggaacctggcctgccggtcagacctccaggtggcggccaaagccctggagatgggcgtgtttggcgcatatttcaacgtgctcatcaacctgagggacatcacagacgaggcatttaaggaccagcctcctgcaggaagccaagacccaggctgcactggtgctggactgcttggagacccggcaggagtgacggtgcgggaggcctctccgggctctgtggcccctccctcgcccatccccagagggcagagctgtgacctcgaaaccccagggacagcaggaccttcgacgctggaaggatagcctcgcttcccaggtgcagctcccggcaggtctggacagttccacagagcacggtactggccctgtcctcagttcccgtccacccttcaaccagtggctcctgggagacttttcctccctgcctcagctccctgcccagccagcctcctgtctccagagaagttctccattaaaaaataatttagcaaatca

SEQ ID NO: 322710 - DNA, 1719 bp, Artificial Sequence
  derived and/or modified sequence
atgtctcaactagtcgagtgcgtccctaacttttctgagggcaagaaccaagaggtgatcgacgctatttccggcgcaattacccagacccctgggtgcgtcttgctggacgtcgatgctgggccctccacgaatcgaaccgtgtacaccttcgtcggtcctccagaatgcgtcgttgagggagccctcaatgctgcaagggttgcctcccgccttatagatatgtcaagacatcaaggagaacatccacgaatgggcgctctagatgtctgcccgttcatcccggtcaggggtgtttctgtggacgaatgcgtgctgtgcgcacaagcattcgggcagagactcgctgaagagcttgacgtgccagtttatttgtatggtgaagctgccaggatggacagccgacgcacgctgcccgcgatccgagctggcgaatacgaagccctgcctaagaagctgcagcaagcggactgggcccccgattttggtccgtcatccttcgttccttcttggggcgcaaccgccaccggcgccaggaaatttttgatcgccttcaatatcaatttattaggcaccaaagaacaggcacatcgtatcgctttgaaccttcgcgagcagggccgtggcaaggaccaacccggtcgcctcaagaaagtccagggtatcggttggtatctggacgaaaagaacctcgcacaggtgtccacaaacctcctggactttgaagtcactgccctccataccgtgtacgaggaaacctgtagggaagctcaagaactaagcctgcctgtggtgggttcgcagttggtgggcttggtgcctctaaaggctctgctggatgccgctgccttttattgcgagaaagagaacttgttcatccttgaggaagaacagcgcatacggctagtggttagtcggctggggttagactcgctgtgtccctttagccctaaggaaagaatcatcgagtatctggtgcctgagagaggccctgagagaggcctggggtccaaatccctgagggcatttgtgggtgaggtgggggctcgctctgccgccccgggcggagggtccgtggccgcggcagcagccgccatgggcgcagccctgggaagtatggtgggccttatgacttatggccggaggcagtttcagtcactggacacaaccatgcggcggctgatccctccttttagggaagctagtgcaaaactgaccactctcgtagacgccgatgccgaagctttcacggcctatctcgaagccatgaggctccccaagaacacaccggaggagaaggatagaaggaccgctgcgcttcaggaaggcctgagaagggcagtgtccgtcccgctgacactcgcagaaactgtagcttcactgtggccagccctgcaggagcttgcccggtgcggcaatctcgcatgccgctcagatctgcaggtagccgctaaggctctcgaaatgggggtcttcggcgcctacttcaacgtgctgattaatttgcgggacattacggatgaagcctttaaggatcaacctccggcgggctctcaggacccggggtgtactggtgctggactgctaggggaccccgcgggagtgaccgtcagagaagctagtccgggaagcgtggcccctccgtcacctatcccccgtggacagtcttgcgatcttgagacgccaggaactgctgggccaagcactcttgagggctag

SEQ ID NO: 322711 - DNA, 1719 bp, Artificial Sequence
  derived and/or modified sequence
atgagccagttagtggagtgtgtgcccaattttagcgaaggcaaaaaccaggaggtgatagacgctatcagcggggccatcacccagacaccaggctgtgtgcttttagacgtggatgctggccctagcaccaaccgcactgtttacaccttcgtgggcccgcccgaatgcgtggtggagggcgccctaaacgcagcccgggtggccagccgcctgattgacatgtccaggcaccagggggagcatccaagaatgggagccctcgacgtctgtcctttcatccccgtgcgcggggtctcggtagacgaatgcgtactgtgcgcccaggcgttcggccaaaggctggccgaagagctggatgtaccagtgtacctctatggtgaagctgctcgcatggacagccgcaggacgctgccagctatccgtgcaggggagtatgaggcacttccgaagaaattgcagcaagctgattgggccccggattttggcccatcttccttcgttccatcttggggtgcaaccgccaccggggcccggaagttcttgattgcctttaacataaacctattaggtactaaagagcaggcccaccgaattgccctgaacttgcgagaacaggggcgcggaaaggatcagcccggtcgcctgaaaaaggtgcaaggtataggctggtatctggacgagaagaatctcgcccaggtgtctacaaatctgctggatttcgaggtaactgccctgcacacggtgtacgaggagacatgccgtgaggcccaggagctctctttaccagtggtgggatctcagcttgtagggctggtccctctgaaggccctgctcgacgcagccgccttctactgcgaaaaagagaacctctttatcttggaggaggagcaaagaattcgattggtagtctctcgactcggactagactccctgtgtccattcagtcctaaggaaaggatcattgagtacctggtgccagaacggggacctgagagagggcttggaagtaagtccctccgagcgttcgttggggaagttggagcacgcagtgctgctccaggcggtgggagcgtggctgcagccgctgctgccatgggagccgctttgggctccatggtgggattaatgacatatggccgccggcagttccagtcactggatacaacaatgcggagactgataccaccttttcgagaagcctcggccaagttgaccacactcgtagatgctgatgccgaggcttttactgcctaccttgaggccatgcggctgcctaaaaatactcctgaagaaaaggatcggcgcactgccgcactgcaagaggggctccgaagggcagtctctgtcccattaaccctcgctgagaccgtggcttccctatggccagctctgcaggagttggcaaggtgcggcaatctcgcgtgcagaagtgacttacaggtggccgccaaggccctcgaaatgggggtttttggtgcttacttcaatgtcctcattaatctcagggacataacagacgaagctttcaaagaccaacccccagcgggttcacaggatcctggatgtaccggagccggactcctgggcgatcccgcaggcgtcaccgtgagagaggcttcccctggttccgtcgccccacctagtcccatcccacgcggccagtcctgcgaccttgagacacccggcacagctggcccttcaacactagaggggtag

SEQ ID NO: 322712 - DNA, 1719 bp, Artificial Sequence
  derived and/or modified sequence
atgagccagctggtggagtgtgtgcccaacttcagcgagggcaagaaccaggaggtgattgatgccatcagcggggccatcacccagaccccaggctgtgtgctgctggatgtggatgctggccccagcaccaacagaacagtgtacacctttgtgggccccccagaatgtgtggtggagggcgccctgaatgctgcccgggtggccagccggctgattgacatgagccgccaccagggcgagcaccccaggatgggcgccctggatgtgtgccccttcatccctgtgcggggcgtgtctgtggatgaatgtgtgctgtgtgcccaggccttcggccagaggctggccgaggagctggatgtgcctgtgtacctgtatggagaggccgccaggatggacagcaggaggaccctgcctgccatccgggccggggagtatgaggccctgcccaagaagctgcagcaggccgactgggccccagactttggccccagcagctttgtgcccagctggggcgccacagccaccggggccaggaagttcctgattgccttcaacatcaacctgctgggcaccaaggagcaggcccacagaattgccctgaacctgcgggagcagggccggggcaaggaccagcccggccgcctgaagaaggtgcagggcatcggctggtacctggatgagaagaacctggcccaggtgtccaccaacctgctggactttgaggtgacagccctgcacacagtgtatgaggagacctgccgggaggcccaggagctgagcctgcctgtggtgggcagccagctggtgggcctggtgcccctgaaggccctgctggatgctgctgccttctactgtgagaaggaaaatctcttcatcctggaggaggagcagaggatccggctggtggtgtcccggctgggcctggacagcctgtgccccttcagccccaaggagcgcatcatcgagtacctggtgcctgagcggggccctgagcggggcctgggcagcaagagcctgcgggcctttgtgggggaggtgggcgcccggtctgctgcccctgggggcggctctgtggccgctgctgctgctgccatgggcgccgccctgggctccatggtgggcctgatgacctatggaagacggcagttccagagcctggacaccaccatgaggaggctcatcccccccttccgggaggccagcgccaagctgaccaccctggtggatgctgatgctgaggccttcaccgcctacctggaggccatgaggctgcccaagaacaccccagaggagaaggacagaagaacagctgccctgcaggagggcctgcggcgggctgtgtctgtgcccctgaccctggccgagaccgtggccagcctgtggccagccctgcaggagctggcccgctgtggcaacctggcctgccgcagtgacctgcaggtggccgccaaggccctggagatgggcgtgtttggagcctacttcaacgtgctgatcaacctgcgggacatcacagatgaggccttcaaggaccagcccccagctggcagccaggaccccggctgcaccggggccggcctgctgggggaccctgctggggtgacagtgcgggaggccagccctggctctgtggccccacccagccccatcccccggggccagagctgtgacctggagaccccaggcacagctggccccagcaccctggagggctag

SEQ ID NO: 322713 - DNA, 1719 bp, Artificial Sequence
  derived and/or modified sequence
atgagccagctggtggagtgcgtgcccaacttcagcgagggcaagaatcaagaagtgatcgatgcaatctcgggtgccattacacagacccctggctgtgtcctgctcgacgtggacgcagggccatcgactaatagaacagtctatacattcgtgggtcctccggagtgcgtggtggaaggcgcacttaacgctgcccgggtcgcgtcccgactaatcgacatgtcgcggcatcaaggggaacacccgcggatgggcgcccttgatgtctgcccttttattcctgttaggggcgtgtctgttgacgagtgcgtgttgtgcgcccaggcctttgggcaacgtctggccgaggaattagacgtgccggtgtatttgtatggagaggccgctcgcatggacagccggagaactctgcctgctattagagccggagaatatgaagcactgcccaaaaaactgcagcaggctgattgggcacctgactttgggccgtcttcatttgtcccttcatggggggccacagcaactggcgctcgaaagtttctgatcgccttcaacatcaacctgctaggtaccaaggagcaggcgcatcgcatagccctcaatttgcgtgaacaaggcaggggtaaagaccagcccgggcggttgaagaaggtgcaagggatcggttggtacctggacgagaaaaatttagcacaggtgagtacgaatctgctagatttcgaggtaaccgcactgcataccgtttatgaggaaacttgtcgagaggcacaggaactctctcttcccgtagtgggtagccaattagtgggcctggttcccctgaaggccctgctcgacgctgccgccttctattgtgaaaaggagaacctcttcattttggaggaggagcaaaggatccgtctggttgtgtcccgtctgggattggattctctatgtcctttttcccctaaggaacgcatcatcgaatatctggtgcctgagagaggccccgaacggggtctgggtagcaaaagtctcagggccttcgttggcgaagtgggcgcccggagcgccgcacccgggggaggcagcgtggccgcggccgccgctgccatgggcgcagccctgggctctatggtaggcctgatgacgtatggccgacgccagtttcagtctctggatacaactatgcgccggctaatacctccctttagggaagcttccgcgaagctcaccacactggtagacgctgatgctgaggcctttacagcatatctagaggccatgcgattacctaaaaacacccctgaggaaaaggatcggcgcacggctgctttacaggaaggcctgagacgggcggtgtccgtgcctctgactttagctgaaaccgtcgcttccctctggccagccctacaggagctggctcgttgcggaaacctggcatgtcgctcagacctgcaggttgcagccaaagctctcgagatgggcgtctttggcgcctactttaacgtcctaataaaccttagggatattactgacgaggccttcaaggatcagccccccgccggctcccaggacccagggtgcaccggggctggcctgctgggcgaccctgcaggcgtcaccgtgcgagaggcctcacctggctcagtggcccctccaagccccattccaaggggccaatcctgtgatctggagacaccagggactgccggaccaagtaccctagaagggtag

SEQ ID NO: 322714 - DNA, 1719 bp, Artificial Sequence
  derived and/or modified sequence
atgagccagctggtggagtgcgtgcccaacttcagcgagggcaagaaccaagaggttattgacgcaatcagcggtgcaattacccaaacgcccggatgtgtcctcttagacgtggatgctggcccgagcacaaatcgcactgtttacacctttgttgggcctccagaatgtgttgtggagggtgctctgaatgctgctcgtgtggcgagccggctgatcgacatgtctcgacaccagggagagcacccacggatgggcgcactggatgtctgtcccttcatcccggttcgcggcgtgtctgttgatgagtgcgtgttgtgtgctcaggcttttgggcaaagactggctgaagaactcgatgtgcccgtgtacttgtatggtgaggctgcccggatggactctcggagaactttacccgctatccgggccggggagtatgaggctctgcccaaaaagttgcaacaggctgattgggcacccgattttgggccatctagtttcgtaccttcttggggagctaccgcgaccggcgctcggaaattcttgatcgctttcaacatcaaccttctggggaccaaggagcaggcccaccgcatcgccctcaatctgagggagcagggccgcggaaaggaccagcccggtcgccttaagaaagtacagggcattggctggtaccttgatgagaagaatcttgctcaggtgtctaccaatctgttggacttcgaagtaaccgccctgcacaccgtatacgaggaaacctgtagagaagcccaggagctctcgttgcccgtggttggttcccagctcgtggggctcgtccctctcaaagcgttgctcgacgcagcggctttttactgcgaaaaagagaacctgttcattctcgaggaggagcaacgcattaggcttgtggtctctcgcctggggcttgatagtctttgccctttctcgccaaaagaaagaattatcgagtatctggtgcccgagcggggcccagagcgcggcctgggtagtaaaagtctccgtgcatttgtgggtgaggtcggcgctagaagcgctgcccctgggggagggagtgtggccgccgccgcagctgccatgggggccgctttgggatccatggtcggcctgatgacatatggacgaagacagttccaatctctggatactactatgcgaaggctcattccaccgtttagggaggcttctgctaagcttactactctggtggatgctgacgccgaagcattcaccgcgtacttggaggccatgcggctccctaaaaatactcccgaagaaaaggacaggcgaacggcagcccttcaggaggggctacggcgggccgtgagcgtgccactcaccctcgcagagactgtggcttccctgtggcctgctctgcaagaactggccagatgtggcaatctggcatgcagaagtgatctccaggttgccgctaaggccctcgaaatgggagtcttcggtgcatactttaatgtcttgattaacctcagagatatcacagatgaggcatttaaggatcagccgcctgctgggtctcaggatcctggctgtacaggagcaggcctcctgggagatccggcgggggttactgtgcgagaagccagtcccggatctgtcgctcccccctcccctatccctcgggggcaaagctgcgatctggagactcctggtactgctggaccctctactttagagggatag

SEQ ID NO: 322715 - DNA, 1719 bp, Artificial Sequence
  derived and/or modified sequence
atgagccaattggtggagtgcgtgcccaacttctctgaagggaagaatcaggaagttattgacgcaattagtggcgctatcacccagacccctgggtgtgtactgcttgacgtcgacgccggtccatcaacaaaccgaactgtctacacgttcgtcgggcctcccgaatgtgttgtggaaggcgctctgaacgcagcacgagtagcatcacgattgattgacatgtcgagacatcagggcgaacaccctagaatgggagccctggacgtgtgcccattcattccagtgcgtggagttagtgtggacgaatgtgtactgtgcgcacaggctttcggacagaggctcgctgaggagctggacgtccccgtctacctctacggagaagccgctaggatggatagccgacggacccttccggctatacgggctggggagtacgaggcactccccaagaaactgcagcaggctgactgggcgcctgattttgggccatcctcattcgtgcccagctggggagctacagctacaggtgctaggaagttcttgattgccttcaacatcaacttacttgggaccaaagagcaggcacaccgaattgcactcaatctgcgggaacagggacgcggtaaagaccagcctggcaggctgaaaaaagtgcagggaatcggttggtatctggacgagaagaatctcgcccaggtgtccacaaacctcttagatttcgaagtaactgcgctccatacggtgtacgaggagacttgcagggaagcccaagaactgtcattgcccgttgtgggctctcagctggtaggacttgttccgctcaaagccctcctcgacgcagcagccttctactgtgagaaagaaaacctgtttattttggaggaggaacagcgaatccggctcgtagttagtcgccttggtctggattctctgtgccccttttcccccaaagaaaggatcatcgagtatctcgtgcccgagcgcggaccggaacggggactagggtcaaaaagcttgagggccttcgtcggagaggtaggggctcgcagcgctgcccctggtggcggaagtgtagcagccgcagcagccgctatgggggcagctttggggagcatggtcggccttatgacctatggacgaagacagtttcagtcacttgacacgacgatgcggcgattaatcccccctttccgagaggcgtcagccaaactcaccacactggtagatgcggatgctgaggcttttacagcatatctcgaagctatgaggctgcctaaaaacactcctgaggaaaaggacagaaggacagctgccttgcaagagggcctcagacgagctgtgagcgtcccccttactctcgccgaaacagtggcttcgctgtggcccgcactgcaagaattggctcggtgcgggaatcttgcctgtcgcagtgatctgcaagtcgcggcaaaggccctggaaatgggcgtgtttggcgcttactttaatgtcctgatcaatctgcgcgacattaccgacgaagcatttaaagaccagcctcctgccggatctcaggatcctgggtgcacgggagccggtctcttaggtgaccccgctggagtgacagtgagagaggcctccccaggcagtgttgcgccaccctcgcccataccaagaggccagagttgcgatctagagacaccgggaactgctggaccgtctactctagaggggtag

SEQ ID NO: 322716 - DNA, 1719 bp, Artificial Sequence
  derived and/or modified sequence
atgtcccaactggtcgagtgcgtccccaacttttctgagggcaagaaccaagaagtgattgacgccatttccggagcgataacccagaccccaggctgcgtgttgctggatgtggatgctggcccatccactaatcggacagtgtacactttcgtcggacctccggagtgcgtcgttgagggcgctctgaacgctgccagggtggctagcagactgattgatatgtcacggcaccagggcgaacacccacgcatgggcgctctggacgtctgcccatttattcctgtcagaggcgttagtgtcgatgagtgcgtgttgtgtgcccaggcattcgggcagagacttgccgaggagcttgacgtgccagtttatctgtatggggaagccgcacgcatggattcgagacgaactctgccagctatccgggcaggtgagtatgaggctttaccaaaaaagttgcagcaagcagactgggcccctgattttgggccttcttcattcgtcccaagttggggggctaccgctaccggtgcaaggaaattcttgatcgcatttaacataaatttgctgggcacaaaagagcaggcacatcggatcgccctgaacctgagggagcagggcagaggtaaggatcaacccggaaggttgaaaaaagtgcagggcatcgggtggtacctggacgagaaaaacttggcccaagtcagtactaatttgttggattttgaagtcacggcactgcacaccgtgtacgaggagacatgtcgggaggctcaggaattgagtctgcctgttgtcggatctcagctggtcggactggtgcctctgaaggccctacttgatgctgccgctttttattgtgagaaggaaaacctgtttatacttgaagaagagcaacggataagattggtcgtttctcggctgggccttgatagcctgtgcccattttctcccaaagagaggatcatcgaatatcttgtgcctgagaggggcccagagcgtgggcttggctcaaagtcactcagggccttcgtgggtgaagtcggggcacgcagtgctgccccagggggtggcagtgtggccgctgccgcagccgcaatgggcgcagccctgggctccatggttgggttgatgacatacggaaggcggcaattccaaagtttggacaccacaatgcggagattgataccacccttccgtgaggcttcagctaagctgaccacactggtggatgcagacgccgaggcatttaccgcgtatctggaggccatgagactgccaaaaaatacacccgaagagaaggatagacggaccgccgctctgcaagagggactccgcagggccgtctcagtcccactgacactggcagaaaccgtggcctccctgtggcctgcactgcaggagctggccaggtgtgggaatctcgcctgtaggtcggacctgcaggtggccgctaaagccctggagatgggagtgttcggggcttactttaacgtgctgattaacctaagagacataacagacgaggcttttaaagatcagcccccagccggatcccaggatcccggatgcacaggtgctggccttctcggcgatcccgctggcgtgaccgtacgagaggcatctcccggttcagtggcgcctccttccccaatcccaagaggccaatcatgcgaccttgagaccccaggaactgctggtccatcaaccctagagggatag

SEQ ID NO: 322717 - DNA, 1719 bp, Artificial Sequence
  derived and/or modified sequence
atgagccagctggtggagtgcgtgcccaacttcagcgagggcaagaaccaggaggtgatcgacgccatcagcggcgccatcacccagacccccggctgcgtgctgctggacgtggacgccggccccagcaccaacagaaccgtgtacaccttcgtgggcccccccgagtgcgtggtggagggcgccctgaacgccgccagagtggccagcagactgatcgacatgagcagacaccagggcgagcaccccagaatgggcgccctggacgtgtgccccttcatccccgtgagaggcgtgagcgtggacgagtgcgtgctgtgcgcccaggccttcggccagagactggccgaggagctggacgtgcccgtgtacctgtacggcgaggccgccagaatggacagcagaagaaccctgcccgccatcagagccggcgagtacgaggccctgcccaagaagctgcagcaggccgactgggcccccgacttcggccccagcagcttcgtgcccagctggggcgccaccgccaccggcgccagaaagttcctgatcgccttcaacatcaacctgctgggcaccaaggagcaggcccacagaatcgccctgaacctgagagagcagggcagaggcaaggaccagcccggcagactgaagaaggtgcagggcatcggctggtacctggacgagaagaacctggcccaggtgagcaccaacctgctggacttcgaggtgaccgccctgcacaccgtgtacgaggagacctgcagagaggcccaggagctgagcctgcccgtggtgggcagccagctggtgggcctggtgcccctgaaggccctgctggacgccgccgccttctactgcgagaaggagaacctgttcatcctggaggaggagcagagaatcagactggtggtgagcagactgggcctggacagcctgtgccccttcagccccaaggagagaatcatcgagtacctggtgcccgagagaggccccgagagaggcctgggcagcaagagcctgagagccttcgtgggcgaggtgggcgccagaagcgccgcccccggcggcggcagcgtggccgccgccgccgccgccatgggcgccgccctgggcagcatggtgggcctgatgacctacggcagaagacagttccagagcctggacaccaccatgagaagactgatcccccccttcagagaggccagcgccaagctgaccaccctggtggacgccgacgccgaggccttcaccgcctacctggaggccatgagactgcccaagaacacccccgaggagaaggacagaagaaccgccgccctgcaggagggcctgagaagagccgtgagcgtgcccctgaccctggccgagaccgtggccagcctgtggcccgccctgcaggagctggccagatgcggcaacctggcctgcagaagcgacctgcaggtggccgccaaggccctggagatgggcgtgttcggcgcctacttcaacgtgctgatcaacctgagagacatcaccgacgaggccttcaaggaccagccccccgccggcagccaggaccccggctgcaccggcgccggcctgctgggcgaccccgccggcgtgaccgtgagagaggccagccccggcagcgtggccccccccagccccatccccagaggccagagctgcgacctggagacccccggcaccgccggccccagcaccctggagggctag

SEQ ID NO: 322718 - DNA, 1488 bp, Artificial Sequence
  derived and/or modified sequence
atgagtcagcttgttgagtgtgtgccaaatttctccgaaggaaaaaatcaggaagtgattgacgccattagcggtgcaattacacagacgcctggttgcgtgcttttggatgtcgacgcaggtcctagtaccaataggacggtctatacgtttgtgggaccccccgagtgcgtggtcgaaggcgcgttgaatgccgcaagagtggcctctagattaatcgacatgagccgccaccagggagagcatcccaggatgggtgctctggatgtctgcccctttattcccgtgaggggtgtgtcagtggacgagtgtgtgctgtgtgcgcaggcattcggacaacgcctggccgaagagctggacgtgccagtctatctctacggcgaagctgctagaatggacagtcgaagaacactgcctgcgatccgagctggagaatacgaagcactgccaaaaaagcttcagcaggcggactgggcccccgatttcgggcccagctctttcgtgccctcttggggtgccactgctactggggctcgcaaatttctgatcgccttcaatattaacttattaggcactaaggagcaggcgcacagaatcgctcttaatctgcgcgagcagggaaggggcaaggaccagcctggacgcttgaagaaggtccaaggtattggatggtacttggacgaaaaaaacctggcacaggtatcaacaaacctactggatttcgaggtcacagccctgcacaccgtgtatgaggaaacatgcagagaggcgcaggagctatcactccccgtggtgggctcccaactggtgggactcgttccactgaaagcactcttagacgcagctgccttttattgcgagaaggagaacctgttcatcctggaggaggaacaacggatcagactcgtagtcagcagacttgggctggactccctctgcccctttagccccaaagaacggatcatcgagtatcttgtccctgagagggggcccgaaagaggcctaggctcaaaatcactgcgagcatttgtcggagaggtcggggcccgctcagctgctcctggcggcggcagcgtggctgctgcagccgccgccatgggagccgccctcggcagtatggtcgggttgatgacttacggtcgacgacaatttcagtccctcgatacaactatgcggcgcctgatcccacccttcagggaggcctccgctaagcttaccactctggtggacgccgatgccgaggctttcacagcgtatttggcccatggcggcccaacaggcggcagcgaggccgggagcctgtgcgccgccgacgccgggggagacggtggcctcgccgttgcagggcctgcgggaacaggaccggtgtgggagcccgggttaccggtgagaccgcccggcggaggccaatcacctggagacgggcgggtgtggcgaatcttccagcgggcccatcagccagagggccatcataggcggggcatatag

SEQ ID NO: 322719 - DNA, 1488 bp, Artificial Sequence
  derived and/or modified sequence
atgtcccagctggtcgaatgtgtacctaacttttcggagggaaagaatcaggaggtgattgacgccatctctggggcaataacccagacgccaggctgcgttctgctcgacgtggatgccggaccgagcaccaataggaccgtctacactttcgtgggacccccagaatgcgtggtggagggggcattaaacgcagcgagggtggccagcaggctgatcgatatgagcagacatcaaggcgagcaccccagaatgggggccctggacgtgtgtcccttcattcctgttcgcggggtgagcgtggacgagtgcgtcctctgtgctcaggcattcggccagcggctagccgaggaacttgacgtccccgtctacctctacggtgaagcggcaaggatggactcccgcagaactttgcctgcaatcagggcaggcgaatacgaggccctccccaagaagttgcagcaggcagattgggctccggatttcgggccctccagcttcgtgccttcctggggcgccacagctactggagcacgtaaattcctgattgcctttaatatcaaccttttggggacaaaagagcaggcccaccgaatagctctcaacctgcgggagcagggcagaggaaaggatcaacccgggaggctgaagaaggtacaggggataggttggtacctagatgagaagaacctggcccaggtgtctaccaacctgttggattttgaagttacggcccttcacacagtgtatgaggagacatgtagggaagctcaggagctgtcgctccccgtggtagggtcacagctcgttggactggtgccgcttaaagcacttctcgacgccgccgcattctactgcgaaaaagagaatctcttcattctagaggaagaacagaggattcgtctggtcgtaagccggcttgggcttgactcgctctgtcccttctcccccaaggaacggattattgaatacctggtgcctgaaaggggtccagagcgcgggctgggttccaagagccttagagccttcgtcggggaggttggtgctcgaagtgccgctcccggtggtggatcggtggccgcagccgcagcagcaatgggcgcggcactggggtcaatggtgggcctgatgacgtacgggaggcgtcaatttcagtctcttgacacaacaatgagacgcctgattcctccattcagggaagcgagtgcgaaattgacgaccctagtagacgcagatgccgaagcattcaccgcctaccttgcgcacggcggacctactggagggagcgaggcagggtcattgtgcgcggccgatgccggaggagacggtggtctggctgtggctgggccggcaggaactggtccggtgtgggaacccggcctccccgtacgaccacctggcggaggccagtcccctggcgatggccgggtgtggcgtatcttccagcgcgcccatcagccagaggggcatcacaggcgtggaatctag

SEQ ID NO: 322720 - DNA, 1488 bp, Artificial Sequence
  derived and/or modified sequence
atgagccagctggtggagtgtgtgcccaacttcagcgagggcaagaaccaggaggtgattgatgccatcagcggggccatcacccagaccccaggctgtgtgctgctggatgtggatgctggccccagcaccaacagaacagtgtacacctttgtgggccccccagaatgtgtggtggagggcgccctgaatgctgcccgggtggccagccggctgattgacatgagccgccaccagggcgagcaccccaggatgggcgccctggatgtgtgccccttcatccctgtgcggggcgtgtctgtggatgaatgtgtgctgtgtgcccaggccttcggccagaggctggccgaggagctggatgtgcctgtgtacctgtatggagaggccgccaggatggacagcaggaggaccctgcctgccatccgggccggggagtatgaggccctgcccaagaagctgcagcaggccgactgggccccagactttggccccagcagctttgtgcccagctggggcgccacagccaccggggccaggaagttcctgattgccttcaacatcaacctgctgggcaccaaggagcaggcccacagaattgccctgaacctgcgggagcagggccggggcaaggaccagcccggccgcctgaagaaggtgcagggcatcggctggtacctggatgagaagaacctggcccaggtgtccaccaacctgctggactttgaggtgacagccctgcacacagtgtatgaggagacctgccgggaggcccaggagctgagcctgcctgtggtgggcagccagctggtgggcctggtgcccctgaaggccctgctggatgctgctgccttctactgtgagaaggaaaatctcttcatcctggaggaggagcagaggatccggctggtggtgtcccggctgggcctggacagcctgtgccccttcagccccaaggagcgcatcatcgagtacctggtgcctgagcggggccctgagcggggcctgggcagcaagagcctgcgggcctttgtgggggaggtgggcgcccggtctgctgcccctgggggcggctctgtggccgctgctgctgctgccatgggcgccgccctgggctccatggtgggcctgatgacctatggaagacggcagttccagagcctggacaccaccatgaggaggctcatcccccccttccgggaggccagcgccaagctgaccaccctggtggatgctgatgctgaggccttcaccgcctacctggcccacggcggccccaccggcggcagcgaggccggcagcctgtgtgccgcagatgctggaggagatggcggcctggccgtggccggccctgctggcactggacctgtgtgggagcccggcctgcctgtgcggcccccaggcggcggccagagccctggagatggccgggtgtggaggatcttccagagggcccaccagcctgagggccaccaccggcggggcatctag

SEQ ID NO: 322721 - DNA, 1488 bp, Artificial Sequence
  derived and/or modified sequence
atgagccagctggtggagtgcgtgcccaacttcagcgagggcaagaaccaggaggtcattgatgccatctcgggtgccatcactcagactcccgggtgtgttctgctggatgttgatgcaggcccatccactaaccgtacggtgtacacattcgtagggccccccgagtgcgtcgtagagggcgctttgaacgctgcgagggttgcctcccgcctaattgacatgtcgagacatcagggtgagcaccctcggatgggagcgctagacgtgtgcccatttattcctgtgcggggcgtaagcgtagatgaatgtgtgctgtgtgctcaggcattcggacaacgtttggccgaggaacttgatgtccccgtgtacctctatggtgaggctgcccgaatggattctcgtaggactctgccagctattagagcaggcgagtatgaggccttgcccaagaaactgcagcaagctgattgggcccccgatttcgggccctcttcgtttgtcccctcttggggggcaaccgctaccggggctagaaaattcttgatagcttttaatatcaacctgttaggtaccaaggagcaggcacaccggatagccctcaacctgagggaacagggcaggggcaaggaccagccaggccgtctcaaaaaagtccaggggatcggatggtacttagatgaaaagaatctggcacaggtgtcaacgaaccttcttgatttcgaggttactgcgctgcatacagtgtacgaggagacatgtcgtgaggcgcaggagctttcactgccagtggttgggtcccagctggtcggactcgtgcccttaaaagcgctgctcgatgccgcagccttctactgcgagaaggaaaacctgtttatacttgaggaagagcaacgcattcgacttgttgtgtcccgcctaggcctcgacagcctgtgtcctttttcgcccaaggagaggatcatcgaatacctggtcccggagagagggccagagagaggactgggaagtaagtcgctacgggcattcgtgggggaagtcggagcacgatcagcggcgcctgggggcgggtccgtggcagctgcagccgccgctatgggagccgctcttggttctatggtgggcctgatgacttatggccgccggcagtttcagagtttggacacgacgatgcgtcgtttgatcccaccattcagggaggcctcagccaagttaactacattggtggatgccgatgctgaagccttcactgcttatctggcccatggtggtcctaccggtggaagtgaagccggctccctgtgcgctgcagacgccggaggtgatgggggcctcgctgttgcgggcccggcaggaacaggaccggtctgggagccagggctgccagtgaggccacccggtggtggccagtctcctggggacggaagagtgtggagaatctttcaacgagcacaccaacccgaaggacatcaccgccgtggcatttag

SEQ ID NO: 322722 - DNA, 1488 bp, Artificial Sequence
  derived and/or modified sequence
atgagccagctggtggagtgcgtgcccaacttcagcgagggcaagaaccaggaagtcatcgatgcaatcagcggcgccatcacacagacccccggctgtgtcctcctggatgtggacgcaggaccttcaaccaacaggacggtgtacaccttcgtgggcccgccagaatgtgtcgtggaaggtgcgctcaacgccgcccgggtggcatctcggctgattgatatgtcccgccaccagggcgagcaccctcggatgggcgccctcgacgtatgccccttcattcccgtgaggggcgtgtccgtggacgagtgcgtcctgtgtgcgcaagcattcggacagcgcctggctgaggaattagatgtgcctgtctacctgtacggggaggccgcccgcatggacagtaggcggacactcccagcaatccgcgctggcgagtatgaagcactaccaaaaaaattgcaacaggcagactgggctccagacttcggaccctcctcctttgtcccatcttggggggccaccgctactggagcccgcaagtttctaatcgcattcaatatcaatctactaggaacaaaagaacaggcccaccgaattgctctgaatcttagagaacaggggcgaggaaaggatcaaccagggcgactgaagaaggtccaaggcattggatggtatctggacgagaagaatctagctcaggtgtcaacaaatctcctggatttcgaggtgactgcgctgcacaccgtctatgaagagacgtgtcgggaggcccaagaactctcactcccagtggtaggctctcagctcgtcggcctcgtgcctctgaaggcattactcgatgctgccgctttctactgcgagaaggaaaacttgtttattctggaggaagagcagaggatcagactggtggtgagccgtttggggctagactctctctgtccgtttagcccaaaggagcggatcattgagtaccttgttccagagagggggccagagcgagggctaggaagcaagtccctccgggctttcgtgggcgaggtgggggctcgaagcgccgccccagggggaggttccgtggccgctgcagctgctgcgatgggtgcggcgcttggttccatggtcggtcttatgacctacggccggaggcagttccagagtttggataccaccatgcgccgccttataccccctttcagggaagcctccgcaaaactcacgacactggtggatgccgatgcagaagcatttacggcctatctggcacacggggggcctacagggggttctgaggcggggtccttgtgtgctgccgacgccggtggcgacggaggactggctgtggccggtccagcgggaaccgggcctgtctgggaacctggattgcctgtgagaccacctggggggggtcagagccccggagatggccgcgtgtggcggatttttcagagagcacaccagccggaggggcatcaccgtagagggatttag

SEQ ID NO: 322723 - DNA, 1488 bp, Artificial Sequence
  derived and/or modified sequence
atgagccagcttgttgagtgcgtgcctaacttcagcgagggcaagaaccaggaagttatcgacgcaatttctggcgcaatcacccagacacctggttgcgtgctgctcgacgttgacgctggtcccagtacgaatcgtacggtttatacatttgttggacctccagagtgcgtcgtggaaggggctttaaacgcagccagagttgcatcccgtctgattgacatgagccgtcatcagggcgagcatcctcggatgggcgctctggacgtctgcccatttatccctgtgcggggtgtttctgtggacgagtgtgtgctgtgtgctcaggcatttgggcagcgccttgcagaggaactggatgtaccggtgtacctgtatggcgaggccgctcgcatggatagtcgtcgaaccctgcctgcaatcagagccggagaatacgaggccctgccgaaaaaactgcaacaggctgactgggctccagatttcggcccaagctccttcgttccttcctggggagccacagcaaccggggcaagaaagttcttaatcgcctttaacatcaatcttctcggtaccaaggagcaggcacacaggattgcactgaatttacgggagcagggcagaggtaaggaccagccaggccgtcttaagaaagttcagggaattgggtggtatctcgatgaaaagaatctggcccaggtaagcacgaacctcctggatttcgaagtgactgccttacatacggtgtacgaagagacctgcagagaagcacaagaattaagtctgcccgttgtggggtcacagctcgtcggcctggtgccgttgaaggcgctacttgacgcagccgcattttactgtgaaaaggagaacctctttattctcgaggaggagcagcgcattcggcttgttgtttccagactgggcctggattccctttgtccatttagcccaaaggagcggatcattgaatacctggtcccggagaggggcccagagcgcggactggggtctaagtccctgagggcttttgtcggggaggtgggcgcaagaagcgccgctcctggtggcggtagtgtggccgctgccgcagcagcaatgggggcagcactcggttcaatggttgggctcatgacttacggaaggcgtcagtttcagtccctcgacaccacaatgaggcgcctaattcccccttttcgggaagcatcggccaagcttacaactctggtcgacgctgacgcagaagcttttacagcttacttggcgcacgggggtcccacagggggatccgaagcaggatcactgtgcgccgcagatgctgggggtgacgggggtcttgcagtggccggtcccgctggtacagggcctgtatgggagccagggttgccggtccgccctcctggcggaggtcagtctcctggcgatgggcgagtttggaggatatttcaacgggctcaccagcccgagggtcaccacagacgcggaatctag

SEQ ID NO: 322724 - DNA, 1488 bp, Artificial Sequence
  derived and/or modified sequence
atgtctcagctcgtggagtgtgttccaaattttagcgaggggaagaaccaggaggtaattgatgctatctcgggggctattacccagactcccggttgcgttctgttggacgtcgacgccggacccagtaccaaccgcactgtgtatacctttgtgggccctcctgagtgtgtggtcgagggggctctcaacgcagcgagagtggcttctaggctaattgatatgtctcgacaccagggggagcatcccaggatgggagctcttgacgtttgtcctttcattcctgtcagaggagtttccgtggatgagtgtgtgctctgcgcgcaagcattcgggcagagactggctgaggaactggatgtgcctgtctacctgtacggcgaagctgcacggatggattcccggaggacactgcctgccatacgcgctggcgagtacgaggcacttccgaaaaagctgcaacaagcagattgggccccagatttcggtccttcttcatttgtcccctcctggggcgcaacggcaactggggcacggaaattcctgattgcatttaacatcaacctcctgggcaccaaggagcaggctcatcggatagcacttaaccttcgggagcagggtaggggcaaagatcagcctgggcgtctcaagaaggtccaggggatcgggtggtacctggacgagaaaaaccttgcacaggtcagcactaatcttctcgacttcgaggtcactgccttacataccgtatatgaggagacgtgtagggaggcccaagaactgtcgttgcctgtcgttggctcacagctcgtgggtttggtacctcttaaagctctgctcgacgccgcagcgttctactgtgaaaaggaaaacctatttatactagaggaggaacagaggatcaggttggtggtgagtaggctcggacttgactcactgtgtccgttctctccaaaagaacgcataatcgagtaccttgttcctgaacgaggaccagagcggggtctgggctctaaatcattaagagcgttcgtgggggaggtcggcgctcgatcggctgccccaggcggaggttctgtggccgctgcagcagcagcaatgggggcagctctgggctccatggttggcttgatgacatacggaagacgccaatttcagtctcttgatacgaccatgcgaaggcttatccctccatttagggaagcttcagcaaagttgacaactctagtcgatgcagacgccgaggcctttaccgcttatttagctcatggaggcccaacaggaggctcagaagctgggtcactgtgcgcagctgacgcgggaggcgatggcggactggcagtggcgggtcccgcaggaaccggaccagtttgggaacctggcctgcctgtccgtccgcctgggggtggccagagcccaggggatggaagggtgtggcgtatttttcagcgcgcacaccagcccgaggggcaccataggcgtggaatatag

SEQ ID NO: 322725 - DNA, 1488 bp, Artificial Sequence
  derived and/or modified sequence
atgagccagctggtggagtgcgtgcccaacttcagcgagggcaagaaccaggaggtgatcgacgccatcagcggcgccatcacccagacccccggctgcgtgctgctggacgtggacgccggccccagcaccaacagaaccgtgtacaccttcgtgggcccccccgagtgcgtggtggagggcgccctgaacgccgccagagtggccagcagactgatcgacatgagcagacaccagggcgagcaccccagaatgggcgccctggacgtgtgccccttcatccccgtgagaggcgtgagcgtggacgagtgcgtgctgtgcgcccaggccttcggccagagactggccgaggagctggacgtgcccgtgtacctgtacggcgaggccgccagaatggacagcagaagaaccctgcccgccatcagagccggcgagtacgaggccctgcccaagaagctgcagcaggccgactgggcccccgacttcggccccagcagcttcgtgcccagctggggcgccaccgccaccggcgccagaaagttcctgatcgccttcaacatcaacctgctgggcaccaaggagcaggcccacagaatcgccctgaacctgagagagcagggcagaggcaaggaccagcccggcagactgaagaaggtgcagggcatcggctggtacctggacgagaagaacctggcccaggtgagcaccaacctgctggacttcgaggtgaccgccctgcacaccgtgtacgaggagacctgcagagaggcccaggagctgagcctgcccgtggtgggcagccagctggtgggcctggtgcccctgaaggccctgctggacgccgccgccttctactgcgagaaggagaacctgttcatcctggaggaggagcagagaatcagactggtggtgagcagactgggcctggacagcctgtgccccttcagccccaaggagagaatcatcgagtacctggtgcccgagagaggccccgagagaggcctgggcagcaagagcctgagagccttcgtgggcgaggtgggcgccagaagcgccgcccccggcggcggcagcgtggccgccgccgccgccgccatgggcgccgccctgggcagcatggtgggcctgatgacctacggcagaagacagttccagagcctggacaccaccatgagaagactgatcccccccttcagagaggccagcgccaagctgaccaccctggtggacgccgacgccgaggccttcaccgcctacctggcccacggcggccccaccggcggcagcgaggccggcagcctgtgcgccgccgacgccggcggcgacggcggcctggccgtggccggccccgccggcaccggccccgtgtgggagcccggcctgcccgtgagaccccccggcggcggccagagccccggcgacggcagagtgtggagaatcttccagagagcccaccagcccgagggccaccacagaagaggcatctag

SEQ ID NO: 322726 - DNA, 511 bp, Artificial Sequence
  derived and/or modified sequence
ttccgggccgcgagccccctgcgcgccgctttggggctgcgctcactcgtgtgcgcgctcgtccgcccgccagtcctctcaacgcgcgcttggccgcccgacgacgcgggagccgcacgcgccggacgaggctcgctgcgctccctgttgcccagcgcgggcccgttgaggcggagccctcagttcccggccaggacacggtctgggccgccgaatctccggccgaagagcggcggcggcagcggcgccgtgagcagaggagccttgtggaacaaagtagaacttgaggagcagccgccgcggtgacgaggtcccaggatgacgtcaccgtgcgatatttaaaatgggagccttttgctctgagtggaaaaaaatgaagaatgaaattgctgccgttgtcttctttttcacaaggctagttcgaaaacatgataagttgaaaaaagaggcagttgagaggtttgctgagaaattgaccctaatacttcaagaaaaatataaaaatcactgg

SEQ ID NO: 322727 - DNA, 3101 bp, Artificial Sequence
  derived and/or modified sequence
agtcgttgccacccgcggagatgaaatgtgagcctgggtggccaaggacgccggagtggccgccttccccgcgcctgagcgcagtggggcgagacaaagagacctgggcccccagcgcagcccgtctcgggccacgggcgccccagctccgcggagtcccgcagtcgctggcccgggacgcgcccggcccgggctcccttggaaggctccctaggcaatggccgggtctctgctccacccggctctcaggagcgctgctctctccatctgatcgccctccatcctccccattccctccggttccgggctctcccttcgctccaagcctcaggccaccggcttggatggacgctccgaggctacccgtgcgtccaggggtcttgcttccgaagttggtcctgctctttgtctacgcagatgattgccttgctcagtgtggcaaagattgcaaatcttactgctgtgatggaaccacgccctactgttgctcctactacgcttatattgggaatatcctctcgggcactgcaattgcgggcattgtttttggaatagtatttatcatgggggtcattgctgggattgccatatgcatctgcatgtgcatgaagaaccacagggcgacccgcgtgggcatcctcaggacgactcacatcaacaccgtctcctcctatcctggaccaccaccctacggtcacgaccacgagatggaatactgtgcagacttgcctcctccatactcccccaccccacagggtccagcacagcgttctccaccccctccttatcctggaaacgcaaggaaataatctatctcccagaacagaacatgtgccaatgggcgatcttgcctggaataaaatgcctctactcagaaacaggcaggaaagaattgctccaaggaatactttttggggtcagataatgtgtcaggtggaatatccctgctaggagatataggatttctactctgctcaaagctgaccccatctggagtattaatgtttggttctatggaaccacattttaagagatctgctgatccacctaagcacattcagggaagagtaatgtaattgacaaaatatctgataatcatgttgtttaagggctaggtgaagaaagtttcagtattgatcctggaaaaaaagaagatctaagtaggatgggagaatgatttggcccacacaaggaagcaactttattctatatagctttaaaagtcagaactagaattgttcattctttcattcatcaataaatgtattttgagtgcctaagagtttactatgtgcctagcactgtttgaggtcctgatggaagttacaggacgggtactctggttttagtacaagaaagagcaatgactagattgctttgtgaagctcttggtagagacacgctccagaagggataacaaaatcaaatagtagatgggttcattgggcctcagaagttctgctcgtattttaggtgggtgtgaagtgaatttctatatgtccaggagtgaatacaacagaaagagttggatcttatttatttaattagggagttaaaacaagaccaaaaagactcaacagccgcttgaagccaagaactcttcaatgccagctactgccacctaaaaatcatctggctttatagtggatcagaataaaggttattctaactgtggggagaaaaaaaaaattgtatcaagttccacaggtagcagacacttcacttccaagtaaaagatgagaaatcaattattcccacaggattttaggtcagggagcaaaaatctcagaacttgaccatgaagatacacaacagactcgcaaaaataaagtgggaaatgaagttcagattcccttctgtagatttccttaaaactattatttttttcttcttcgtaaaattttgataatctgttctcttaaaaaagttaatgacacaattaagatactgacatcaaattgttgccttttaccaaaatgcaaattttatgaagtgcctacctttatatgtataaagcatttaataaataattctaatgtgccatattttgctgtgagtgaccttaacatttatatttttatatgaattgtttcatgtatttataaaaattgtatattgaacattggaaatagatgattagatttttgtgtcattttacaattaaatctaaaatgcttaatccaatatcatcatcaaaattcagtgaaatcccaaaacagtgccaagaattttgctgaatgaaacaatcaaacaaagcattttaaggtgtaagttatagtacctgtacttgcagataagaagcttactatatcattattataagtagcatatattactttcaaatacctatattagaaagatattgatctgactgaaatataacctacctgccagtaaggtccaaaggctgaatttgttttgaatgagttccttgatctttaagcactgatgattttcttatatatgaggatgcaaagcattcaagagtttcagcctgttctggtgaggggctccctgacttacataaagttttcagtgcaattttaatagtacatatgctttaatttatttttcttctgcgtgtggtcagacccaattacactgtggctaagactctcaaagtgccagggtttctgtgatgattctgagaatgctgaatacaaatataccttatattctttaaggaaaacggaaaggaaagatcagcagaaatagggttttctcatcttcaccatcaataaacatttattgcgtacctcctatattctgcaaattttccccaaatagaagccagttcagtccacaccatctcttctttgagttgtttatggcctcccttaaggcattttacaaacccataagcctacaatagatgagtatttttactatttgtattaagtgtcataatagcatcaatgtgcacattaccagtatagactgttggagttcactgattgttttcatagatgatgcttcttggggaaaaatagtataggatgtgaaagttttgaattacggttatttaaaaactaacatttgctatggccaaagtgtttacaataagcaataaagtgaaagaacctattataacacagattata

SEQ ID NO: 322728 - protein, 172 aa, Artificial Sequence
  derived and/or modified sequence
MKCEPGWPRTPEWPPSPRLSAVGRDKETWAPSAARLGPRAPQLRGVPQSLARDAPGPGSLGRLPRQWPGLCSTRLSGALLSPSDRPPSSPFPPVPGSPFAPSLRPPAWMDAPRLPVRPGVLLPKLVLLFVYADDCLAQCGKDCKSYCCDGTTPYCCSYYAYIGNILSCCCPR

SEQ ID NO: 322729 - DNA, 1312 bp, Artificial Sequence
  derived and/or modified sequence
agtcgttgccacccgcggagatgaaatgtgagcctgggtggccaaggacgccggagtggccgccttccccgcgcctgagcgcagtggggcgagacaaagagacctgggcccccagcgcagcccgtctcgggccacgggcgccccagctccgcggagtcccgcagtcgctggcccgggacgcgcccggcccgggctcccttggaaggctccctaggcaatggccgggtctctgctccacccggctctcaggagcgctgctctctccatctgatcgccctccatcctccccattccctccggttccgggctctcccttcgctccaagcctcaggccaccggcttggatggacgctccgaggctacccgtgcgtccaggggtcttgcttccgaagttggtcctgctctttgtctacgcagatgattgccttgctcagtgtggcaaagattgcaaatcttactgctgtgatggaaccacgccctactgttgctcctactacgcttatattgggaatatcctctcatgctgctgtcccaggtagaggtgcgagtataacttggagaatgtgaagtcaaactgattctgtgattctttggtcatctggctcctagcttagctcttgattcactaactatatcatggagtgtgctgtgtgccctctttctcactccatagctacctccaccctggggcactgcaattgcgggcattgtttttggaatagtatttatcatgggggtcattgctgggattgccatatgcatctgcatgtgcatgaagaaccacagggcgacccgcgtgggcatcctcaggacgactcacatcaacaccgtctcctcctatcctgcaggaccaccaccctacggtcacgaccacgagatggaatactgtgcagacttgcctcctccatactcccccaccccacagggtccagcacagcgttctccaccccctccttatcctggaaacgcaaggaaataatctatctcccagaacagaacatgtgccaatgggcgatcttgcctggaataaaatgcctctactcagaaacaggcaggaaagaattgctccaaggaatactttttggggtcagataatgtgtcaggtggaatatccctgctaggagatataggatttctactctgctcaaagctgaccccatctggagtattaatgtttggttctatggaaccacattttaagagatctgctgatccacctaagcacattcagggaagagtaatgtaattgacaaaatatctgataatcatgttgtttaagggctaggtgaagaaagtttcagtattgatcctg

SEQ ID NO: 322730 - DNA, 519 bp, Artificial Sequence
  derived and/or modified sequence
atgaagtgcgagcccggctggcccagaacccccgagtggccccccagccccagactgagcgccgtgggcagagacaaggagacctgggcccccagcgccgccagactgggccccagagccccccagctgagaggcgtgccccagagcctggccagagacgcccccggccccggcagcctgggcagactgcccagacagtggcccggcctgtgcagcaccagactgagcggcgccctgctgagccccagcgacagaccccccagcagccccttcccccccgtgcccggcagccccttcgcccccagcctgagaccccccgcctggatggacgcccccagactgcccgtgagacccggcgtgctgctgcccaagctggtgctgctgttcgtgtacgccgacgactgcctggcccagtgcggcaaggactgcaagagctactgctgcgacggcaccaccccctactgctgcagctactacgcctacatcggcaacatcctgagctgctgctgccccagatag

SEQ ID NO: 322731 - DNA, 519 bp, Artificial Sequence
  derived and/or modified sequence
atgaaatgcgagccaggctggccccgtaccccagagtggccgccttctccaaggctgtctgccgtgggcagagataaggaaacctgggcgcctagtgccgcacgacttgggccacgggcgccgcagctgcgaggagtgcctcagagtctcgccagagatgcaccaggccccggaagcctgggaaggttacctcggcagtggccagggctatgctctacgagactaagtggagcgctcttgtctccaagcgatcggccccctagctctcccttcccccccgtgccgggatctcccttcgcgccctctctccgtccaccagcgtggatggacgcgcctagactgcctgtgaggccaggcgtgttactgcccaagctagttttgctatttgtgtatgccgacgactgtttggcccaatgtggtaaggactgcaagtcttattgctgcgacggcaccacaccatattgctgttcatactatgcatacatcggtaatattctgtcttgttgctgtccaaggtag

SEQ ID NO: 322732 - DNA, 519 bp, Artificial Sequence
  derived and/or modified sequence
atgaagtgtgagcccggctggcccaggaccccagagtggccacccagcccccggctgtctgctgtgggccgggacaaggagacctgggcccccagcgctgcccggctgggcccccgggccccccagctgcggggcgtgccccagagcctggccagagatgcccctggccctggcagcctgggccgcctgccccggcagtggccaggcctgtgcagcacccggctgagcggggccctgctgagccccagcgaccggccccccagcagccccttcccccctgtgcccggcagcccctttgcccccagcctgcggcccccagcctggatggatgccccccggctgcctgtgcggcctggggtgctgctgcccaagctggtgctgctgtttgtgtatgcagatgactgcctggcccagtgtgggaaggactgcaagagctactgctgtgatggcaccaccccctactgctgcagctactatgcctacatcggcaacatcctgagctgctgctgccccaggtag

SEQ ID NO: 322733 - DNA, 519 bp, Artificial Sequence
  derived and/or modified sequence
atgaagtgcgagcccggctggccccggacccccgagtggccccccagcccccgcctgagcgctgtcgggcgggataaggagacctgggcgccttctgccgcaaggttaggtcctcgagcccctcagctgcggggagtgcctcagagtcttgcacgagacgcccccggccctgggagcctgggccggctgcctcggcagtggccagggctgtgtagtacaaggttatcaggggctctgttgtctcccagcgaccggccaccaagcagcccttttccccctgtgcctgggtcgccattcgcgccttctctgaggccaccagcatggatggacgcccctaggctgcccgtcagaccgggcgtgctgctccccaagctcgtgctgctctttgtgtatgcagacgactgtttggcccaatgtggaaaagattgcaagtcatactgctgcgatggcactacaccctactgttgttcgtactatgcatatataggcaacatactctcatgttgttgcccccgctag

SEQ ID NO: 322734 - DNA, 519 bp, Artificial Sequence
  derived and/or modified sequence
atgaagtgtgaacccggatggccaagaactcctgagtggcctccctctccaaggctgtccgcagtggggagagacaaggagacctgggccccttccgccgcacgccttggccctcgcgcacctcagcttcgaggtgtgcctcagtccctggccagggatgcacccggaccaggctcactcggtcgtctccccagacagtggcccggactgtgtagcacgcgcctgtccggcgcacttctgagccccagcgaccggcctccaagctctccgtttcctcctgttccaggctcaccatttgccccatcactgagacctccagcatggatggatgctccacgattgccagtcagaccgggagttctcttacctaagctagttctgctgttcgtctatgccgacgattgtcttgcacaatgtgggaaggactgtaagtcctactgctgtgacggcacgaccccatattgttgctcctattacgcttacatcggtaatattcttagttgctgttgtcctcgatag

SEQ ID NO: 322735 - protein, 1019 aa, Artificial Sequence
  derived and/or modified sequence
MLQGTCSVLLLWGILGAIQAQQQEVISPDTTERNNNCPEKTDCPIHVYFVLDTSESVTMQSPTDILLFHMKQFVPQFISQLQNEFYLDQVALSWRYGGLHFSDQVEVFSPPGSDRASFIKNLQGISSFRRGTFTDCALANMTEQIRQDRSKGTVHFAVVITDGHVTGSPCGGIKLQAERAREEGIRLFAVAPNQNLKEQGLRDIASTPHELYRNDYATMLPDSTEIDQDTINRIIKVMKHEAYGECYKVSCLEIPGPSGPKGYRGQKGAKGNMGEPGEPGQKGRQGDPGIEGPIGFPGPKGVPGFKGEKGEFGADGRKGAPGLAGKNGTDGQKGKLGRIGPPGCKGDPGNRGPDGYPGEAGSPGERGDQGGKGDPGRPGRRGPPGEIGAKGSKGYQGNSGAPGSPGVKGAKGGPGPRGPKGEPGRRGDPGTKGSPGSDGPKGEKGDPGPEGPRGLAGEVGNKGAKGDRGLPGPRGPQGALGEPGKQGSRGDPGDAGPRGDSGQPGPKGDPGRPGFSYPGPRGAPGEKGEPGPRGPEGGRGDFGLKGEPGRKGEKGEPADPGPPGEPGPRGPRGVPGPEGEPGPPGDPGLTECDVMTYVRETCGCCDCEKRCGALDVVFVIDSSESIGYTNFTLEKNFVINVVNRLGAIAKDPKSETGTRVGVVQYSHEGTFEAIQLDDERIDSLSSFKEAVKNLEWIAGGTWTPSALKFAYDRLIKESRRQKTRVFAVVITDGRHDPRDDDLNLRALCDRDVTVTAIGIGDMFHEKHESENLYSIACDKPQQVRNMTLFSDLVAEKFIDDMEDVLCPDPQIVCPDLPCQTELSVAQCTQRPVDIVFLLDGSERLGEQNFHKARRFVEQVARRLTLARRDDDPLNARVALLQFGGPGEQQVAFPLSHNLTAIHEALETTQYLNSFSHVGAGVVHAINAIVRSPRGGARRHAELSFVFLTDGVTGNDSLHESAHSMRKQNVVPTVLALGSDVDMDVLTTLSLGDRAAVFHEKDYDSLAQPGFFDRFIRWIC

SEQ ID NO: 322736 - DNA, 3060 bp, Artificial Sequence
  derived and/or modified sequence
atgttgcagggcacatgtagtgtactgcttttgtggggtattctgggagcaatccaggcccagcagcaggaggttatctcgccggataccacagaaagaaataataattgtccggagaaaactgattgcccaatacacgtctattttgtactggacacctctgagagtgtgacaatgcaaagccccacagacatcctactcttccacatgaaacagttcgtccctcagtttataagtcagctacagaacgaattttatttggatcaagtagccttgtcgtggcgatacggcggactacacttctctgaccaagttgaagtgtttagtccaccaggctctgatcgtgcgtccttcatcaaaaatctgcaggggatttctagcttccggcgcggtacatttacggactgcgctctggcaaatatgactgagcagatacgccaggataggagcaaggggacagtgcattttgccgtggttataactgacgggcacgtcaccggatctccctgtggcgggatcaagctgcaggccgaaagagcacgtgaagaggggatccgcttattcgcagtggcacccaatcaaaacctgaaagagcagggtctgagagacatcgccagcaccccacacgagctgtatcgaaatgactatgcgacaatgcttccagactcgactgagattgatcaggatacaatcaacaggatcatcaaagtcatgaagcacgaggcttatggcgagtgttacaaagtttcctgcctggaaatacctggtccctctggccctaagggatatcgaggacaaaagggggccaaggggaatatgggtgagccgggtgagccagggcagaaaggaagacaaggcgatccgggcattgaaggcccaattgggtttcccggcccaaagggtgtaccgggtttcaagggcgagaagggcgaattcggtgcggatgggcggaagggtgctcctggactggccgggaaaaacggcacagacggccagaaaggaaaactcggaagaatcggtccacccggatgtaagggagatcccggtaacagggggcccgatggttaccctggcgaggcagggtctccaggggaacgcggggaccagggcgggaagggcgatcctgggaggcccggccgtcgtgggccaccgggggagattggagcaaaaggtagcaaagggtaccagggaaattccggagccccgggaagtccaggcgttaaaggcgctaagggtggccccggaccccgtggccctaagggagagccaggcaggagaggtgatccgggcaccaagggaagccccgggtcggatggccctaagggggagaaaggcgatcccggccccgaagggcctaggggtttagcaggagaagtcggcaacaagggtgccaaaggagacagaggcctcccaggtccccgtggacctcagggggccctgggagaacctggcaaacaaggctcaaggggtgatccaggggatgcgggaccaaggggagatagcgggcagcctgggccaaagggggacccaggcaggcctggtttctcctaccctggacctagaggggcccccggggaaaagggagagcctgggccacgtggccccgaaggtggccggggtgattttggtctgaaaggggaacccgggagaaaaggggagaagggagagccagccgatccaggaccccccggggagcccggcccaaggggccctcgcggcgtccccggccctgaaggcgaacctgggcctcccggtgaccctggacttacagaatgtgacgttatgacgtatgttagggaaacttgtggctgttgcgattgtgagaaaaggtgtggggccttggacgtggtttttgtgatcgactcctcagagagcatcggttacacaaatttcactctggagaagaacttcgtcattaatgttgtaaatagactcggggcaattgccaaggatccaaagtcagagactggtaccagagtcggagtggtgcagtatagtcacgaaggtactttcgaggctatccagctggatgacgaaaggattgactctctctcctccttcaaagaggccgttaagaatttggagtggattgcggggggcacttggacccctagtgctcttaagttcgcttacgaccgcttgatcaaggaatcccgtaggcagaagacccgcgtgttcgccgtggtgatcacggacggacggcatgacccgagagacgatgatctcaacctcagggcgctgtgcgaccgagacgtcactgtaacagccatcggaatcggcgatatgttccacgagaaacacgagagcgagaatctgtacagcattgcgtgtgacaaacctcagcaggtgaggaacatgacactgttctcagacctggtggcagagaagttcatcgacgatatggaggatgtgttgtgccccgacccccagatcgtgtgtccagatctgccttgccagacggagctttccgtggcacaatgcacccaacgcccagtcgatatagttttcctgctcgatggaagtgagaggttaggggagcaaaattttcacaaggcccgcaggttcgtagaacaagtggccagaagactgacgctggcacgcagagacgacgatcccctcaatgccagggtcgcccttctgcaatttgggggacccggtgagcagcaggtggccttcccactcagccacaatcttacggcaattcacgaagcactggagaccacccaatacctgaacagctttagtcatgttggcgcaggtgtcgtacacgcgattaatgcaatcgttcgttcacccaggggcggggcgcggcggcacgcagaactgagcttcgtgttcctgactgatggcgtcacaggtaatgattctctgcatgagtcagcccattctatgcgtaagcaaaacgttgttcccaccgttctggctctgggctcggatgtggatatggacgtcctgactaccctgtctcttggtgaccgggccgctgtgttccacgaaaaggactacgacagtctcgcccagcctggcttttttgacaggttcatacgctggatctgttag

SEQ ID NO: 322737 - DNA, 3060 bp, Artificial Sequence
  derived and/or modified sequence
atgctgcagggcacctgcagcgtgctgctgctgtggggcatcctgggcgccatccaggcccagcagcaggaggtgatcagcccagacaccacagaaagaaacaacaactgcccagagaagacagactgccccatccacgtgtactttgtgctggacaccagcgagagcgtgaccatgcagagccccacagacatcctgctcttccacatgaagcagtttgtgccccagttcatcagccagctgcagaatgagttctacctggaccaggtggccctgtcctggaggtatggaggcctgcacttcagtgaccaggtggaggtgttcagccccccaggcagtgaccgggccagcttcatcaagaacctgcagggcatcagcagcttcagaagaggcaccttcacagactgtgccctggccaacatgacagagcagatccggcaggacaggagcaaaggaacagtgcactttgctgtggtgatcacagatggccacgtgacaggcagcccctgtggcggcatcaagctgcaggccgagcgggcccgggaggagggcatccggctgtttgctgtggcccccaaccagaacctgaaggagcagggcctgcgggacatcgccagcacccctcatgagctgtacagaaatgactatgccaccatgctgcctgacagcacagaaattgaccaggacaccatcaaccgcatcatcaaggtgatgaagcatgaggcctatggagagtgctacaaggtgtcctgcctggagatccctggccccagcggccccaagggctaccggggccagaagggggccaagggcaacatgggagagcccggggagcccggccagaagggccggcagggcgaccccggcatcgagggccccatcggcttccctggccccaagggcgtgcccggcttcaagggggagaagggggagtttggagcagatggcaggaagggggcccctggcctggccggcaagaatggaacagatggccagaagggcaagctgggcagaattggccccccaggctgcaagggggaccccggcaacagaggaccagatggctacccaggagaggccggcagccctggagagcggggggaccagggcggcaagggggaccccggccggcccggccggcggggccccccaggagaaattggagccaagggcagcaagggctaccagggcaacagcggggcccctggcagccctggggtgaagggggccaagggcggccctggcccccggggccccaagggggagcctggaagaagaggagaccccggcaccaagggcagccctggcagtgatggccccaagggggagaagggggaccccggccctgagggcccccggggcctggccggggaggtgggcaacaagggggccaagggggaccggggcctgcccggcccccggggcccccagggcgccctgggggagcccgggaagcagggcagcagaggagaccctggagatgctggccccaggggggacagcggccagcccggccccaagggggaccccggccggcccggcttctcctacccaggccccaggggggcccctggagagaagggggagcccggcccccggggccctgagggcggccgcggggactttggcctgaagggggagcccggcaggaaaggagagaagggggagcctgctgaccccggccccccaggagagcccggcccccggggcccccggggcgtgcccggccctgagggggagcccggccccccaggggaccccggcctgacagaatgtgatgtgatgacctacgtgcgggagacctgtggctgctgtgactgtgagaagagatgtggggccctggatgtggtgtttgtgattgacagcagcgagagcatcggctacaccaacttcaccctggagaagaactttgtgatcaacgtggtgaaccggctgggcgccatcgccaaggaccccaagtctgagaccggcaccagggtgggcgtggtgcagtacagccatgagggcacctttgaggccatccagctggatgatgaaagaattgacagcctgagcagcttcaaggaggccgtgaagaacctggagtggattgctgggggcacctggaccccatctgccctgaagtttgcctatgacaggctcatcaaggagagccggcggcagaagaccagggtgtttgctgtggtgatcacagatggaagacatgaccccagagatgatgacctgaacctgcgggccctgtgtgacagagatgtgacagtgacagccatcggcattggagacatgttccacgagaagcatgaaagtgagaacctgtacagcatcgcctgtgacaagccccagcaggtgaggaacatgaccctcttcagtgacctggtggccgagaagttcattgatgacatggaggatgtgctgtgcccagacccccagatcgtgtgcccagacctgccctgccagacagagctgtctgtggcccagtgcacccagaggcctgtggacatcgtgttcctgctggatggcagcgagcggctgggggagcagaacttccacaaggccaggagatttgtggagcaggtggcccggcggctgaccctggccaggagagatgatgaccccctgaatgcccgggtggccctgctgcagtttggaggccctggagagcagcaggtggccttccccctgagccacaacctgacagccatccacgaggccctggagaccacccagtacctgaacagcttcagccacgtgggcgccggcgtggtgcacgccatcaatgccatcgtgcgcagcccccggggcggggccaggagacatgctgagctgagctttgtgttcctgacagatggagtgactggaaatgacagcctgcacgagagcgcccacagcatgaggaagcagaatgtggtgcccaccgtgctggccctgggcagtgatgtggacatggatgtgctgaccaccctgagcctgggggacagagctgctgtgttccacgagaaggactatgacagcctggcccagcccggcttctttgaccgcttcatccgctggatctgctag

SEQ ID NO: 322738 - DNA, 3060 bp, Artificial Sequence
  derived and/or modified sequence
atgctgcagggcacctgcagcgtgctgctgctgtggggcatcctgggagcaatacaagcccaacagcaggaggtgataagccctgataccaccgaacggaataacaactgtcccgagaaaacggactgtcccatccacgtgtatttcgtgctcgataccagcgaaagcgttaccatgcagtccccgaccgacattctcctcttccacatgaagcagttcgtgccccaatttatttcacagctgcagaacgaattttacctagatcaggttgctctttcatggcggtacggaggactgcatttttctgaccaagtcgaggttttcagcccacccggctccgaccgcgcttctttcatcaaaaatctgcagggaatcagcagtttccgccgcggcacctttactgattgcgctctagctaacatgactgaacagattaggcaagaccggagtaaaggcactgtccacttcgccgtagtcatcacagatggccacgtgactgggtcaccatgcggagggatcaaactgcaggccgaaagagcacgcgaggagggtatcaggctcttcgcagtggccccaaaccaaaacctgaaagaacagggtctgagagatatcgccagtaccccgcacgaactctatagaaacgattacgccaccatgctcccagacagcacggaaatcgatcaggatactataaatcggatcatcaaggtcatgaagcacgaagcctatggcgagtgttacaaggtgagctgtctggaaattcctgggcccagcggacccaagggataccgtgggcaaaagggggcaaaggggaatatgggggaaccgggcgaacccggccagaagggccggcaaggtgatccaggtatcgagggccccatcgggtttcccggccccaagggagtgcctggtttcaaaggagagaagggtgaattcggcgccgatggacgcaaaggagctcctggactcgctggtaaaaatggtaccgacggccagaagggcaagcttggcagaattggcccacccggctgtaaaggcgaccctggtaacagaggccctgacgggtacccaggcgaggcaggttcacctggtgagcggggtgatcaggggggtaaaggggacccaggcaggcccggtagacgcggtccacctggagagattggcgcaaaggggtcaaagggctaccaaggcaactctggcgccccaggtagtccaggcgtaaagggtgccaaaggcggccccgggcctagaggccccaagggtgagcccggaagacgaggagatccagggaccaagggaagccctggatctgacggacccaagggtgaaaaaggcgaccctgggcccgagggccccaggggtttggccggcgaggtgggcaacaagggggccaagggagaccggggactccctggccccaggggcccacagggcgcattgggcgaacccggtaagcaggggagccgaggggatccaggggacgccggaccccgcggggattccgggcagccaggcccgaagggggacccagggcggccaggttttagttaccctggacctaggggggcccccggcgaaaagggcgaacccggtcctagagggccagaaggggggcgcggggatttcggactgaagggggagcccggacgaaagggcgagaagggagagcctgcagatccaggaccgccaggagaaccgggaccacgcgggccccgtggggtaccaggccccgagggggagccaggacctcctggagatcccggtctgaccgaatgcgacgtgatgacatacgtgagggaaacctgtgggtgctgtgattgtgaaaagcgatgcggggctcttgatgtggtcttcgttatagattcctcagagagcattggatacaccaactttacactcgaaaaaaatttcgttatcaatgttgtcaaccgacttggagccattgccaaagaccccaagtccgaaacaggaacccgtgtaggagtagtgcagtactcacatgaaggaaccttcgaggcaattcaactagacgacgagaggatcgattctctgtcatcttttaaggaggccgtgaaaaatctagagtggatcgccggggggacctggaccccttccgcactcaagtttgcctacgaccgccttattaaagaatcgcggcgccagaaaacccgggtgtttgccgtagtgatcacagacggtagacacgaccctcgagacgatgacttgaacctgagagcgttatgtgaccgtgatgtgactgtcactgcgattgggattggagacatgtttcatgagaagcatgagagtgagaacctgtattccatcgcctgcgacaaaccacagcaggttcggaatatgacactgttcagcgatttggtggcagaaaagttcattgacgacatggaggatgttctttgccccgacccgcaaatcgtctgcccggatttaccatgccagacggagctgtccgtggctcagtgtacccagcgccccgtcgacatcgtcttcctgttagacggctcagaacgattgggagaacagaattttcacaaggcccggcgtttcgtagagcaggtggcccggcgcctaacactggctcgccgggacgacgaccctctgaacgctcgggtggctcttctgcagttcggaggacctggggaacagcaggtggccttcccactctcacacaacctcacggccatacatgaggccctagaaaccacgcaatatctgaactctttcagtcacgtcggcgccggcgtggtgcatgccatcaatgccatcgttagaagccctcgggggggcgcccgaagacacgcagagcttagcttcgtatttctgacagacggtgtgaccggtaatgacagccttcatgaatcagcccactccatgcgtaagcagaacgtcgtgcctacagtgctggccctgggatctgacgtggacatggatgtgctcactactctgagtctgggggaccgggccgcagtatttcatgagaaggactatgattctctggcccaacctggcttcttcgaccggttcatacggtggatttgttag

SEQ ID NO: 322739 - DNA, 3060 bp, Artificial Sequence
  derived and/or modified sequence
atgttgcaaggaacatgcagcgttttgctgttgtgggggatccttggcgcaatccaggctcaacagcaagaggtgatctcaccagacactacggaacgcaacaacaactgtccggaaaagaccgattgtccgatccacgtatactttgtgttggacacctctgaatccgtgacgatgcagagccctaccgacatactgctgttccatatgaaacagtttgtccctcagtttatctcccaattgcagaatgaattctatcttgatcaggttgctctcagttggaggtacggcggactccattttagtgatcaagtggaggtgtttagcccccctggtagcgaccgcgcaagctttataaagaacctccagggaattagcagcttcagaagaggaactttcacggactgtgccttggctaacatgacagaacagatacgccaggatcgatccaaaggcacagtacattttgccgttgtgatcacagacggccacgtgactggatccccttgcggaggaataaagttgcaagccgagagggctcgggaggaagggatccgtttattcgccgtggcccctaatcagaatctgaaggaacagggattacgcgatatcgcaagcacgccacacgagctatacagaaatgactatgccactatgctcccagatagcaccgaaatagaccaagacaccattaaccggattattaaagtgatgaagcatgaggcttacggcgagtgctacaaggtctcctgtctggaaatccctggcccttctggaccaaagggatacaggggccagaagggtgcaaagggcaacatgggtgagcctggtgaaccaggacagaagggcaggcagggggaccctggcatcgaagggccaattggttttcctggcccaaaaggagtgccaggcttcaaaggtgagaaaggcgaattcggcgctgatggacgaaagggcgcacctggcctagcagggaagaacggaacagatgggcaaaaggggaagttgggaaggatcggacctccagggtgcaagggcgatcccggaaatagaggtcccgacgggtatcccggagaggctggttctcccggagagcgtggagaccagggagggaaaggagatcccggtagacccggacgcagggggcctcctggtgagatcggggcaaaaggctcaaaagggtaccagggaaactctggagcgccaggcagcccaggtgtcaaaggggctaaaggagggcctgggccacgtggcccaaagggcgaaccaggtagaaggggtgatcctggcaccaaaggctcccccggtagcgatgggcctaaaggcgagaaaggagaccccggtcctgaggggcctcggggattggctggagaagtggggaataagggcgcaaagggtgatcggggtttgccaggccctcgtggtccccagggcgcactcggtgagcctggtaaacaggggtctcgtggcgaccctggcgacgccggacctcgaggggatagcggacagcctggacctaagggagatccagggagaccaggtttcagttatcctgggcctagaggtgcccctggcgagaagggagagcctgggccacgtggaccagagggaggacggggtgatttcgggctgaaaggcgagcctggccgtaagggcgagaagggcgaacccgcagatcccggacccccaggcgagcccggacctagaggtcctagaggggtccccggacccgaaggggaacccggaccccctggggatcccggacttacagagtgcgatgtgatgacttacgtgagggaaacttgcggatgctgcgattgcgagaagagatgtggtgcactcgacgtcgtttttgtgatcgattcgtccgagagtatcggctatacaaattttaccttggagaagaattttgtaattaatgtagttaaccgcttgggcgcaattgctaaggatcccaagtccgagacaggaactcgagttggagtggtgcagtacagtcacgagggcacttttgaggcgattcagctcgatgatgagcgaatcgattctctgtcctcatttaaggaggcagtcaagaatcttgagtggattgcaggtggcacctggacaccttctgcgttaaagtttgcttacgatcgcttgatcaaggagtctaggcgacagaagacccgcgtatttgctgtcgttataaccgacggaaggcacgaccccagggatgatgatcttaatctaagggcactctgcgatagggacgtgactgtgactgcgatcggaatcggagacatgttccacgagaagcatgagtcagagaatctgtatagtatcgcgtgcgataaaccgcagcaggttcggaatatgaccctgttctctgatctggtcgccgaaaaatttatcgacgacatggaggatgtgctgtgtcctgatccccagattgtgtgccctgatttgccatgtcagaccgagctcagcgtcgcccagtgtacccagcgccctgtcgacattgtgtttcttcttgacgggtctgagaggcttggtgaacaaaactttcacaaggctaggcggtttgttgagcaggttgcccgaagactcaccctcgctcgtcgcgatgacgatccactcaacgcacgcgtcgctctcctgcaattcggcggtcctggagaacagcaggtggcgttccctctgtcccacaaccttactgccattcatgaagctctggagactacccagtatctgaatagttttagccacgttggggctggggtggttcatgccattaacgccatcgtgcggtctcctcgcggaggggcaaggcggcacgcagaactctcatttgttttcctgacagatggggtgaccggcaacgatagtctgcacgaatccgcccattctatgcgaaagcagaacgtggtgccaacagttcttgctctggggagtgacgtcgacatggacgtgctcacaacgctgtcactgggtgaccgtgcggctgtgttccatgaaaaagactacgattctcttgcacagcccggtttcttcgatagatttattagatggatctgttag

SEQ ID NO: 322740 - DNA, 3461 bp, Artificial Sequence
  derived and/or modified sequence
cggccgcggttccctccctgctgcttactcggcgcccgcgcctcgggccgtcgggagcggagcctcctcgggaccaggacttcagggccacaggtgctgccaagatgctccagggcacctgctccgtgctcctgctctggggaatcctgggggccatccaggcccagcagcaggaggtcatctcgccggacactaccgagagaaacaacaactgcccagagaagaccgactgccccatccacgtgtacttcgtgctggacacctcggagagcgtcaccatgcagtcccccacggacatcctgctcttccacatgaagcagttcgtgccgcagttcatcagccagctgcagaacgagttctacctggaccaggtggcgctgagctggcgctacggcggcctgcacttctctgaccaggtggaggtgttcagcccaccgggcagcgaccgggcctccttcatcaagaacctgcagggcatcagctccttccgccgcggcaccttcaccgactgcgcgctggccaacatgacggagcagatccggcaggaccgcagcaagggcaccgtccacttcgccgtggtcatcaccgacggccacgtcaccggcagcccctgcgggggcatcaagctgcaggccgagcgggcccgcgaggagggcatccggctcttcgccgtggcccccaaccagaacctgaaggagcagggcctgcgggacatcgccagcacgccgcacgagctctaccgcaacgactacgccaccatgctgcccgactccaccgagatcgaccaggacaccatcaaccgcatcatcaaggtcatgaaacacgaagcctacggagagtgctacaaggtgagctgcctggaaatccctgggccctctggccccaagggctaccgtggacagaagggtgccaagggcaacatgggtgagccgggagagcctggccagaagggaagacagggagacccgggcatcgaaggccccattggattcccaggacccaagggcgttcctggcttcaaaggagagaagggtgaatttggagccgacggtcgcaagggggcccctggcctggctggcaagaacgggaccgatggacagaagggcaagctggggcgcatcggacctcctggctgcaagggagaccctggaaaccggggccccgacggttacccgggggaagcagggagtccaggggagcgaggagaccaaggcggcaagggggaccctggccgcccaggacgcagagggcccccgggagaaatcggggccaagggaagcaaggggtatcaaggcaacagtggagccccaggaagtcctggtgtgaaaggagccaagggcgggcctgggccccgcggacccaaaggcgagccggggcgcaggggagaccccggcaccaagggcagcccaggcagcgatggccccaagggggagaagggggaccctggccctgaggggccccgcggcctggctggagaggttggcaacaaaggagccaagggagaccgaggcttgcctggacccagaggcccccagggagctcttggggagcccggaaagcagggatctcggggagaccccggtgatgcaggaccccgtggagactcaggacagccaggccccaagggagaccccggcaggcctggattcagctacccaggaccccgaggagcacccggagaaaaaggcgagcccggcccacgcggccccgagggaggccgaggcgactttggcttgaaaggagaacctgggaggaaaggagagaaaggagagcctgcggatcctggtccccctggtgagccaggccctcgggggccaagaggagtcccaggacccgagggtgagcccggcccccctggagaccccggtctcacggagtgtgacgtcatgacctacgtgagggagacctgcgggtgctgcgactgtgagaagcgctgtggcgccctggacgtggtcttcgtcatcgacagctccgagagcattgggtacaccaacttcacactggagaagaacttcgtcatcaacgtggtcaacaggctgggtgccatcgctaaggaccccaagtccgagacagggacgcgtgtgggcgtggtgcagtacagccacgagggcacctttgaggccatccagctggacgacgaacgtatcgactccctgtcgagcttcaaggaggctgtcaagaacctcgagtggattgcgggcggcacctggacaccctcagccctcaagtttgcctacgaccgcctcatcaaggagagccggcgccagaagacacgtgtgtttgcggtggtcatcacggacgggcgccacgaccctcgggacgatgacctcaacttgcgggcgctgtgcgaccgcgacgtcacagtgacggccatcggcatcggggacatgttccacgagaagcacgagagtgaaaacctctactccatcgcctgcgacaagccacagcaggtgcgcaacatgacgctgttctccgacctggtcgctgagaagttcatcgatgacatggaggacgtcctctgcccggaccctcagatcgtgtgcccagaccttccctgccaaacagagctgtccgtggcacagtgcacgcagcggcccgtggacatcgtcttcctgctggacggctccgagcggctgggtgagcagaacttccacaaggcccggcgcttcgtggagcaggtggcgcggcggctgacgctggcccggagggacgacgaccctctcaacgcacgcgtggcgctgctgcagtttggtggccccggcgagcagcaggtggccttcccgctgagccacaacctcacggccatccacgaggcgctggagaccacacaatacctgaactccttctcgcacgtgggcgcaggcgtggtgcacgccatcaatgccatcgtgcgcagcccgcgtggcggggcccggaggcacgcagagctgtccttcgtgttcctcacggacggcgtcacgggcaacgacagtctgcacgagtcggcgcactccatgcgcaagcagaacgtggtacccaccgtgctggccttgggcagcgacgtggacatggacgtgctcaccacgctcagcctgggtgaccgcgccgccgtgttccacgagaaggactatgacagcctggcgcaacccggcttcttcgaccgcttcatccgctggatctgctagcgccgccgcccgggccccgcagtcgagggtcgtgagcccaccccgtccatggtgctaagcgggcccgggtcccacacggccagcaccgctgctcactcggacgacgccctgggcctgcacctctccagctcctcccacggggtccccgtagccccggcccccgcccagccccaggtctccccaggccctccgcaggctgcccggcctccctccccctgcagccatcccaaggctcctgacctacctggcccctgagctctggagcaagccctgacccaataaaggctttgaacccat

SEQ ID NO: 322741 - DNA, 3060 bp, Artificial Sequence
  derived and/or modified sequence
atgctgcagggcacctgcagcgtgctgctgctgtggggcatcctgggcgccatccaggcccagcagcaggaggtgatcagccccgacaccaccgagagaaacaacaactgccccgagaagaccgactgccccatccacgtgtacttcgtgctggacaccagcgagagcgtgaccatgcagagccccaccgacatcctgctgttccacatgaagcagttcgtgccccagttcatcagccagctgcagaacgagttctacctggaccaggtggccctgagctggagatacggcggcctgcacttcagcgaccaggtggaggtgttcagcccccccggcagcgacagagccagcttcatcaagaacctgcagggcatcagcagcttcagaagaggcaccttcaccgactgcgccctggccaacatgaccgagcagatcagacaggacagaagcaagggcaccgtgcacttcgccgtggtgatcaccgacggccacgtgaccggcagcccctgcggcggcatcaagctgcaggccgagagagccagagaggagggcatcagactgttcgccgtggcccccaaccagaacctgaaggagcagggcctgagagacatcgccagcaccccccacgagctgtacagaaacgactacgccaccatgctgcccgacagcaccgagatcgaccaggacaccatcaacagaatcatcaaggtgatgaagcacgaggcctacggcgagtgctacaaggtgagctgcctggagatccccggccccagcggccccaagggctacagaggccagaagggcgccaagggcaacatgggcgagcccggcgagcccggccagaagggcagacagggcgaccccggcatcgagggccccatcggcttccccggccccaagggcgtgcccggcttcaagggcgagaagggcgagttcggcgccgacggcagaaagggcgcccccggcctggccggcaagaacggcaccgacggccagaagggcaagctgggcagaatcggcccccccggctgcaagggcgaccccggcaacagaggccccgacggctaccccggcgaggccggcagccccggcgagagaggcgaccagggcggcaagggcgaccccggcagacccggcagaagaggcccccccggcgagatcggcgccaagggcagcaagggctaccagggcaacagcggcgcccccggcagccccggcgtgaagggcgccaagggcggccccggccccagaggccccaagggcgagcccggcagaagaggcgaccccggcaccaagggcagccccggcagcgacggccccaagggcgagaagggcgaccccggccccgagggccccagaggcctggccggcgaggtgggcaacaagggcgccaagggcgacagaggcctgcccggccccagaggcccccagggcgccctgggcgagcccggcaagcagggcagcagaggcgaccccggcgacgccggccccagaggcgacagcggccagcccggccccaagggcgaccccggcagacccggcttcagctaccccggccccagaggcgcccccggcgagaagggcgagcccggccccagaggccccgagggcggcagaggcgacttcggcctgaagggcgagcccggcagaaagggcgagaagggcgagcccgccgaccccggcccccccggcgagcccggccccagaggccccagaggcgtgcccggccccgagggcgagcccggcccccccggcgaccccggcctgaccgagtgcgacgtgatgacctacgtgagagagacctgcggctgctgcgactgcgagaagagatgcggcgccctggacgtggtgttcgtgatcgacagcagcgagagcatcggctacaccaacttcaccctggagaagaacttcgtgatcaacgtggtgaacagactgggcgccatcgccaaggaccccaagagcgagaccggcaccagagtgggcgtggtgcagtacagccacgagggcaccttcgaggccatccagctggacgacgagagaatcgacagcctgagcagcttcaaggaggccgtgaagaacctggagtggatcgccggcggcacctggacccccagcgccctgaagttcgcctacgacagactgatcaaggagagcagaagacagaagaccagagtgttcgccgtggtgatcaccgacggcagacacgaccccagagacgacgacctgaacctgagagccctgtgcgacagagacgtgaccgtgaccgccatcggcatcggcgacatgttccacgagaagcacgagagcgagaacctgtacagcatcgcctgcgacaagccccagcaggtgagaaacatgaccctgttcagcgacctggtggccgagaagttcatcgacgacatggaggacgtgctgtgccccgacccccagatcgtgtgccccgacctgccctgccagaccgagctgagcgtggcccagtgcacccagagacccgtggacatcgtgttcctgctggacggcagcgagagactgggcgagcagaacttccacaaggccagaagattcgtggagcaggtggccagaagactgaccctggccagaagagacgacgaccccctgaacgccagagtggccctgctgcagttcggcggccccggcgagcagcaggtggccttccccctgagccacaacctgaccgccatccacgaggccctggagaccacccagtacctgaacagcttcagccacgtgggcgccggcgtggtgcacgccatcaacgccatcgtgagaagccccagaggcggcgccagaagacacgccgagctgagcttcgtgttcctgaccgacggcgtgaccggcaacgacagcctgcacgagagcgcccacagcatgagaaagcagaacgtggtgcccaccgtgctggccctgggcagcgacgtggacatggacgtgctgaccaccctgagcctgggcgacagagccgccgtgttccacgagaaggactacgacagcctggcccagcccggcttcttcgacagattcatcagatggatctgctag

SEQ ID NO: 322742 - protein, 236 aa, Artificial Sequence
  derived and/or modified sequence
MAYFHELSSRVSFQEARLACESEGGVLLSLENEAEQKLIESMLQNLTKPGTGISDGDFWIGLWRNGDGQTSGACPDLYQWSDGSNSQYRNWYTDEPSCGSEKCVVMYHQPTANPGLGGPYLYQWNDDRCNMKHNYICKYEPEINPTAPVEKPYLTNQPGDTHQNVVVTEAVKEEQKLVQTSLHCGFQRVPEKKVAWKYNNSLTWFQNFVILDLYKEWHQNNSLEWLEITKDLQDEL

SEQ ID NO: 322743 - DNA, 2437 bp, Artificial Sequence
  derived and/or modified sequence
gctgctgctgtgatccaggaccagggcgcaccggctcagcctctcacttgtcagaggccggggaagagaagcaaagcgcaacggtgtggtccaagccggggcttctgcttcgcctctaggacatacacgggaccccctaacttcagtcccccaaacgcgcaccctcgaagtcttgaactccagccccgcacatccacgcgcggcacaggcgcggcaggcggcaggtcccggccgaaggcgatgcgcgcagggggtcgggcagctgggctcgggcggcgggagtagggcccggcagggaggcagggaggctgcagagtcagagtcgcgggctgcgccctgggcagaggccgccctcgctccacgcaacacctgctgctgccaccgcgccgcgatgagccgcgtggtctcgctgctgctgggcgccgcgctgctctgcggccacggagccttctgccgccgcgtggtcagcggccaaaaggtgtgttttgctgacttcaagcatccctgctacaaaatggcctacttccatgaactgtccagccgagtgagctttcaggaggcacgcctggcttgtgagagtgagggaggagtcctcctcagccttgagaatgaagcagaacagaagttaatagagagcatgttgcaaaacctgacaaaacccgggacagggatttctgatggtgatttctggatagggctttggaggaatggagatgggcaaacatctggtgcctgcccagatctctaccagtggtctgatggaagcaattcccagtaccgaaactggtacacagatgaaccttcctgcggaagtgaaaagtgtgttgtgatgtatcaccaaccaactgccaatcctggccttgggggtccctacctttaccagtggaatgatgacaggtgtaacatgaagcacaattatatttgcaagtatgaaccagagattaatccaacagcccctgtagaaaagccttatcttacaaatcaaccaggagacacccatcagaatgtggttgttactgaagcagtaaaggaagaacaaaaactagtccaaaccagtctacactgtggatttcaaagagtaccagaaaagaaagtggcatggaagtataataactcattgacttggttccagaattttgtaattctggatctgtataaggaatggcatcagaacaatagcttggaatggcttgaaatcacaaaggatctgcaagatgaactgtaagctcccccttgaggcaaatattaaagtaatttttatatgtctattatttcatttaaagaatatgctgtgctaataatggagtgagacatgcttattttgctaaaggatgcacccaaacttcaaacttcaagcaaatgaaatggacaatgcagataaagttgttatcaacacgtcgggagtatgtgtgttagaagcaattccttttatttctttcacctttcataagttgttatctagtcaatgtaatgtatattgtattgaaatttacagtgtgcaaaagtattttacctttgcataagtgtttgataaaaatgaactgttctaatatttatttttatggcatctcatttttcaatacatgctcttttgattaaagaaacttattactgttgtcaactgaattcacacacacacaaatatagtaccatagaaaaagtttgttttctcgaaataattcatctttcagcttctctgcttttggtcaatgtctaggaaatctcttcagaaataagaagctatttcattaagtgtgatataaacctcctcaaacattttacttagaggcaaggattgtctaatttcaattgtgcaagacatgtgccttataattatttttagcttaaaattaaacagattttgtaataatgtaactttgttaataggtgcataaacactaatgcagtcaatttgaacaaaagaagtgacatacacaatataaatcatatgtcttcacacgttgcctatataatgagaagcagctctctgagggttctgaaatcaatgtggtccctctcttgcccactaaacaaagatggttgttcggggtttgggattgacactggaggcagatagttgcaaagttagtctaaggtttccctagctgtatttagcctctgactatattagtatacaaagaggtcatgtggttgagaccaggtgaatagtcactatcagtgtggagacaagcacagcacacagacattttaggaaggaaaggaactacgaaatcgtgtgaaaatgggttggaacccatcagtgatcgcatattcattgatgagggtttgcttgagatagaaaatggtggctcctttctgtcttatctcctagtttcttcaatgcttacgccttgttcttctcaagagaaagttgtaactctctggtcttcatatgtccctgtgctccttttaaccaaataaagagttcttgtttctg

SEQ ID NO: 322744 - DNA, 2036 bp, Artificial Sequence
  derived and/or modified sequence
gcttgaagatggcagatcgtgggacttctcagcctccataattgagtgagccaattccctggccaaaaggtgtgttttgctgacttcaagcatccctgctacaaaatggcctacttccatgaactgtccagccgagtgagctttcaggaggcacgcctggcttgtgagagtgagggaggagtcctcctcagccttgagaatgaagcagaacagaagttaatagagagcatgttgcaaaacctgacaaaacccgggacagggatttctgatggtgatttctggatagggctttggaggaatggagatgggcaaacatctggtgcctgcccagatctctaccagtggtctgatggaagcaattcccagtaccgaaactggtacacagatgaaccttcctgcggaagtgaaaagtgtgttgtgatgtatcaccaaccaactgccaatcctggccttgggggtccctacctttaccagtggaatgatgacaggtgtaacatgaagcacaattatatttgcaagtatgaaccagagattaatccaacagcccctgtagaaaagccttatcttacaaatcaaccaggagacacccatcagaatgtggttgttactgaagcagtaaaggaagaacaaaaactagtccaaaccagtctacactgtggatttcaaagagtaccagaaaagaaagtggcatggaagtataataactcattgacttggttccagaattttgtaattctggatctgtataaggaatggcatcagaacaatagcttggaatggcttgaaatcacaaaggatctgcaagatgaactgtaagctcccccttgaggcaaatattaaagtaatttttatatgtctattatttcatttaaagaatatgctgtgctaataatggagtgagacatgcttattttgctaaaggatgcacccaaacttcaaacttcaagcaaatgaaatggacaatgcagataaagttgttatcaacacgtcgggagtatgtgtgttagaagcaattccttttatttctttcacctttcataagttgttatctagtcaatgtaatgtatattgtattgaaatttacagtgtgcaaaagtattttacctttgcataagtgtttgataaaaatgaactgttctaatatttatttttatggcatctcatttttcaatacatgctcttttgattaaagaaacttattactgttgtcaactgaattcacacacacacaaatatagtaccatagaaaaagtttgttttctcgaaataattcatctttcagcttctctgcttttggtcaatgtctaggaaatctcttcagaaataagaagctatttcattaagtgtgatataaacctcctcaaacattttacttagaggcaaggattgtctaatttcaattgtgcaagacatgtgccttataattatttttagcttaaaattaaacagattttgtaataatgtaactttgttaataggtgcataaacactaatgcagtcaatttgaacaaaagaagtgacatacacaatataaatcatatgtcttcacacgttgcctatataatgagaagcagctctctgagggttctgaaatcaatgtggtccctctcttgcccactaaacaaagatggttgttcggggtttgggattgacactggaggcagatagttgcaaagttagtctaaggtttccctagctgtatttagcctctgactatattagtatacaaagaggtcatgtggttgagaccaggtgaatagtcactatcagtgtggagacaagcacagcacacagacattttaggaaggaaaggaactacgaaatcgtgtgaaaatgggttggaacccatcagtgatcgcatattcattgatgagggtttgcttgagatagaaaatggtggctcctttctgtcttatctcctagtttcttcaatgcttacgccttgttcttctcaagagaaagttgtaactctctggtcttcatatgtccctgtgctccttttaaccaaataaagagttcttgtttctgaagaatga

SEQ ID NO: 322745 - DNA, 2136 bp, Artificial Sequence
  derived and/or modified sequence
gcttgaagatggcagatcgtgggacttctcagcctccataattgagtgagccaattccctgaatacaacaagaagatgcccatctgtagaccaggaggtggtccctccccagaaactggatgggccagcacgttgattctgaacttctagcctccagaactgccaaaaggtgtgttttgctgacttcaagcatccctgctacaaaatggcctacttccatgaactgtccagccgagtgagctttcaggaggcacgcctggcttgtgagagtgagggaggagtcctcctcagccttgagaatgaagcagaacagaagttaatagagagcatgttgcaaaacctgacaaaacccgggacagggatttctgatggtgatttctggatagggctttggaggaatggagatgggcaaacatctggtgcctgcccagatctctaccagtggtctgatggaagcaattcccagtaccgaaactggtacacagatgaaccttcctgcggaagtgaaaagtgtgttgtgatgtatcaccaaccaactgccaatcctggccttgggggtccctacctttaccagtggaatgatgacaggtgtaacatgaagcacaattatatttgcaagtatgaaccagagattaatccaacagcccctgtagaaaagccttatcttacaaatcaaccaggagacacccatcagaatgtggttgttactgaagcagtaaaggaagaacaaaaactagtccaaaccagtctacactgtggatttcaaagagtaccagaaaagaaagtggcatggaagtataataactcattgacttggttccagaattttgtaattctggatctgtataaggaatggcatcagaacaatagcttggaatggcttgaaatcacaaaggatctgcaagatgaactgtaagctcccccttgaggcaaatattaaagtaatttttatatgtctattatttcatttaaagaatatgctgtgctaataatggagtgagacatgcttattttgctaaaggatgcacccaaacttcaaacttcaagcaaatgaaatggacaatgcagataaagttgttatcaacacgtcgggagtatgtgtgttagaagcaattccttttatttctttcacctttcataagttgttatctagtcaatgtaatgtatattgtattgaaatttacagtgtgcaaaagtattttacctttgcataagtgtttgataaaaatgaactgttctaatatttatttttatggcatctcatttttcaatacatgctcttttgattaaagaaacttattactgttgtcaactgaattcacacacacacaaatatagtaccatagaaaaagtttgttttctcgaaataattcatctttcagcttctctgcttttggtcaatgtctaggaaatctcttcagaaataagaagctatttcattaagtgtgatataaacctcctcaaacattttacttagaggcaaggattgtctaatttcaattgtgcaagacatgtgccttataattatttttagcttaaaattaaacagattttgtaataatgtaactttgttaataggtgcataaacactaatgcagtcaatttgaacaaaagaagtgacatacacaatataaatcatatgtcttcacacgttgcctatataatgagaagcagctctctgagggttctgaaatcaatgtggtccctctcttgcccactaaacaaagatggttgttcggggtttgggattgacactggaggcagatagttgcaaagttagtctaaggtttccctagctgtatttagcctctgactatattagtatacaaagaggtcatgtggttgagaccaggtgaatagtcactatcagtgtggagacaagcacagcacacagacattttaggaaggaaaggaactacgaaatcgtgtgaaaatgggttggaacccatcagtgatcgcatattcattgatgagggtttgcttgagatagaaaatggtggctcctttctgtcttatctcctagtttcttcaatgcttacgccttgttcttctcaagagaaagttgtaactctctggtcttcatatgtccctgtgctccttttaaccaaataaagagttcttgtttctgaagaatga

SEQ ID NO: 322746 - DNA, 1139 bp, Artificial Sequence
  derived and/or modified sequence
gttcttcagaagctgttcgatggcaacgtggcggacatggagctgtgaggccaaagaatctttttcttgcacttggacatcaggaccccaggttctctggtcttgggactctgagacttgcaccaggaatcctgcccaggctctcaggcctttggactcagactgagctacttcactggctttcctggttctccagcttgaagatggcagatcgtgggacttctcagcctccataattgagtgagccaattccctgtgccttctattggccaaacccaacagaagccagagaagaaaggtgaccattgatgtggttcacaaatgtctatctgctgggacacagagaagagtaaagagtagatctacaggaggagaatacaacaagaagatgcccatctgtagaccaggaggtggtccctccccagaaactggatgggccagcacgttgattctgaacttctagcctccagaacttcatctagaatctggaaccttcctgttttggggggaatctcagggaggctccacttcccacaaagagacaaaggaggtaggcattcctgtctcaatgccctagcagctagggctcagacagacacaaggtggcgttatccacactcaaaaggatggcctatggagaaagagagatagtgttggagtcttaactgaccgtgattggctttggggacttggacagccctgcaaaaactgacttctgggattatgaggaaggtggaactggctcctgaatgagatcctatttgtcactgttcgatctggagcgcaaatgaatgaagcctgctgtgacttaggctgaagccactgtatggagttgcccatgtgaagagccactgagtgcagatcagtggctggaatttaggctgtccttccttgagacgtattgatgggcgcatgaagcagatgctcactgggaattgcagacatttgaaagtgaatggccaaaaggtgtgttttgctgacttcaagcatccctgctacaaaatggcctacttccatgaactgtccagccgagtgagctttcaggaggcacgcctggcttgtgagagtgagggaggagtcctcctcagccttgagaatgaagcagaacagaagttaatagagagcatgttgcaaaacct

SEQ ID NO: 322747 - DNA, 437 bp, Artificial Sequence
  derived and/or modified sequence
gttcttcagaagctgttcgatggcaacgtggcggacatggagctgtgaggccaaagaatctttttcttgcacttggacatcaggaccccaggttctctggtcttgggactctgagacttgcaccaggaatcctgcccaggctctcaggcctttggactcagactgagctacttcactggctttcctggttctccagcttgaagatggcagatcgtgggacttctcagcctccataattgagtgagccaattccctggccaaaaggtgtgttttgctgacttcaagcatccctgctacaaaatggcctacttccatgaactgtccagccgagtgagctttcaggaggcacgcctggcttgtgagagtgagggaggagtcctcctcagccttgagaatgaagcagaacagaagttaatagagagcatgttgcaaaacct

SEQ ID NO: 322748 - protein, 252 aa, Artificial Sequence
  derived and/or modified sequence
MALLLCFVLLCGVVDFARSLSITTPEEMIEKAKGETAYLPCKFTLSPEDQGPLDIEWLISPADNQKVDQVIILYSGDKIYDDYYPDLKGRVHFTSNDLKSGDASINVTNLQLSDIGTYQCKVKKAPGVANKKIHLVVLVKPSGARCYVDGSEEIGSDFKIKCEPKEGSLPLQYEWQKLSDSQKMPTSWLAGKMCHLQRAVRPLPEATSAVIIHPWGPCLLPTWKDIPRLSITKYQVKTLNALLRVRLSHLLR

SEQ ID NO: 322749 - DNA, 759 bp, Artificial Sequence
  derived and/or modified sequence
atggccctacttttatgtttcgtcctgctttgtggggttgttgactttgctcgctccctctccattaccactccggaggagatgatagagaaggcgaagggtgagacagcctacctgccctgtaaattcaccctttctccagaagatcaaggtcctctggacatcgaatggttgataagtcccgccgacaaccagaaggtggatcaagtgataatcctgtacagtggggacaagatttacgatgattactatcccgatttgaaagggagagttcactttacctcaaatgaccttaagtctggtgatgcttctattaatgtcactaatctgcagctctcggatatcggcacctaccaatgcaaggtaaagaaggcgcccggggtagcaaataaaaaaatccacctcgtggtcctggtcaaaccctctggcgctaggtgctatgtcgatggctcagaagagatcggctccgatttcaaaattaagtgtgagcctaaggaagggagtctccctctccagtatgagtggcaaaagctttcagacagccaaaagatgccaacctcttggctggccggcaaaatgtgccacctccagcgagcagtgcggcctttgccagaagcaacctctgccgtgatcatccatccttggggcccttgtctcttgcctacctggaaagatatcccacgcttgagtattactaagtaccaggtgaagacactcaacgccctgctgagagtccgactgagccatcttcttcgctag

SEQ ID NO: 322750 - DNA, 759 bp, Artificial Sequence
  derived and/or modified sequence
atggccctgctgctgtgctttgtgctgctgtgtggggtggtggactttgcccggagcctgagcatcaccaccccagaggagatgattgagaaggccaagggggagacagcctacctgccctgcaagttcaccctgagccctgaggaccagggccccctggacatcgagtggctgatcagccctgctgacaaccagaaggtggaccaggtgatcatcctgtacagcggggacaagatctatgatgactactacccagacctgaagggccgggtgcacttcaccagcaatgacctgaagtctggagatgccagcatcaacgtgaccaacctgcagctgagtgacatcggcacctaccagtgcaaggtgaagaaggcccctggggtggccaacaagaagatccacctggtggtgctggtgaagcccagcggggcccgctgctacgtggatggcagcgaggagatcggcagtgacttcaagatcaagtgtgagcccaaggagggcagcctgcccctgcagtatgagtggcagaagctgagtgacagccagaagatgcccacctcctggctggccggcaagatgtgccacctgcagagagctgtgcggcccctgcctgaggccaccagcgctgtgatcatccacccctggggcccctgcctgctgcccacctggaaggacatcccccggctgagcatcaccaagtaccaggtgaagaccctgaatgccctgctgcgggtgcggctgagccacctgctgaggtag

SEQ ID NO: 322751 - DNA, 759 bp, Artificial Sequence
  derived and/or modified sequence
atggccctgctgctgtgcttcgtgctgctgtgcggcgtggtggactttgccaggagcctgtctatcactaccccagaagagatgatcgaaaaagccaagggagaaactgcctacctcccatgtaaattcactttgtcacccgaagaccagggccctctggatatcgagtggctcatctccccagcggacaaccagaaagtagatcaggtgataatcctgtactcaggtgataagatttatgacgattactaccctgacctgaagggacgcgttcactttacttcaaatgatttaaagtctggcgatgcctccattaatgtgaccaatctccagctgagtgacattggcacataccagtgtaaggtgaaaaaggcccctggggtggccaataagaaaatccatctggtggttttagtaaagcccagcggcgcgagatgctatgtggatggctctgaggaaattggctccgactttaaaataaagtgcgagcccaaggaagggtcattacctctacagtacgaatggcagaagctctccgactcacaaaagatgcctacctcatggttagcgggcaagatgtgtcacctgcagcgggcagtccgccctttgcccgaagcaacatctgcggttatcatccacccgtggggcccttgtctgctgcctacctggaaggatattcctcggctttctatcaccaaataccaggttaaaaccctaaacgcgttacttcgcgttcgcctgagccaccttctccggtag

SEQ ID NO: 322752 - DNA, 759 bp, Artificial Sequence
  derived and/or modified sequence
atggctcttctgctctgcttcgtccttttatgcggagttgttgattttgcaagatctcttagtattactacacctgaagaaatgatcgaaaaggcaaagggggagacagcttaccttccgtgtaaattcacactgagtccagaagatcagggaccactggatattgagtggctgatttcccccgctgacaatcagaaagtggatcaggttatcatcttgtactcaggggacaagatctatgatgattactaccccgatttgaaggggcgagttcacttcacgagtaacgacctgaagagtggggacgcctccatcaacgtgactaatctccagctgagtgacataggcacatatcagtgcaaggtcaagaaggcacccggtgtagcaaataagaagatccacttggtagtgcttgtaaagccatccggagcgcgatgctacgtagacggttccgaagaaataggcagcgactttaaaatcaagtgcgagcctaaagagggctccctcccgctgcagtatgagtggcagaagttgtcagactcccagaagatgccaacttcttggctggctggcaagatgtgtcaccttcagagagccgtgcgacccctgcccgaggccacctccgctgtgatcatacatccctggggtccgtgcttgttacctacatggaaggacataccccgtctgtccattaccaaataccaggtgaaaaccctgaatgctctcctgagggtgcggttgtctcacctgttgaggtag

SEQ ID NO: 322753 - DNA, 1080 bp, Artificial Sequence
  derived and/or modified sequence
cgggagcgcgcgaggcgcggggagcctgggaccaggagcgagagccgcctacctgcagccgccgcccacggcacggcagccaccatggcgctcctgctgtgcttcgtgctcctgtgcggagtagtggatttcgccagaagtttgagtatcactactcctgaagagatgattgaaaaagccaaaggggaaactgcctatctgccatgcaaatttacgcttagtcccgaagaccagggaccgctggacatcgagtggctgatatcaccagctgataatcagaaggtggatcaagtgattattttatattctggagacaaaatttatgatgactactatccagatctgaaaggccgagtacattttacgagtaatgatctcaaatctggtgatgcatcaataaatgtaacgaatttacaactgtcagatattggcacatatcagtgcaaagtgaaaaaagctcctggtgttgcaaataagaagattcatctggtagttcttgttaagccttcaggtgcgagatgttacgttgatggatctgaagaaattggaagtgactttaagataaaatgtgaaccaaaagaaggttcacttccattacagtatgagtggcaaaaattgtctgactcacagaaaatgcccacttcatggttagcagggaagatgtgccacctccaaagagccgtacgtccactgccagaagctacatcggcagtaatcattcatccctggggtccatgtctccttccaacatggaaggatattccaagactcagtataaccaagtaccaagtgaagactttgaacgcactcctcagagtccgactctcccacctgctaaggtagctgcccctaatctaagtcgaatgggtgcgattcctgtgatgattccagcacagagcaaggatgggtctatagtatagagcctccatatgtctcatctgtgctctccgtgttcctttcctttttttgatatatgaaaacctattctggtctaaattgtgttactagcctcaaaatacatcaaaaaataagttaatcaggaactgtacggaatatatttttaaaaatttttgtttggtt

SEQ ID NO: 322754 - DNA, 759 bp, Artificial Sequence
  derived and/or modified sequence
atggccctgctgctgtgcttcgtgctgctgtgcggcgtggtggacttcgccagaagcctgagcatcaccacccccgaggagatgatcgagaaggccaagggcgagaccgcctacctgccctgcaagttcaccctgagccccgaggaccagggccccctggacatcgagtggctgatcagccccgccgacaaccagaaggtggaccaggtgatcatcctgtacagcggcgacaagatctacgacgactactaccccgacctgaagggcagagtgcacttcaccagcaacgacctgaagagcggcgacgccagcatcaacgtgaccaacctgcagctgagcgacatcggcacctaccagtgcaaggtgaagaaggcccccggcgtggccaacaagaagatccacctggtggtgctggtgaagcccagcggcgccagatgctacgtggacggcagcgaggagatcggcagcgacttcaagatcaagtgcgagcccaaggagggcagcctgcccctgcagtacgagtggcagaagctgagcgacagccagaagatgcccaccagctggctggccggcaagatgtgccacctgcagagagccgtgagacccctgcccgaggccaccagcgccgtgatcatccacccctggggcccctgcctgctgcccacctggaaggacatccccagactgagcatcaccaagtaccaggtgaagaccctgaacgccctgctgagagtgagactgagccacctgctgagatag

SEQ ID NO: 322755 - protein, 535 aa, Artificial Sequence
  derived and/or modified sequence
MFRNHLCLVFEMLSYNLYDLLRNTNFRGVSLNLTRKFAQQMCTALLFLATPELSIIHCDLKPENILLCNPKRSAIKIVDFGSSCQLGQRIYQYIQSRFYRSPEVLLGMPYDLAIDMWSLGCILVEMHTGEPLFSGANEVDQMNKIVEVLGIPPAHILDQAPKARKFFEKLPDGTWNLKKTKDGKREYKPPGTRKLHNILGVETGGPGGRRAGESGHTVADYLKFKDLILRMLDYDPKTRIQPYYALQHSFFKKTADEGTNTSNSVSTSPAMEQSQSSGTTSSTSSSSGGSSGTSNSGRARSDPTHQHRHSGGHFTAAVQAMDCETHSPQVRQQFPAPLGWSGTEAPTQVTVETHPVQETTFHVAPQQNALHHHHGNSSHHHHHHHHHHHHHGQQALGNRTRPRVYNSPTNSSSTQDSMEVGHSHHSMTSLSSSTTSSSTSSSSTGNQGNQAYQNRPVAANTLDFGQNGAMDVNLTVYSNPRQETGIAGHPTYQFSANTGPAHYMTEGHLTMRQGADREESPMTGVCVQQSPVASS

SEQ ID NO: 322756 - DNA, 516 bp, Artificial Sequence
  derived and/or modified sequence
atggccagcaccatcaaggaggccctgagcgtggtgagcgaggaccagagcctgttcgagtgcgcctacggcaccccccacctggccaagaccgagatgaccgccagcagcagcagcgactacggccagaccagcaagatgagccccagagtgccccagcaggactggctgagccagccccccgccagagtgaccatcaagatggagtgcaaccccagccaggtgaacggcagcagaaacagccccgacgagtgcagcgtggccaagggcggcaagatggtgggcagccccgacaccgtgggcatgaactacggcagctacatggaggagaagcacatgcccccccccaacatgaccaccaacgagagaagagtgatcgtgcccgccgacctgccctacgagccccccagaagaagcgcctggaccggccacggccaccccaccccccagagcaagggcaccgtgctggcccccatgaccctgagcttcatgagccaggccgtggacgactgctag

SEQ ID NO: 322757 - DNA, 516 bp, Artificial Sequence
  derived and/or modified sequence
atggcgtctacaatcaaagaagccctgtccgtggtaagcgaagatcagtctctctttgagtgcgcctacgggaccccgcacctagcaaaaactgagatgactgctagctcgtccagcgactacggacagacaagcaagatgagcccccgtgtgcctcagcaggactggttgagccagccccctgcgcgggtgactatcaaaatggaatgcaatccatctcaggtaaacggcagtcgcaattcaccggacgagtgttcagtcgccaagggtggcaagatggtgggatctcccgacacagtgggcatgaattatggatcctacatggaggagaagcacatgcccccaccgaacatgaccacaaacgaaaggagggtgattgtccctgctgatctgccctatgaacctcctaggaggtctgcttggacaggccatggccaccccactccccagagcaaggggacggtcttggctcctatgacgttgtcgtttatgtctcaggctgtggacgattgttag

SEQ ID NO: 322758 - DNA, 516 bp, Artificial Sequence
  derived and/or modified sequence
atggccagcaccatcaaggaggccctgtctgtggtgtctgaggaccagagcctgtttgaatgtgcctacggcaccccccacctggccaagacagagatgacagccagcagcagcagtgactatggccagaccagcaagatgagcccccgggtgccccagcaggactggctgagccagcccccagcccgggtgaccatcaagatggagtgcaaccccagccaggtgaatggcagcaggaacagcccagatgagtgcagcgtggccaagggcggcaagatggtgggcagcccagacacagtgggcatgaactacggcagctacatggaggagaagcacatgcccccacccaacatgaccaccaatgaaagaagagtcatcgtgcctgctgacctgccctatgagcccccaagaagaagtgcctggacaggccacggccaccccaccccccagagcaagggcaccgtgctggcccccatgaccctgtccttcatgagccaggccgtggatgactgctag

SEQ ID NO: 322759 - DNA, 516 bp, Artificial Sequence
  derived and/or modified sequence
atggccagcaccatcaaggaggccctgagcgtggtgagcgaggaccaatctctgttcgaatgcgcctacggaacccctcatctggctaaaacggagatgactgcgtcttcatcctcggactacggacaaacatcaaaaatgagccctcgagtccctcagcaggactggctttcccagccaccagccagagttacaatcaagatggagtgcaacccctcccaagtaaacggctcccgcaactcaccagatgaatgtagcgtagccaagggcggtaagatggtgggctccccagacaccgtgggcatgaactatggttcctatatggaagaaaagcatatgcctcctcccaatatgactactaatgagcggcgagtcatcgtgcccgccgatctcccatatgaacctccccgtaggtccgcatggactggtcacggccaccccaccccccaatctaagggcactgtgctggcaccgatgaccctctcttttatgtcccaagctgtagacgactgctag

SEQ ID NO: 322760 - DNA, 516 bp, Artificial Sequence
  derived and/or modified sequence
atggcatctaccattaaggaggcactaagtgttgtctccgaagaccagagtttgtttgagtgcgcctacggcaccccccacttggctaaaacagagatgaccgcttctagttctagcgactatggccagacctccaagatgagtcctcgggtgccacagcaggactggctttctcagcctcccgcaagagtcacaatcaagatggagtgtaatccaagtcaagttaatgggtcccgtaactcccctgacgaatgctctgtagccaaaggaggcaagatggtggggtcaccagataccgtggggatgaactatggatcctacatggaagagaagcatatgccccctcctaatatgacgactaacgaaaggagagttatagtaccagccgatttgccctacgaaccccctcgaagatcagcctggaccggccacgggcaccctacaccgcagtcgaagggaacggtgctcgctccgatgaccctgtcatttatgagtcaggctgtcgacgactgctag

SEQ ID NO: 322761 - DNA, 924 bp, Artificial Sequence
  derived and/or modified sequence
attattaacatttattaacgatcaataaacttgatcgcattatggccagcactattaaggaagccttatcagttgtgagtgaggaccagtcgttgtttgagtgtgcctacggaacgccacacctggctaagacagagatgaccgcgtcctcctccagcgactatggacagacttccaagatgagcccacgcgtccctcagcaggattggctgtctcaacccccagccagggtcaccatcaaaatggaatgtaaccctagccaggtgaatggctcaaggaactctcctgatgaatgcagtgtggccaaaggcgggaagatggtgggcagcccagacaccgttgggatgaactacggcagctacatggaggagaagcacatgccacccccaaacatgaccacgaacgagcgcagagttatcgtgccagcagatttaccatatgagccccccaggagatcagcctggaccggtcacggccaccccacgccccagtcgaaaggtacagtgttggctcccatgaccctgagtttcatgtcacaggcagtggatgactgttgatggagtatataataatttctgtggttaatctgtgattttgcaacatgtgatgggtttgttccattgacgacaagagtacaattgatctttcactgcagtgattctttctccatttgggtcatcaggactttcataacaaaaataaaggaatgatgtagtgtatgtcaaccttcacaaatgcatgtttcatgggatgtttgagtacacattaaataatcggtgttttcctgaatcttggccatgcttaaaagtatccctggctttactttatttgactggtggtttccctttatgtgtttatcttagactatgatttattgtaatctgtttggtaagccattccaaattcttttttttttttactttt

SEQ ID NO: 322762 - protein, 1572 aa, Artificial Sequence
  derived and/or modified sequence
MADRGCPLEAAPLPAEVRESLAELELELSEGDITQKGYEKKRAKLLARYIPLIQGIDPSLQAENRIPGPSQTTAAAPKQQKSRPTASRDERFRSDVHTEAVQAALAKYKERKMPMPSKRRSVLVHSSVETYTPPDTSSASEDEGSLRRPGRLTSTPLQSHSSVEPWLDRVIQGSSTSSSASSTSSHPGGRPTTAPSAAATPGAAATTALAGLEAHTHIADLHSAPPDVTTGLVEHSYFERPQVASVRSVPRGCSGSMLETADGVPVNSRVSSKIQQLLNTLKRPKRPPLKEFFVDDFEELLEVQQPDPNQPKPEGSETSVLRGEPLTAGVPRPPSLLATLQRWGTTQPKSPCLTALDTTGKAVYTLTYGKLWSRSLKLAYTLLNKLTSKNEPLLKPGDRVALVFPNSDPVMFMVAFYGCLLAELVPVPIEVPLTRKDAGSQQVGFLLGSCGVFLALTTDACQKGLPKAQTGEVAAFKGWPPLSWLVIDGKHLAKPPKDWHPLAQDTGTGTAYIEYKTSKEGSTVGVTVSHASLLAQCRALTQACGYSEAETLTNVLDFKRDAGLWHGVLTSVMNRMHVVSVPYALMKANPLSWIQKVCFYKARAALVKSRDMHWSLLAQRGQRDVSLSSLRMLIVADGANPWSISSCDAFLNVFQSRGLRPEVICPCASSPEALTVAIRRPPDLGGPPPRKAVLSMNGLSYGVIRVDTEEKLSVLTVQDVGQVMPGANVCVVKLEGTPYLCKTDEVGEICVSSSATGTAYYGLLGITKNVFEAVPVTTGGAPIFDRPFTRTGLLGFIGPDNLVFIVGKLDGLMVTGVRRHNADDVVATALAVEPMKFVYRGRIAVFSVTVLHDDRIVLVAEQRPDASEEDSFQWMSRVLQAIDSIHQVGVYCLALVPANTLPKAPLGGIHISETKQRFLEGTLHPCNVLMCPHTCVTNLPKPRQKQPEVGPASMIVGNLVAGKRIAQASGRELAHLEDSDQARKFLFLADVLQWRAHTTPDHPLFLLLNAKGTVTSTATCVQLHKRAERVAAALMEKGRLSVGDHVALVYPPGVDLIAAFYGCLYCGCVPVTVRPPHPQNLGTTLPTVKMIVEVSKSACVLTTQAVTRLLRSKEAAAAVDIRTWPTILDTDDIPKKKIASVFRPPSPDVLAYLDFSVSTTGILAGVKMSHAATSALCRSIKLQCELYPSRQIAICLDPYCGLGFALWCLCSVYSGHQSVLVPPLELESNVSLWLSAVSQYKARVTFCSYSVMEMCTKGLGAQTGVLRMKGVNLSCVRTCMVVAEERPRIALTQSFSKLFKDLGLPARAVSTTFGCRVNVAICLQGTAGPDPTTVYVDMRALRHDRVRLVERGSPHSLPLMESGKILPGVKVIIAHTETKGPLGDSHLGEIWVSSPHNATGYYTVYGEEALHADHFSARLSFGDTQTIWARTGYLGFLRRTELTDASGGRHDALYVVGSLDETLELRGMRYHPIDIETSVIRAHRSIAECAVFTWTNLLVVVVELDGLEQDALDLVALVTNVVLEEHYLVVGVVVIVDPGVIPINSRGEKQRMHLRDGFLADQLDPIYVAYNM

SEQ ID NO: 322763 - protein, 1110 aa, Artificial Sequence
  derived and/or modified sequence
MADRGCPLEAAPLPAEVRESLAELELELSEDVHTEAVQAALAKYKERKMPMPSKRRSVLVHSSVETYTPPDTSSASEDEGSLRRPGRLTSTPLQSHSSVEPWLDRVIQGSSTSSSASSTSSHPGGRPTTAPSAAATPGAAATTALAGLEAHTHIDLHSAPPDVTTGLVEHSYFERPQVASVRSVPRGCSGSMLETADGVPVNSRVSSKIQQLLNTLKRPKRPPLKEFFVDDFEELLEVQQPDPNQPKPEGSETSVLRGEPLTAGVPRPPSLLATLQRWGTTQPKSPCLTALDTTGKAVYTLTYGKLWSRSLKLAYTLLNKLTSKNEPLLKPGDRVALVFPNSDPVMFMVAFYGCLLAELVPVPIEVPLTRKDAGSQQVGFLLGSCGVFLALTTDACQKGLPKAQTGEVAAFKGWPPLSWLVIDGKHLAKPPKDWHPLAQDTGTGTAYIEYKTSKEGSTVGVTVSHASLLAQCRALTQACGYSEAETLTNVLDFKRDAGLWHGVLTSVMNRMHVVSVPYALMKANPLSWIQKVCFYKARAALVKSRDMHWSLLAQRGQRDVSLSSLRMLIVADGANPWSISSCDAFLNVFQSRGLRPEVICPCASSPEALTVAIRRPPDLGGPPPRKAVLSMNGLSYGVIRVDTEEKLSVLTVQDVGQVMPGANVCVVKLEGTPYLCKTDEVGEICVSSSATGTAYYGLLGITKNVFEAVPVTTGGAPIFDRPFTRTGLLGFIGPDNLVFIVGKLDGLMVTGVRRHNADDVVATALAVEPMKFVYRGRIAVFSVTVLHDDRIVLVAEQRPDASEEDSFQWMSRVLQAIDSIHQVGVYCLALVPANTLPKAPLGGIHISETKQRFLEGTLHPCNVLMCPHTCVTNLPKPRQKQPEVGPASMIVGNLVAGKRIAQASGRELAHLEDSDQARKFLFLADVLQWRAHTTPDHPLFLLLNAKGTVTSTATCVQLHKRAERVAAALMEKGRLSVGDHVALVYPPGVDLIAAFYGCLYCGCVPVTVRPPHPQNLGTTLPTVKMIVEVSKSACVLTTQAVTRLLRSKEAAAAVDIRTWPTILDTDDIPKKKIASVFRPPSPDVLAYLDFSVSTTGILAGVKAGRGGSRL

SEQ ID NO: 322764 - DNA, 3333 bp, Artificial Sequence
  derived and/or modified sequence
atggcagataggggatgcccgctggaggcggcgccgttacccgccgaggtgcgggaatcccttgctgagcttgaactggagctttccgaggacgtgcacaccgaagctgtccaagcggcactggctaagtacaaggaaaggaagatgcccatgccgtccaagagacgcagcgttctggtacatagctctgtggagacctacaccccccccgacacatcttccgcatctgaggatgaaggttccttaaggcgacccggaagacttacctccacaccgctccagtcacattccagcgtggaaccatggctcgatcgagtcattcagggctccagcactagtagctccgctagctccacctcaagccacccaggcggccgaccaacaactgccccctccgccgctgccactcctggggctgctgcgactaccgcgctggctggtctggaggctcacacacacatcgatctgcattctgcccctccagatgtgaccactggactggtcgaacacagttactttgagcggccccaagtcgcatcagtaaggagcgtacctcggggctgctccggctccatgctggagaccgctgacggcgtgcccgttaactcccgcgttagttccaaaatccagcagttactcaatactctgaaacgtcccaaaagaccccctctgaaagagttcttcgtggatgacttcgaggagctgcttgaggttcaacaacccgaccccaatcagcctaaaccagagggcagcgagacatcagtgctccggggcgagcccttgacggcgggggtcccgagacccccttccctgctggccaccctccaacgttggggtacgacacagcctaaatccccctgtctaactgctctggacactactggaaaggcagtgtataccttgacctacggtaagctatggtcccgcagccttaagctagcttacactctcctgaacaagctgacatccaaaaatgaaccactgttaaagcctggcgaccgagtggccctcgtgttcccgaattccgacccggttatgttcatggtagccttttacggatgtctactggcagaactggtgccggttcctatagaggtgcctcttacaagaaaagacgcaggttctcaacaggttggctttttactggggagctgcggcgtttttcttgccctgacaaccgacgcttgtcagaaaggactgccaaaagcccagactggcgaagtcgcagcatttaagggctggccacccctgagctggcttgttatagatggaaaacatctggctaagccccccaaggattggcatcccttggcacaggatacaggcaccgggacagcatatattgaatataagactagcaaggaaggatcaactgtgggggttaccgtctcacatgcctctctactggcccagtgccgtgcactgacccaagcttgcgggtacagcgaggcagagacactcactaatgtcctggatttcaaacgggacgccggcctgtggcatggagtgttgaccagcgtgatgaatcggatgcatgtggtgagcgtgccctacgccttaatgaaggccaatcctctgtcctggatccaaaaggtatgcttttacaaggctcgagccgctcttgtgaaaagcagagacatgcactggagcctgctggcccaacggggtcaacgggatgtaagcctgtctagcttacggatgctgatcgtagcggatggggcaaatccatggtccatctcttcttgcgatgcctttttgaatgttttccagagtcgcggcttgcggccagaagtaatctgtccctgtgcttcctcacctgaagcattaaccgtggctattcgccgaccacccgatctcggcgggccacctcccagaaaagccgttctatcgatgaacggactcagctacggtgtcattagggtcgacaccgaagagaagctgagcgttctgacagtacaagatgtgggccaagtcatgcccggggcaaatgtttgtgtcgtgaaactagaaggcacaccatacctgtgtaagacagatgaggtgggcgagatttgtgtttcatcatccgccactggaaccgcgtattacgggctccttggtattacaaagaatgtgtttgaggccgttcctgtaaccactggcggtgctccgatcttcgatcgcccatttacgaggaccggcttgctcggcttcatcgggccagataatctagtgttcattgtgggaaaattagatggactgatggtcaccggcgtgcggaggcacaacgccgacgacgtggtagccacagcgttggcagtagaaccaatgaaatttgtgtaccgcggacgcatcgctgtgttttccgtgactgttcttcacgacgatagaatcgtcctggtggcagagcaacgtccagacgcgtcggaggaagacagctttcagtggatgtctcgtgtgttacaggctattgactccattcatcaggtcggcgtgtactgcctggccctggtgccggcaaatacccttcccaaagcgccgctcggaggaattcacatttccgaaaccaagcaaagatttcttgaagggacgctccatccgtgtaacgttttgatgtgtccgcacacctgcgtgacaaacctccctaagcctagacaaaagcagccagaagtgggaccagccagtatgattgtgggtaatctggtggcaggcaagcgcatcgcgcaggcaagtgggcgcgaactggctcatcttgaggattccgatcaggcccgtaagttcctctttttggcagacgtactccagtggagagcacacacgacgcctgatcaccccctcttcctcctgctgaacgctaagggaaccgtcaccagcacggccacatgcgtacagctccacaagcgggctgaacgagttgctgctgcactgatggagaagggaagactgagcgtgggcgatcatgtggccctagtgtacccgcccggggtggacctgattgcggcattttacgggtgtctctattgtggatgtgtcccggtaacagttcgcccgccacacccacagaacttgggaacaaccctcccaaccgtaaagatgattgtcgaggtaagcaagtcagcctgtgtgctgaccacacaggctgtgactcgcctgctacgtagcaaagaggcagcagctgcagtggacattcggacatggcccaccattctcgataccgatgatatacccaaaaagaagatagctagtgtgtttcgaccaccatcccccgacgtcctcgcatatctcgattttagtgtgtctacaactggaattctcgcgggtgtgaaagccgggcggggtggcagccgcctgtag

SEQ ID NO: 322765 - DNA, 3333 bp, Artificial Sequence
  derived and/or modified sequence
atggctgaccggggctgccccctggaggccgcccccctgcctgctgaggtgcgggagagcctggccgagctggagctggagctgtctgaagatgtgcacacagaggccgtgcaggccgccctggccaagtacaaggagaggaagatgcccatgcccagcaagagaagatctgtgctggtgcacagctctgtggagacctacaccccaccagacaccagcagcgcctctgaagatgagggcagcctgcggcggcccggccgcctgaccagcacccccctgcagagccacagctctgtggagccctggctggacagagtcatccagggcagcagcaccagcagcagcgccagcagcaccagcagccaccctgggggccggcccaccacagcccccagcgctgctgccaccccaggagctgctgccaccacagccctggccggcctggaggcccacacccacatcgacctgcacagcgcccccccagatgtgaccaccggcctggtggagcacagctactttgagcggccccaggtggcctctgtgcgctctgtgccccggggctgcagcggctccatgctggagacagcagatggagtgcctgtgaacagccgggtgagcagcaagatccagcagctgctgaacaccctgaagaggcccaagaggcctcccctgaaggagttctttgtggatgactttgaggagctgctggaggtgcagcagcctgaccccaaccagcccaagccagagggcagcgagacctctgtgctgcggggggagcccctgacagctggggtgccccggccccccagcctgctggccaccctgcagcgctggggcaccacccagcccaagagcccctgcctgacagccctggacaccaccgggaaggctgtgtacaccctgacctacggcaagctgtggagccgcagcctgaagctggcctacaccctgctgaacaagctgaccagcaagaatgagcccctgctgaagccaggggacagagtggccctggtgttccccaacagcgaccctgtgatgttcatggtggccttctacggctgcctgctggccgagctggtgcctgtgcccatcgaggtgcccctgaccaggaaggatgctggcagccagcaggtgggcttcctgctgggcagctgtggggtcttcctggccctgaccacagatgcctgccagaagggcctgcccaaggcccagacaggagaggtggccgccttcaagggctggccacccctgtcctggctggtgattgatggcaagcacctggccaagccacccaaggactggcaccccctggcccaggacacaggaactggaacagcctacatcgagtacaagaccagcaaggagggcagcacagtgggcgtgacagtgtcccatgccagcctgctggcccagtgccgggccctgacccaggcctgtggctacagcgaggccgagaccctgaccaacgtgctggacttcaagagagatgctggcctgtggcatggagtgctgacctctgtgatgaacaggatgcacgtggtgtctgtgccctatgccctgatgaaggccaaccccctgtcctggatccagaaggtgtgcttctacaaggcccgggccgccctggtgaagagccgggacatgcactggagcctgctggcccagaggggccagagagatgtgtccctgagcagcctgaggatgctgattgtggctgatggagccaacccctggagcatcagcagctgtgatgccttcctgaatgtgttccagagccggggcctgcggcctgaggtgatctgcccctgtgccagcagccctgaggccctgactgtggccatccggcggcccccagacctgggcggccccccacccaggaaggctgtgctgtccatgaatggcctgtcctatggagtcatccgggtggacacagaggagaagctgtctgtgctgactgtgcaggatgtgggccaggtgatgcctggggccaacgtgtgtgtggtgaagctggagggcaccccctacctgtgcaagacagatgaggtgggggagatctgtgtgagcagcagcgccactggaacagcctactacggcctgctgggcatcaccaagaatgtgtttgaggccgtgcctgtgaccactggaggagcccccatctttgaccggcccttcaccaggacaggcctgctgggcttcatcggccctgacaacctggtgttcatcgtgggcaagctggatggcctgatggtgactggagtgagaagacacaatgctgatgatgtggtggccacagccctggccgtggagcccatgaagtttgtgtaccggggcagaattgctgtgttttctgtgacagtgctgcatgatgacagaattgtgctggtggccgagcagaggccagatgccagcgaggaggacagcttccagtggatgagccgggtgctgcaggccatcgacagcatccaccaggtgggcgtgtactgcctggccctggtgcctgccaacaccctgcccaaggcccccctgggcggcatccacatcagcgagaccaagcagcgcttcctggagggcaccctgcacccctgcaatgtgctgatgtgcccccacacctgtgtgaccaacctgcccaagccccggcagaagcagcctgaggtgggccctgcctccatgattgtgggcaacctggtggccggcaagagaattgcccaggccagcggccgggagctggcccacctggaggacagcgaccaggccaggaagttcctgttcctggctgatgtgctgcagtggagggcccacaccaccccagaccaccccctcttcctgctgctgaatgccaagggcaccgtgaccagcacagccacctgtgtgcagctgcacaagagagctgagcgggtggccgccgccctgatggagaagggccgcctgtctgtgggggaccacgtggccctggtgtacccacctggggtggacctgattgctgccttctacggctgcctgtactgcggctgtgtgcctgtgacagtgcggcccccccacccccagaacctgggcaccaccctgcccaccgtgaagatgattgtggaggtgtccaagagcgcctgtgtgctgaccacccaggccgtgacccggctgctgcggagcaaggaggccgctgctgctgtggacatccgcacctggcccaccatcctggacacagatgacatccccaagaagaagatcgcctctgtgttccggccccccagcccagatgtgctggcctacctggacttctctgtgtccaccaccggcatcctggccggcgtgaaggccggccggggcggcagccggctgtag

SEQ ID NO: 322766 - DNA, 3333 bp, Artificial Sequence
  derived and/or modified sequence
atggccgaccggggctgccccctggaggccgcccccctgcccgccgaggtgcgggagtctctagctgagctggagttggaactatcagaggacgtgcacactgaggccgtgcaggcggcactggctaagtacaaagaaaggaaaatgcctatgcccagtaaaaggcgtagcgttttagtccacagctctgtcgagacttatactcccccagacacctcttccgctagcgaggacgaaggaagtttacggcgacccggccggttgacttccactcccctgcagtcccattctagtgtagagccttggcttgatagggtcatccaaggatcgtcaaccagttcctctgcttccagcactagctcccatcctggtggcagaccaacaacagccccgtcagccgcagccacgcccggtgctgctgccaccactgccctggccgggctggaagcccacactcacatagacctgcacagtgctccacctgatgtgactacagggttggtagaacactcctactttgagaggcctcaagttgccagcgttcggagcgttccgcgaggttgttcgggcagcatgcttgaaacagccgatggcgtgccagtgaatagtcgcgtgagctccaagattcagcaactcctgaataccctgaagaggccaaaacggccacccctcaaggagttcttcgtggacgattttgaggagttgctggaagtacagcagcctgacccaaaccagccaaaaccagagggatcagaaacctccgttttgcggggcgagcccctgacagccggtgtgcctaggcctccttctctgctcgccactctacaacggtgggggacaacacagccgaagtctccctgcctcactgcactcgacaccaccggaaaagcagtttacacccttacgtatggtaagctatggagtcggagcttgaaattagcatacacactcctgaataaactaaccagcaagaatgagcccctcctgaaacctggagatcgggtggcgctcgtgttccctaactctgatcctgtgatgttcatggtggctttttatggatgccttctggcggaattggtgccagtccctatcgaggtgcctctgaccaggaaagacgcaggtagccagcaagttggcttcctactggggtcttgtggcgtcttcctcgcactaacaaccgatgcatgtcaaaaaggcttacccaaagcacaaacaggagaggttgccgcatttaaaggttggcctcctctatcatggctggttatcgacggtaagcaccttgcaaagccccccaaagactggcaccccctggcacaggatactggaacgggaacagcatacattgaatataaaacttccaaagagggctcaacagtgggtgtgaccgtctcccatgccagcctactcgcgcagtgcagggccctgacacaagcctgtggctatagcgaagctgagactttaactaatgtgctggacttcaagcgggatgcagggctctggcacggcgtgcttacatcggtgatgaacagaatgcatgtggtgtcggtcccatatgcactgatgaaagcaaacccattgagctggatacaaaaggtgtgcttctacaaagcaagggctgctctggtcaaatctagagatatgcactggtcattgctggcccagagaggacaacgcgacgtgtccctatcgtctcttcgtatgttgatcgttgccgacggagccaacccctggtctatctcgtcctgcgatgcctttctgaacgtgttccaatctagaggcttgcgtccggaggtgatctgtccttgtgcatccagcccggaagctcttaccgtcgctatccggcggccaccagacctgggtggccccccacctagaaaagctgtactatctatgaacggcctgtcctacggcgtgatcagggttgatacagaagagaagctgtcggtgctgactgtgcaggacgttggacaggtgatgcccggcgcaaatgtctgcgtggtgaagctagagggcaccccttatctctgcaaaaccgacgaggtcggagaaatctgtgtctcatcaagtgccacaggcacagcctattacggtctcttggggattacgaaaaacgtattcgaggccgtgcccgttaccacaggtggagctcccattttcgaccgccctttcacccgtacaggtctgctgggcttcatcggaccggacaacctggtgttcattgtgggaaagctggacggattaatggtgacaggcgtgagacgccacaacgccgatgacgtagtggctaccgcactggccgtggagcccatgaaatttgtttatcggggtaggatcgctgtgttcagtgttaccgtgctgcacgacgaccgaatcgttctggttgccgagcagagaccagatgcttcggaggaggactcgtttcagtggatgagccgtgtcctgcaagccattgattcgattcaccaggtcggagtatattgtttggctctggttcctgctaacaccttgcccaaggcacctcttggcggaatccatatatcagagaccaagcaacggtttttagaaggaacactgcacccgtgtaatgtcctaatgtgtccccacacatgtgtgactaatctgcccaagcctcgacagaaacagcctgaagtcggtcctgccagtatgatagtggggaacctggtggccgggaagcgcatcgcccaggcatctggcagggaacttgcacaccttgaggattcggatcaggcccggaagtttctttttttagcagatgttctgcagtggcgggctcacactacacctgaccacccactctttctactccttaatgcgaaaggcacagtgacttctactgccacctgcgtccagctgcacaaacgggctgaaagagttgctgctgccctcatggaaaagggcaggctatctgttggtgatcatgtggccctcgtgtaccctccgggtgtggatctgatcgctgccttttacggatgcctgtactgtggctgtgtacctgttacagtaaggcccccacacccacaaaacctgggcacgactctgccgactgtcaagatgatcgtggaagtgtccaagtccgcctgtgtgctcaccactcaggccgtcacacggctgttacggtctaaagaggccgccgccgccgtggacatccgcacatggcccactattctagacaccgacgatatcccaaaaaaaaaaatagcctctgttttccgtccaccatctcccgatgtgttggcctacctcgacttcagcgtatccaccacgggcattctcgcgggagtgaaagcgggcagggggggttcacggctgtag

SEQ ID NO: 322767 - DNA, 3333 bp, Artificial Sequence
  derived and/or modified sequence
atggctgatagagggtgcccccttgaggccgcacccttgcccgcagaagtacgtgagtctctggcagaattagagctggagttaagtgaagatgtgcataccgaggctgttcaggctgctctcgctaagtataaggagagaaagatgcctatgccaagcaaaagacggtcagttcttgtccacagttcagtagagacatacacgcctcccgacacttcgagtgcgtcagaggatgaaggttccctccggaggccaggacgtttgacctctacccctctgcaatcgcattcctcagtcgaaccatggctagatcgcgtcattcagggctcctccactagttcttctgcctcctcgacttcctctcatccaggaggtcgtccgacaactgctccatcagcagctgctacacccggagccgctgcaaccaccgcattagcaggcctcgaagctcacacacatatcgacctgcactctgctccaccagacgttacaactgggctggtagagcactcatatttcgagcggcctcaggtcgcttccgtgcgttccgtgcctcgcggttgctccggttctatgctagagacagcggacggtgtccccgtgaactccagggtcagtagcaaaatccagcagctcttaaacacgctaaagagaccgaagagaccacccctaaaagaattttttgtggatgactttgaagagctccttgaagtccaacagccggatcctaatcagccaaagccagagggatctgagacctctgtcctgagaggtgagccgctgacagccggagttccaagaccaccatcattgttagccactctgcagcgatggggcacaacacagccgaagagtccctgtctgactgctttagacaccacagggaaggcagtttatactctgacctatggcaaactttggagcagaagtcttaaactggcttacaccttgctcaacaagctgacttccaaaaacgaaccccttctaaaaccaggggaccgcgtggctctcgtttttcccaatagtgatccggtaatgtttatggtcgccttttacggctgtttgttggctgagctcgtgcctgtgcccattgaagtacccctgacaaggaaggacgctggttctcaacaagtcggcttcctcctggggagttgcggggttttcctggccctcactaccgacgcatgtcagaagggcctgcctaaggcccaaaccggggaggttgccgcttttaaaggatggccacccctgtcctggttggtaatcgatggaaaacacctggcgaaaccgccaaaggactggcatcctctggctcaagataccggaaccggcaccgcctacattgaatataagacatcaaaggagggctcaaccgtaggcgtcaccgtctctcacgcatctttgcttgcacagtgcagggccctcacccaggcttgtggatacagcgaggccgagaccttaactaacgtcctggactttaaacgggacgctggactgtggcacggcgtactcacctcagtgatgaacagaatgcacgttgtgtccgtcccctacgccctaatgaaggctaaccccctcagctggatccagaaggtgtgtttttacaaggcacgcgctgccctggtcaagagcagggacatgcattggtctctgctggcccagaggggccagcgtgatgtgagcctgagcagcttgcggatgctgattgtggcagatggagcaaacccctggtctatcagtagctgtgatgcatttctcaacgttttccagtcccgtggtttgaggcccgaagtaatttgtccatgcgcctccagccctgaagcacttaccgtggccatccgcaggcctcctgacctcgggggaccccctccaagaaaggccgtgctgagcatgaacggactgtcatacggggttatcagagtcgataccgaggagaagctgtctgtacttaccgtacaggacgtgggccaggttatgcctggagcaaacgtctgcgtagtgaagctagaaggcacaccttacctttgcaagaccgacgaagtaggcgagatctgcgtgtcttctagtgcaactggaactgcttattacggtcttctggggataacaaaaaatgtgttcgaggctgtgccagttaccaccggcggagctccaatcttcgacaggccttttacccgaacaggattgttggggtttataggacctgataacctggtgtttatcgtgggaaaactggacgggctgatggtcacaggagtgagacgccacaatgccgatgacgtggtggcaaccgccctcgctgtagagccaatgaaattcgtgtaccgagggagaatcgcagtgttctctgtgaccgtactgcacgatgaccggattgttctcgttgcagagcaacggcctgatgctagtgaagaggacagctttcaatggatgagcagggtattacaggccatcgactcaattcatcaggtgggcgtctattgtttggccctggtgcctgcaaatactctgcccaaagccccactcgggggaattcacatctctgaaaccaagcaacggtttcttgaaggaaccctgcacccatgcaacgtgcttatgtgtcctcacacatgcgtcaccaatctgcccaagcccaggcagaaacagccggaagttggtccggctagcatgatcgtcgggaacctggttgccggaaagaggattgcacaggcctctgggagggagcttgcacacctggaagactcagaccaagctaggaaattcttatttctggccgatgtgctgcagtggagagcccacactacccccgatcatccactgttcctgctcctcaacgcaaagggcactgtgacgagcaccgcaacatgtgtccagttgcataagagggctgagcgcgtcgccgcagcccttatggaaaaaggaaggctgtctgtgggagaccatgtagctttagtatacccgcctggcgtggacctgattgccgctttttatggctgtctgtattgtgggtgcgtacccgtgactgtgcgtcctcctcacccacaaaatctggggaccaccctgccaaccgtgaagatgattgtggaggtatccaaaagtgcatgtgtcctcactacccaggcagtcactcgactgctgaggagcaaggaagccgctgctgctgtcgatatcaggacttggcctacaatattagacacagacgatattcctaagaagaaaatcgcgagtgttttcaggccaccatctccagatgtgctcgcttacctcgatttctcagtgtcgacaacggggatccttgctggtgttaaggctggtagggggggttccagattatag

SEQ ID NO: 322768 - DNA, 3613 bp, Artificial Sequence
  derived and/or modified sequence
ggagccatccgcgctcgtgcccgcgcgggtgcgttgctgtcctggccgcgcccctgtcccgccgcctcccgctcctcgcctggcggatgtaggttgttggcctgaggggagctacgtagccgaggtttgcgctgccgccgccaggcccggtccggttccagcctctgcccggacgctagccggcctggccatggctgaccgcgggtgcccgctggaggcggcgccgctgcctgccgaggtgcgggagagcctggctgagctggagctggagctgtcggaagatgtccacactgaagccgtgcaagcagctttggccaaatacaaagagaggaagatgcctatgccttcgaagagacgttctgtccttgtgcattcgtctgtggaaacctacacccctccagacacgtcgtctgcctcagaagatgagggctctttacggcgacccgggcgactcacctccactccgctccagagccattccagcgtcgagccctggctcgaccgggtcattcagggctcgtccacctcatcctctgcatcctccacctcatctcacccgggagggagacccaccactgctcccagtgctgcagccacgccgggggccgccgctaccactgcactcgcaggcctcgaggcccacacccacatagatctgcattctgcccctcctgatgtcaccacgggcctcgtggagcattcgtactttgagcgtccacaggtggcttctgtgagaagtgttcctcgggggtgcagcgggagcatgctggaaacagcagatggtgtccctgtgaacagcagagtgtcctccaaaatccagcagcttctgaacaccctgaagaggccaaagcgccctccactgaaggagttctttgtggatgattttgaggaattgttggaagttcagcaaccagatccaaatcagccaaagcctgagggaagcgagacgagtgtgctgagaggggagcctctcactgcaggtgtcccccgaccgccgtcgctgttggccaccttgcagcgctggggcacaacacagcccaaatccccctgtctgactgccttggatacaactgggaaagccgtctacactctcacctatggtaaactttggagtcggagtttaaaactagcttatactctacttaataaactgacaagtaagaatgaacctctacttaaacctggagacagagtggcgctcgtgtttccgaatagtgaccctgtgatgttcatggttgcattttatgggtgtctcctggcagagctggttcctgtccccatagaagtgccattaacaagaaaggatgcaggcagccagcaggttgggtttctgctgggcagctgtggagtcttcttggccctgaccacagacgcttgtcagaaaggcctccccaaggcacagacaggagaggtggcagctttcaaaggttggcccccgctctcctggctagtgattgatgggaagcatctagccaagcccccaaaggactggcaccctctggcccaggacacagggactgggactgcctacattgagtataaaaccagcaaagaaggcagtacggtgggggtcacagtgtcccacgcatccctgctggcacagtgccgggctctgacccaggcgtgcgggtactcagaagctgaaacattaacaaacgtgctggatttcaaaagggatgctggtctgtggcatggcgtgttaacaagcgtcatgaacaggatgcacgtggtcagcgtcccctacgcgctgatgaaggcgaacccactctcctggatccagaaagtgtgcttctataaagctcgggccgcgctggtgaagtcgcgagacatgcactggtctctcctagctcagcggggccagagggacgtcagcctcagctcactgcgcatgctgattgtggccgatggtgccaacccgtggtcgatctcctcctgtgacgccttcctcaacgtcttccagtccagaggtctgaggccagaggtcatctgtccttgtgcaagttctcctgaggcgctgactgtcgccatccgcaggccacctgatctgggaggaccacctccaagaaaagcagtcctgtcgatgaacggtctaagttatggtgttatcagagtggatactgaagaaaagttgtcagtccttactgttcaggacgttggtcaggtgatgcctggagctaatgtatgtgttgtgaagttagaaggtaccccttatctttgtaaaactgatgaagtgggagaaatatgcgtcagttccagtgcaactggcacagcgtactatggattgcttggaatcacgaagaatgtgtttgaggcagttccggtcaccacaggaggagcacccatctttgacaggccattcaccaggacaggcctgctgggcttcatcgggcctgacaacctggtcttcatcgtgggcaaactggacgggctgatggtcactggagttcgcagacacaatgcagatgacgttgtggccaccgcactggccgtggagcccatgaagtttgtctacagaggcaggatcgctgtgttctctgtgaccgtgctgcacgacgaccggattgtcctggtggctgagcagcggccggatgcctcggaggaggacagcttccagtggatgagccgtgtgctgcaggccattgatagcatccaccaggtgggcgtgtactgtctggccctggttcctgccaacaccttgcccaaggctcctctcggagggattcacatttctgaaaccaaacagcgctttctggaagggacgctgcacccgtgtaatgtgctgatgtgccctcacacctgtgttaccaacctccccaaacctcgtcagaaacaaccagaggttggaccagcctcaatgatcgtggggaacctggttgctgggaagagaatcgctcaggcttccgggagagagctcgcccacctggaggacagcgaccaggcacggaagttcctgttcctggctgacgtgctgcagtggcgtgcccacaccactcctgaccacccgctgttcttgctgctgaacgccaagggcaccgtcacaagcactgcaacctgtgtccagctgcacaaaagggctgagagagtggccgcggctctgatggagaagggaagactgagtgttggggaccatgtggctctggtctacccaccaggggtggacctcattgccgcgttctatggctgcttgtactgtggctgcgtgcctgtcaccgtgcggcccccgcaccctcagaacctcggcaccacactgcccaccgtcaagatgatcgtggaggtcagcaagtctgcatgcgtcctcaccacgcaggctgtcacacggctgctcaggtccaaggaggctgctgctgccgtggacatcaggacctggcccaccatcctagacacagatgacatcccaaaaaagaagatagcaagcgttttcaggcccccctcccccgatgtcctcgcatacttggacttcagcgtgtcaaccactgggatattagcgggagtgaaggcggggcgtggtggctcacgcctgtaatcccagcacttcgggaggccgaggcgggtggatcacaagatcaagagatggagaccatcctggccaacgtggtgaaaccccgtctctact

SEQ ID NO: 322769 - DNA, 3333 bp, Artificial Sequence
  derived and/or modified sequence
atggccgacagaggctgccccctggaggccgcccccctgcccgccgaggtgagagagagcctggccgagctggagctggagctgagcgaggacgtgcacaccgaggccgtgcaggccgccctggccaagtacaaggagagaaagatgcccatgcccagcaagagaagaagcgtgctggtgcacagcagcgtggagacctacaccccccccgacaccagcagcgccagcgaggacgagggcagcctgagaagacccggcagactgaccagcacccccctgcagagccacagcagcgtggagccctggctggacagagtgatccagggcagcagcaccagcagcagcgccagcagcaccagcagccaccccggcggcagacccaccaccgcccccagcgccgccgccacccccggcgccgccgccaccaccgccctggccggcctggaggcccacacccacatcgacctgcacagcgccccccccgacgtgaccaccggcctggtggagcacagctacttcgagagaccccaggtggccagcgtgagaagcgtgcccagaggctgcagcggcagcatgctggagaccgccgacggcgtgcccgtgaacagcagagtgagcagcaagatccagcagctgctgaacaccctgaagagacccaagagaccccccctgaaggagttcttcgtggacgacttcgaggagctgctggaggtgcagcagcccgaccccaaccagcccaagcccgagggcagcgagaccagcgtgctgagaggcgagcccctgaccgccggcgtgcccagaccccccagcctgctggccaccctgcagagatggggcaccacccagcccaagagcccctgcctgaccgccctggacaccaccggcaaggccgtgtacaccctgacctacggcaagctgtggagcagaagcctgaagctggcctacaccctgctgaacaagctgaccagcaagaacgagcccctgctgaagcccggcgacagagtggccctggtgttccccaacagcgaccccgtgatgttcatggtggccttctacggctgcctgctggccgagctggtgcccgtgcccatcgaggtgcccctgaccagaaaggacgccggcagccagcaggtgggcttcctgctgggcagctgcggcgtgttcctggccctgaccaccgacgcctgccagaagggcctgcccaaggcccagaccggcgaggtggccgccttcaagggctggccccccctgagctggctggtgatcgacggcaagcacctggccaagccccccaaggactggcaccccctggcccaggacaccggcaccggcaccgcctacatcgagtacaagaccagcaaggagggcagcaccgtgggcgtgaccgtgagccacgccagcctgctggcccagtgcagagccctgacccaggcctgcggctacagcgaggccgagaccctgaccaacgtgctggacttcaagagagacgccggcctgtggcacggcgtgctgaccagcgtgatgaacagaatgcacgtggtgagcgtgccctacgccctgatgaaggccaaccccctgagctggatccagaaggtgtgcttctacaaggccagagccgccctggtgaagagcagagacatgcactggagcctgctggcccagagaggccagagagacgtgagcctgagcagcctgagaatgctgatcgtggccgacggcgccaacccctggagcatcagcagctgcgacgccttcctgaacgtgttccagagcagaggcctgagacccgaggtgatctgcccctgcgccagcagccccgaggccctgaccgtggccatcagaagaccccccgacctgggcggccccccccccagaaaggccgtgctgagcatgaacggcctgagctacggcgtgatcagagtggacaccgaggagaagctgagcgtgctgaccgtgcaggacgtgggccaggtgatgcccggcgccaacgtgtgcgtggtgaagctggagggcaccccctacctgtgcaagaccgacgaggtgggcgagatctgcgtgagcagcagcgccaccggcaccgcctactacggcctgctgggcatcaccaagaacgtgttcgaggccgtgcccgtgaccaccggcggcgcccccatcttcgacagacccttcaccagaaccggcctgctgggcttcatcggccccgacaacctggtgttcatcgtgggcaagctggacggcctgatggtgaccggcgtgagaagacacaacgccgacgacgtggtggccaccgccctggccgtggagcccatgaagttcgtgtacagaggcagaatcgccgtgttcagcgtgaccgtgctgcacgacgacagaatcgtgctggtggccgagcagagacccgacgccagcgaggaggacagcttccagtggatgagcagagtgctgcaggccatcgacagcatccaccaggtgggcgtgtactgcctggccctggtgcccgccaacaccctgcccaaggcccccctgggcggcatccacatcagcgagaccaagcagagattcctggagggcaccctgcacccctgcaacgtgctgatgtgcccccacacctgcgtgaccaacctgcccaagcccagacagaagcagcccgaggtgggccccgccagcatgatcgtgggcaacctggtggccggcaagagaatcgcccaggccagcggcagagagctggcccacctggaggacagcgaccaggccagaaagttcctgttcctggccgacgtgctgcagtggagagcccacaccacccccgaccaccccctgttcctgctgctgaacgccaagggcaccgtgaccagcaccgccacctgcgtgcagctgcacaagagagccgagagagtggccgccgccctgatggagaagggcagactgagcgtgggcgaccacgtggccctggtgtacccccccggcgtggacctgatcgccgccttctacggctgcctgtactgcggctgcgtgcccgtgaccgtgagacccccccacccccagaacctgggcaccaccctgcccaccgtgaagatgatcgtggaggtgagcaagagcgcctgcgtgctgaccacccaggccgtgaccagactgctgagaagcaaggaggccgccgccgccgtggacatcagaacctggcccaccatcctggacaccgacgacatccccaagaagaagatcgccagcgtgttcagaccccccagccccgacgtgctggcctacctggacttcagcgtgagcaccaccggcatcctggccggcgtgaaggccggcagaggcggcagcagactgtag

SEQ ID NO: 322770 - DNA, 1073 bp, Artificial Sequence
  derived and/or modified sequence
aaaaggaaatttctgaaaatggttcatattttgtggtggtgacattacaggaggtgtcctagccttctgaggctgtagcctatctgactagtctcatggatcaaatctattgtgatttttatcccccttaaggaaaatatttagtgatttgagaaggaatataaataggtcagtgtctccttctgttacagttgcctgctttcaatcctaacaaggactgatcctgcctgggagaaacaaaaataatcttgggggaaatatttaatccataattatttaatccactgcaaacctgttttcaattcacaggtgatgttgttgagagagataacatattcaatcactcctctctctttacatggaacttcccttctaaactgcaattggagagctacaggtctggtaacattggaagggcacaggcctttccaatgacattccccatcccacccccaggtttcctgcagttgttgtcagagtacaaaccttcttccacactttatacaagtgtttagacacttcgccagcagccttggttttcagagagaaaaataaaataaaaacagcacttaattaaaatggagcgtgaaacccagaaggaatcatggtgtgtgagtgcttagagtgttacagttcccacccattgtttggaatttgcatcttaattcaatataaagcctgacaataggtacagcaaagagacgaatcaagacttgggtctcacagaagttacctggtgccaacatcccatgcaccatcgtggagactggctggatgccctgtgctctatcagggcatgtcagaccaacagaggggcaaatcagagtgaagaggaagccagaagatgggagagacatttttgaaggaacaagctgccaataatgtctgcaaaaagtgaattcttccaacaactacgtgagcttggaagaggaccttgaacctagaatgagactgcagcagccccagccaacacccttctcagcttcgtggaccctgagcagagaacacagcaaatttgtccagacttctcatctacagaaactgagataataaatgattgttgttttaacatc

SEQ ID NO: 322771 - protein, 387 aa, Artificial Sequence
  derived and/or modified sequence
MAAIPALDPEAEPSMDVILVGSSELSSSVSPGTGRDLIAYEVKANQRNIEDICICCGSLQVHTQHPLFEGGICAPCKDKFLDALFLYDDDGYQSYCSICCSGETLLICGNPDCTRCYCFECVDSLVGPGTSGKVHAMSNWVCYLCLPSSRSGLLQRRRKWRSQLKAFYDRESENPLEMFETVPVWRRQPVRVLSLFEDIKKELTSLGFLESGSDPGQLKHVVDVTDTVRKDVEEWGPFDLVYGATPPLGHTCDRPPSWYLFQFHRLLQYARPKPGSPRPFFWMFVDNLVLNKEDLDVASRFLEMEPVTIPDVHGGSLQNAVRVWSNIPAIRSSRHWALVSEEELSLLAQNKQSSKLAAKWPTKLVKNCFLPLREYFKYFSTELTSSL

SEQ ID NO: 322772 - DNA, 1164 bp, Artificial Sequence
  derived and/or modified sequence
atggccgctatcccagctcttgacccagaggctgagccatccatggacgtcatccttgtgggctctagcgagctgtcctccagcgtaagcccaggcaccgggcgcgatctcatagcctacgaggtgaaagcgaatcaacggaacattgaagatatatgtatctgttgtggaagcctccaagtacacactcagcatccactgtttgaaggcgggatatgcgcaccatgcaaggacaagtttctggacgccctgtttctgtatgatgatgacggctaccagtcctactgcagcatctgctgcagcggagagacactgctcatctgcggcaatcccgattgtactcgctgttattgcttcgagtgcgtcgattctcttgtgggacccggcacctctggcaaggtccacgctatgagtaactgggtgtgctacttatgtctcccctccagtagatccggcttattgcagcgtaggagaaagtggcgaagccagctgaaggcattttacgatcgcgagtccgagaaccccctggagatgttcgaaacggtgccagtctggcggcgtcagcccgtccgggttttgagcctctttgaggacatcaaaaaagagttgacaagcctgggctttctcgaatccggctctgatccagggcagctaaagcatgttgtggatgtcaccgatacggttcggaaagacgtcgaggaatggggaccttttgatctcgtgtatggagccactccccccttgggccatacctgtgatcgaccgccaagctggtacttgttccagtttcaccggctgctccagtatgctcgcccaaagcctgggtcccctagacccttcttctggatgttcgtagacaatctcgtgctcaacaaggaagacctggatgtcgcttccagatttttagaaatggaacccgtgaccatacccgacgtccacgggggtagcctccagaatgcagtgagagtgtggtccaatatcccggctatcagaagctccaggcactgggcactggtgtctgaggaggagctgtccctactggctcagaataagcagtcatccaagctcgccgcaaagtggcctaccaagcttgtgaagaactgctttctgcccctccgcgaatatttcaagtatttcagtacagaactcacatcttccctgtag

SEQ ID NO: 322773 - DNA, 1164 bp, Artificial Sequence
  derived and/or modified sequence
atggccgccatcccagccctggaccctgaggccgagcccagcatggatgtgatcctggtgggcagcagcgagctgagcagctctgtgtccccaggcaccggccgggacctgattgcctatgaggtgaaggccaaccagagaaatattgaggacatctgcatctgctgcggcagcctgcaggtgcacacccagcaccccctgtttgagggcggcatctgtgccccctgcaaggacaagttcctggatgccctcttcctgtatgatgatgatggctaccagagctactgcagcatctgctgcagcggggagaccctgctgatctgtggcaacccagactgcacccgctgctactgctttgaatgtgtggacagcctggtgggccctggcaccagcggcaaggtgcacgccatgagcaactgggtgtgctacctgtgcctgcccagcagccgcagcggcctgctgcagaggaggaggaagtggaggagccagctgaaggccttctatgaccgggagagcgagaaccccctggagatgtttgaaacagtgcctgtgtggaggcggcagcctgtgcgggtgctgagcctgtttgaggacatcaagaaggagctgaccagcctgggcttcctggagagcggcagtgaccccggccagctgaagcacgtggtggatgtgacagacacagtgaggaaggatgtggaggagtggggcccctttgacctggtgtatggagccaccccacccctgggccacacctgtgacaggcctccttcctggtacctgttccagttccaccggctgctgcagtatgcccggcccaagccaggcagcccccggcccttcttctggatgtttgtggacaacctggtgctgaacaaggaggacctggatgtggccagccgcttcctggagatggagcctgtgaccatcccagatgtgcatggaggcagcctgcagaatgctgtgcgggtgtggagcaacatcccagccatccgcagcagccgccactgggccctggtgtctgaggaggagctgagcctgctggcccagaacaagcagagcagcaagctggccgccaagtggcccaccaagctggtgaagaactgcttcctgcccctgcgggagtacttcaagtacttcagcacagagctgaccagcagcctgtag

SEQ ID NO: 322774 - DNA, 1164 bp, Artificial Sequence
  derived and/or modified sequence
atggccgccatccccgccctggaccccgaggccgagcccagcatggacgtcattctggttggctcttcagaactgtccagcagcgtgagcccagggacagggcgggatctcattgcctacgaggtgaaggcaaaccagaggaatatagaggacatttgtatttgttgcggatccctgcaggttcacacacaacatcctctcttcgagggagggatttgtgcaccctgcaaggacaagttccttgatgccctctttctctatgatgatgacggatatcagtcatactgctctatatgttgcagcggtgagactctcttaatctgtggcaaccctgactgtactaggtgttactgctttgagtgtgttgacagtcttgtggggcctggcacttcagggaaagtgcacgccatgtctaattgggtatgttatctatgcttgccaagttcaagatcaggtctcctccagaggagacggaagtggcggagtcaattaaaggccttttacgatcgagaaagcgaaaatcctttggagatgtttgagacagttcccgtttggcggaggcagcctgtgcgggtgctgtcactctttgaagacataaagaaagagctgacgagcctggggttcctcgagtcggggagtgacccgggtcagctcaagcatgtagtggatgtgaccgacactgttagaaaagatgtcgaagaatggggcccatttgacttggtgtacggggcaacccctccacttggacacacatgtgaccggccgccctcatggtacttattccagttccaccgccttttacagtacgcccgccccaagcccggctcccctagaccattcttctggatgtttgtcgacaacctggtcctaaacaaagaagatttagatgtggcatccagatttcttgagatggaacccgtaactatccccgatgttcacggcggctccctgcaaaatgccgtgcgggtatggtcgaatattccagctatccgatcctcgcgacactgggccctggtgtccgaggaggagctctccctcctcgcacagaataagcagtccagtaagctggccgcaaaatggcccacgaagcttgtgaagaattgtttcctgccgctcagggagtatttcaagtacttttcaaccgaactgaccagtagcctgtag

SEQ ID NO: 322775 - DNA, 1164 bp, Artificial Sequence
  derived and/or modified sequence
atggcggcaatcccagcactggatccagaagctgaaccttcaatggatgtgattttggtcggatcatcagaactatcctcaagcgtatccccaggtacgggacgagacctcattgcttatgaagtaaaggcaaatcagcgcaacatagaagacatttgtatttgttgcgggtcacttcaggtgcacacacagcaccctctgtttgaagggggtatctgcgctccatgtaaggacaagtttctggatgctctgtttctgtatgatgacgacggttatcagagttattgttccatctgttgttccggggagaccctgctcatatgtggaaaccctgattgcactaggtgttattgtttcgaatgtgttgacagcctggttggtccaggaaccagtgggaaagttcatgcaatgagtaactgggtatgttatctgtgcctgccctcttcacggtctggcctgctccagcgtaggcgaaaatggcgctctcagctgaaagcattctacgaccgagagagcgaaaaccccctggagatgttcgagactgtaccggtatggagacggcagcccgtgcgcgtcctgagtctttttgaggacatcaaaaaggagctgacatcactcggattcctagagtcaggctcagatcctggtcaacttaaacacgtggtcgatgttaccgataccgtgcgcaaagacgtggaagagtgggggccttttgatttggtgtacggtgctacccctcctttagggcatacttgcgatcgccctccgtcctggtacttgttccagtttcaccgtttactgcagtatgcaaggccaaaacccggtagcccccgaccattcttttggatgttcgtcgacaatcttgtcctgaacaaagaggatctcgatgtcgcgagcaggtttttagagatggaaccggtgaccattccagacgtccatggcggtagcttacagaatgcagtccgggtgtggtccaatatcccagccatccgttcctcacggcattgggccctggtaagtgaggaggaactctcccttctcgcacagaataaacagtcctccaaattagccgctaagtggcccacgaaactggtcaagaattgcttcctgcctcttagagagtacttcaagtatttctccaccgagcttacctcttcattatag

SEQ ID NO: 322776 - DNA, 1164 bp, Artificial Sequence
  derived and/or modified sequence
atggccgccatccccgccctggaccccgaggccgagcccagcatggacgtgatcctggtgggcagcagcgagctgagcagcagcgtgagccccggcaccggcagagacctgatcgcctacgaggtgaaggccaaccagagaaacatcgaggacatctgcatctgctgcggcagcctgcaggtgcacacccagcaccccctgttcgagggcggcatctgcgccccctgcaaggacaagttcctggacgccctgttcctgtacgacgacgacggctaccagagctactgcagcatctgctgcagcggcgagaccctgctgatctgcggcaaccccgactgcaccagatgctactgcttcgagtgcgtggacagcctggtgggccccggcaccagcggcaaggtgcacgccatgagcaactgggtgtgctacctgtgcctgcccagcagcagaagcggcctgctgcagagaagaagaaagtggagaagccagctgaaggccttctacgacagagagagcgagaaccccctggagatgttcgagaccgtgcccgtgtggagaagacagcccgtgagagtgctgagcctgttcgaggacatcaagaaggagctgaccagcctgggcttcctggagagcggcagcgaccccggccagctgaagcacgtggtggacgtgaccgacaccgtgagaaaggacgtggaggagtggggccccttcgacctggtgtacggcgccaccccccccctgggccacacctgcgacagaccccccagctggtacctgttccagttccacagactgctgcagtacgccagacccaagcccggcagccccagacccttcttctggatgttcgtggacaacctggtgctgaacaaggaggacctggacgtggccagcagattcctggagatggagcccgtgaccatccccgacgtgcacggcggcagcctgcagaacgccgtgagagtgtggagcaacatccccgccatcagaagcagcagacactgggccctggtgagcgaggaggagctgagcctgctggcccagaacaagcagagcagcaagctggccgccaagtggcccaccaagctggtgaagaactgcttcctgcccctgagagagtacttcaagtacttcagcaccgagctgaccagcagcctgtag

SEQ ID NO: 322777 - DNA, 1706 bp, Artificial Sequence
  derived and/or modified sequence
cccatctccacccctcccctgaaccccactccccactgaggtccccaaaccccacccctcactccaccctgagggccccatcctctgaaccccaatcccccagccccactgagctcttaaccctccccacctgagggttccctttccctgcccgtcccccagcttcctagctccccaccccaagtgaccccccgcagctcctcgcccctcccactgcaaaccggcactgaagggctgccccgcccccgcccctccccgcccccgcgggacacgcccagattctttgcccccatagcctggtgacctctggccacccgctgtcccaggtgggcctggatccttccagctcattctttgcctgcgccgtccctcgttccatggcccagtcctccccggggaccctgagcctggaagccccggaccactggaaccttgaacccaccagctggctgtacccggagccgtggcagcagccctcatccccatggcggccatcccagccctggacccagaggccgagcccagcatggacgtgattttggtgggatccagtgagctctcaagctccgtttcacccgggacaggcagagatcttattgcatatgaagtcaaggctaaccagcgaaatatagaagacatctgcatctgctgcggaagtctccaggttcacacacagcaccctctgtttgagggagggatctgcgccccatgtaaggacaagttcctggatgccctcttcctgtacgacgatgacgggtaccaatcctactgctccatctgctgctccggagagacgctgctcatctgcggaaaccctgattgcacccgatgctactgcttcgagtgtgtggatagcctggtcggccccgggacctcggggaaggtgcacgccatgagcaactgggtgtgctacctgtgcctgccgtcctcccgaagcgggctgctgcagcgtcggaggaagtggcgcagccagctcaaggccttctacgaccgagagtcggagaatccccttgagatgttcgaaaccgtgcctgtgtggaggagacagccagtccgggtgctgtccctttttgaagacatcaagaaagagctgacgagtttgggctttttggaaagtggttctgacccgggacaactgaagcatgtggttgatgtcacagacacagtgaggaaggatgtggaggagtggggacccttcgatcttgtgtacggcgccacacctcccctgggccacacctgtgaccgtcctcccagctggtacctgttccagttccaccggctcctgcagtacgcacggcccaagccaggcagccccaggcccttcttctggatgttcgtggacaatctggtgctgaacaaggaagacctggacgtcgcatctcgcttcctggagatggagccagtcaccatcccagatgtccacggcggatccttgcagaatgctgtccgcgtgtggagcaacatcccagccataaggagcagcaggcactgggctctggtttcggaagaagaattgtccctgctggcccagaacaagcagagctcgaagctcgcggccaagtggcccaccaagctggtgaagaactgctttctccccctaagagaatatttcaagtatttttcaacagaactcacttcctctttataaatgagtcactatactgtgaagaaaaagacttttcctagaacaaaggcaactttcctca

SEQ ID NO: 322778 - DNA, 778 bp, Artificial Sequence
  derived and/or modified sequence
agggggtggtggcgaggctccgcaactttggaaactgccatttcattcacacaaggcactgcctgggggagggggctgttcctggctgcagaattctagctctcacgagcacgcagacaaccgcactcgcagcggtgtggggccggctgctcaggggaagccccaggctctccgacccagctaccgggaatggggcaccctttggagaagaaccccagcctggggtggggacgcaccggctctccgacagctcaaacacagacagatcttctagagccgagggaatttcttttcgcagaagccattactccccccgagagaaggctgcaaagctgggaagcccagggtgtgctcctcccgcccttttggacccccgggcttgcaccggctgcactctgagaaccagctgcgcgcggagcggtgcaatgcagcacccaccctgcgagcctggcaattgcttgtcattaaaagaaaaaaaaattacggagggctccgggggtgtgtgttggggaggggagaccgatgcttctaacccagcccccgctttgactgcgtgttgtgcagctgagcgcgaggccaacgttgagcaaggccttgcagggaggttgctcctgtgtaattacgaaagaaggctagtccgaaggtgcaaaatagcagggagaggacgcgcccccttaggaacaagacctctggatgtttccagtttcaaattgaaagaagaggggcgccccccttgtttgaaaataaataaataaataagtgcgagctacaaaaaaaa

SEQ ID NO: 322779 - DNA, 381 bp, Artificial Sequence
  derived and/or modified sequence
atgggcctgcccgcccccagcctgcacgccaccagcaccctgagacccgaccagttcagcccccacaccaaccccagcctgagcctgccctgcctgaagagcttccccgtgagcctgtggccctggggcagagccagcctgctgtgccacctgagcagactgttcgtgtgccacagacccctgacccccaccagccaggcccccaacatgttcagctgcgtgagcagcagcctgaccctggccgccagcagcgcctggcccgccagccacctgcccatcagccacagccccttcctgcccccccacctgctgagaagccagctgagcgtgaccagcagcagagagcccagactgagcctgcccctgcagctgggccagtag

SEQ ID NO: 322780 - protein, 726 aa, Artificial Sequence
  derived and/or modified sequence
MEDRLHMDNGLVPQKIVSVHLQDSTLKEVKDQVSNKQAQILEPKPEPSLEIKPEQDGMEHVGRDDPKALGEEPKQRRGSASGSEPAGDSDRGGGPVEHYHLHLSSCHECLELENSTIESVKFASAENIPDLPYDYSSSLESVADETSPEREGRRVNLTGKAPNILLYVGSDSQEALGRFHEVRSVLADCVDIDSYILYHLLEDSALRDPWTDNCLLLVIATRESIPEDLYQKFMAYLSQGGKVLGLSSSFTFGGFQVTSKGALHKTVQNLVFSKADQSEVKLSVLSSGCRYQEGPVRLSPGRLQGHLENEDKDRMIVHVPFGTRGGEAVLCQVHLELPPSSNIVQTPEDFNLLKSSNFRRYEVLREILTTLGLSCDMKQVPALTPLYLLSAAEEIRDPLMQWLGKHVDSEGEIKSGQLSLRFVSSYVSEVEITPSCIPVVTNMEAFSSEHFNLEIYRQNLQTKQLGKVILFAEVTPTTMRLLDGLMFQTPQEMGLIVIAARQTEGKGRGGNVWLSPVGCALSTLLISIPLRSQLGQRIPFVQHLMSVAVVEAVRSIPEYQDINLRVKWPNDIYYSDLMKIGGVLVNSTLMGETFYILIGCGFNVTNSNPTICINDLITEYNKQHKAELKPLRADYLIARVVTVLEKLIKEFQDKGPNSVLPLYYRYWVHSGQQVHLGSAEGPKVSIVGLDDSGFLQVHQEGGEVVTVHPDGNSFDMLRNLILPKRR

SEQ ID NO: 322781 - DNA, 2181 bp, Artificial Sequence
  derived and/or modified sequence
atggaggataggctgcatatggacaatggcctggtcccacaaaaaatcgtatcagtccacctccaggactcaacactgaaggaagttaaagatcaggtgagtaacaagcaggctcaaattctggaacctaagcccgagccaagccttgagatcaagccagagcaggacggcatggagcacgtgggcagagacgatcctaaagccctaggggaggagccaaagcaacgacggggcagtgcatcgggatctgaaccagcaggtgatagcgaccgtggaggggggccagtagaacactaccaccttcacctgagtagctgtcacgagtgcttggagctcgagaattcaaccattgaaagtgtgaaattcgcctctgccgagaacattcctgatttaccctacgactactcatcatcccttgagtccgtcgccgacgagacatctccggaacgtgagggtagacgcgtgaatctaaccgggaaggcccccaatattctgctgtatgtgggcagcgattcccaggaggcacttggaaggttccatgaggttcggtctgtcctagccgactgcgtggacattgacagttacatcttgtatcacctccttgaggactctgcactacgcgacccttggaccgacaactgcctgttgctagtgattgccactcgagagtccataccagaggacctgtatcaaaaattcatggcctatctgtctcaggggggtaaggtcctgggcctatcatccagcttcacttttgggggcttccaggttactagcaaaggtgctttacacaagacagtgcaaaatcttgtgttcagcaaagcagaccagagcgaagtcaaattgtccgtgttaagtagtggctgcagataccaagagggtccggtgcgtctgagcccgggtaggcttcaaggacacttagaaaacgaagacaaggatcgtatgatcgtccatgtgccttttggaacaagagggggggaggccgtgctatgccaggtgcacctagaactccctccatcttccaatatcgtacagacgcccgaagactttaacctcttaaagagctcaaactttcgtcggtatgaggtgctgcgtgagatccttaccacgttgggtctcagctgtgatatgaaacaggtccctgcccttacacccctctacctcctcagcgctgctgaggaaattagggatcctctgatgcagtggttagggaaacacgttgactccgaaggcgaaatcaagtctggccaactctctttgcggtttgttagcagttacgttagcgaggtagaaatcaccccttcttgcatacccgtagtcaccaacatggaggctttcagctcagaacatttcaacttggaaatctacagacagaacctgcaaaccaaacagcttggcaaagtgattctctttgcagaagtgacacccacaactatgcggctgctcgacggcctgatgtttcagacgccgcaagagatgggcctaatcgtcattgctgctcgtcaaacggaggggaaaggccggggaggcaatgtgtggctgtctccggtggggtgtgctctgtctacgctgctcatatccataccccttcgctctcagctaggtcagagaatcccattcgtgcaacacctcatgagcgtggcggtagtcgaggctgtcagatccattcctgagtaccaggatatcaatttacgcgtcaagtggcccaacgacatatattatagtgacctgatgaagataggtggcgtactggttaattctacactgatgggcgaaaccttttacatcctgatcggctgcggcttcaacgttactaacagcaaccctactatttgcatcaacgatttaatcactgaatataacaagcaacacaaggccgagctgaagcctctcagagccgactacctcattgcgcgcgttgtcacagttttggagaaacttattaaggagttccaagacaagggacctaattctgttttacctctttactaccggtactgggtccacagcggtcaacaggtgcaccttggctcggctgaagggcccaaggtgtctattgtgggactagatgactctggcttcctgcaggtacatcaggagggaggggaagtggtgacagtgcaccctgacggcaacagtttcgatatgctgcgcaatctgatccttccaaagcgccgctag

SEQ ID NO: 322782 - DNA, 2181 bp, Artificial Sequence
  derived and/or modified sequence
atggaggatcgactgcatatggacaacggattggtgccgcagaaaatagtgtctgtgcatcttcaagacagtacactcaaggaggtcaaagaccaggtcagcaacaagcaagcccagattctggagccaaaacctgagccgtctctggagattaagcccgagcaagacgggatggaacatgtgggcagagacgatcccaaggcactcggggaagaaccaaagcagcggcgcggctcagcttcagggagtgaacccgcgggtgacagcgatcgaggtggcggccccgtagaacattaccatctgcatctctccagttgtcatgaatgcttggagttggaaaattctacaatcgagagcgtgaaatttgctagtgctgaaaatataccagatctaccatatgattattcttctagcttagaatcggtggctgacgagacttcacctgagcgtgaaggcaggagggtgaacctgaccgggaaggcgccaaatattttgctgtacgtgggatctgattcacaggaagctctggggagattccacgaggtgcggtccgtcctcgctgactgtgtcgatatagacagctacattctttatcacctgttagaagacagtgccctgcgggatccctggacggataactgtctcctgctagtgatcgccacacgagagtccatccctgaagatctctaccagaagttcatggcttacctgtcacagggaggaaaagtacttggcctgtcttcatcattcacgttcggtggcttccaggtgacctccaaaggcgctctccacaaaacagtgcagaacctggtgttctcaaaggctgatcaaagtgaagtgaaattgtccgtgttaagtagcggttgccgctaccaggaagggcccgtgcgcctatcacccgggaggcttcagggccatctggagaacgaggacaaagaccggatgattgtacatgtcccgtttggtactcgaggcggggaggcagtcctgtgtcaggtccacctggagctgcctccatcgtctaatatcgtccagacccctgaggatttcaatctcctgaagagctcaaatttccgccggtatgaagtgcttagagagatcttaactacattaggcctttcatgcgacatgaaacaggtcccggccttaacaccgctgtatctcctgtctgcggccgaggagatccgagatcccctaatgcagtggcttggaaagcatgtggattccgaaggtgaaataaagtctggtcaactgagtctccgtttcgtctccagctacgtgtccgaagtcgaaattacccccagctgtatacctgtcgtgactaatatggaggctttctcttcagaacacttcaatttagaaatctatcgccagaacctgcaaactaagcagctcggcaaggtcatactgtttgcggaagtcacacctactacgatgagacttttagacgggctgatgttccaaactccgcaagagatgggacttattgtgattgccgcacggcagacagaaggaaagggccgcggtggcaacgtctggttaagccccgtcggatgtgccctgtcaaccttgcttatctccatcccgctacggtctcagctcgggcagaggattcctttcgtgcagcaccttatgtccgttgcagtggtggaagcggtgcgttctatcccagagtaccaggacataaacctgagagtaaaatggcctaatgacatttattactctgacttgatgaagatcggaggcgtgctggtaaattccacactcatgggagaaactttttatattctgatcggctgtgggttcaacgtaactaattccaacccaactatctgcatcaatgacctgatcaccgagtacaacaagcagcataaggcagagctaaagccactccgggctgactacctgatcgctcgcgtggtaaccgtgctggaaaaacttatcaaggaattccaggacaaaggacctaacagtgttctgcccctctactaccgctattgggtgcacagtggtcagcaggtgcacctgggttctgctgaagggccgaaggtttccatagtgggcctggatgattcaggctttttgcaggttcaccaagaaggtggcgaggtagtcacagtgcatcctgacggtaactcctttgacatgctgcgcaacctgatcttgccaaagaggaggtag

SEQ ID NO: 322783 - DNA, 2181 bp, Artificial Sequence
  derived and/or modified sequence
atggaggaccggctgcacatggacaatggcctggtgccccagaagatcgtgtctgtgcacctgcaggacagcaccctgaaggaggtgaaggaccaggtgagcaacaagcaggcccagatcctggagcccaagccagagcccagcctggagatcaagccagagcaggacggcatggagcacgtgggcagagatgaccccaaggccctgggggaggagcccaagcagaggcggggcagcgccagcggcagcgagcctgctggggacagcgaccggggcggcggccctgtggagcactaccacctgcacctgagcagctgccacgagtgcctggagctggagaacagcaccattgaatctgtgaagtttgccagcgctgagaacatcccagacctgccctatgactacagcagcagcctggagagcgtggctgatgagaccagccctgagcgggagggcagaagagtgaacctgaccgggaaggcccccaacatcctgctgtatgtgggcagtgacagccaggaggccctgggccgcttccacgaggtgcgctctgtgctggccgactgtgtggacatcgacagctacatcctgtaccacctgctggaggacagcgccctgcgggacccctggacagacaactgcctgctgctggtgattgccacccgggagagcatcccagaagatctctaccagaagttcatggcctacctgagccagggcggcaaggtgctgggcctgagcagcagcttcaccttcggcggcttccaggtgaccagcaagggggccctgcacaagacagtgcagaacctggtgttcagcaaggctgaccagagcgaggtgaagctgtctgtgctgagcagcggctgccgctaccaggagggccctgtgcggctgagccctggccgcctgcagggccacctggagaatgaagacaaggacaggatgattgtgcacgtgcccttcggcacccggggcggggaggccgtgctgtgccaggtgcacctggagctgccccccagcagcaacatcgtgcagaccccagaggacttcaacctgctgaagagcagcaacttcagaagatatgaggtgctgcgggagatcctgaccaccctgggcctgagctgtgacatgaagcaggtgcctgccctgacccccctgtacctgctgtctgctgctgaggagatccgggaccccctgatgcagtggctgggcaagcacgtggacagcgagggggagatcaagagcggccagctgagcctgcgctttgtgtcctcctatgtgtctgaggtggagatcacccccagctgcatccctgtggtgaccaacatggaggccttcagcagcgagcacttcaacctggagatctaccggcagaacctgcagaccaagcagctgggcaaggtgatcctgtttgctgaggtgacccccaccaccatgaggctgctggatggcctgatgttccagaccccccaggagatgggcctcatcgtgattgctgcccggcagacagagggcaagggccggggcggcaatgtgtggctgagccctgtgggctgtgccctgagcaccctgctgatcagcatccccctgcggagccagctgggccagaggatcccctttgtgcagcacctgatgtctgtggccgtggtggaggccgtgcgcagcatccctgagtaccaggacatcaacctgcgggtgaagtggcccaatgacatctactacagcgacctgatgaagattggaggagtgctggtgaacagcaccctgatgggagagaccttctacatcctgattggctgcggcttcaacgtgaccaacagcaaccccaccatctgcatcaatgacctgatcacagagtacaacaagcagcacaaggccgagctgaagcccctgcgggctgactacctgattgcccgggtggtgacagtgctggagaagctgatcaaggagttccaggacaagggccccaacagcgtgctgcccctgtactaccgctactgggtgcacagcggccagcaggtgcacctgggcagcgctgagggccccaaggtgtccatcgtgggcctggatgacagcggcttcctgcaggtgcaccaggagggcggggaggtggtgacagtgcacccagatggcaacagctttgacatgctgaggaacctgatcctgcccaagagaagatag

SEQ ID NO: 322784 - DNA, 2181 bp, Artificial Sequence
  derived and/or modified sequence
atggaggaccggctgcacatggacaacggcctggtgccccagaagatagtatccgttcacctgcaagatagcacccttaaggaagtcaaggatcaggtgtccaataagcaagcccagatcctggagcctaagcctgagccgtccctggagatcaagcccgagcaggacggaatggaacacgtcggccgcgacgatccgaaagctttgggggaagagcccaaacagagacgtggcagcgcaagtgggtccgagccggcaggtgacagcgatcgtggcggaggccccgttgaacactatcacttgcacttgtcctcctgtcatgaatgcttggagctggaaaattctactatcgagtctgtgaagtttgcctccgccgagaatattcctgacctaccctatgactattctagtagtctcgaatccgtcgccgacgaaactagtccagaaagagaaggaaggagagttaatcttaccggaaaagcacccaatatcctcctgtacgtcgggtcagactcccaagaggccctgggtcggtttcatgaggtgcgctctgtcctcgccgattgcgtagatattgactcttacattctttaccatctactagaggacagcgccctcagagatccatggaccgacaactgcctgcttctggtgatcgctactcgggaatcgatacctgaggacttgtatcagaaatttatggcatacctctcccagggcggtaaagtcttgggccttagttcttctttcacttttggaggctttcaggtaacctccaaaggcgccttgcacaagacagtgcagaatctggtctttagcaaggccgaccagtctgaggttaagctaagcgtcctgtcaagcgggtgcaggtaccaggaaggacctgtcaggctctctcctgggcggttacagggtcatctagagaacgaggataaggataggatgattgtgcatgtaccgtttgggacacggggcggtgaagccgtcctttgtcaggttcatctggagctcccaccaagcagcaacatcgtccagaccccagaggacttcaaccttcttaagagcagcaatttcaggagatatgaagtgctccgtgaaattttgacaaccctgggactgtcctgtgatatgaagcaggtcccagctctcacacccctatacctcctttcagcagcagaggaaatcagggaccccttgatgcagtggctcggcaagcacgtcgactcggaaggcgagattaagagtgggcagctctcccttagattcgtttcttcttacgtcagtgaagttgagatcacacctagctgcatccctgtggtgactaacatggaagcgttctcctcagagcatttcaaccttgagatctacaggcagaacctgcaaacgaaacagttaggtaaggtgatactgtttgctgaggtgactccaactacaatgcgcttattggacggtcttatgtttcagacccctcaagaaatgggcctgattgttattgctgctaggcagaccgaggggaagggacgcggagggaacgtgtggctgtctcccgtgggatgtgccttgagtacgttactgatttccattcctctacgcagtcagctggggcagaggatacctttcgtgcagcacctgatgtctgtggcagtggtggaggccgtaaggagtatccctgagtatcaggacattaacctccgcgttaaatggccaaacgacatttactactcggatctgatgaagatcggtggagtgctcgtcaattctacactgatgggagaaacattttacatactgatcggttgcggatttaacgtaacaaacagtaaccctacaatctgcatcaacgacctcatcaccgagtacaataagcagcataaggccgaactcaaaccgttgcgagctgactatctgatagcgagggtcgtgactgtcttggaaaagctgatcaaagagtttcaggataaggggcccaactctgtactgcccctctattatagatattgggtgcacagtggacaacaagtgcatctggggtccgccgaaggcccgaaagtgtctatcgtgggcctggatgattccggctttttgcaggtgcaccaggaggggggggaggtggtgaccgtccatcctgacggcaattccttcgatatgctgagaaacttgattctgcctaagcgaaggtag

SEQ ID NO: 322785 - DNA, 2181 bp, Artificial Sequence
  derived and/or modified sequence
atggaggaccggctgcacatggacaacggcctggtgccccagaagattgtgagtgtgcacctgcaggattctaccttgaaagaagtgaaagaccaggtgtctaacaaacaggcacagattctggagcccaaaccggaaccgtccctcgaaatcaaaccggaacaggatggaatggagcatgtggggcgcgatgaccctaaagccttgggtgaagagcctaagcagcgaaggggctctgcaagcggttccgaaccggccggggactccgatcgtgggggcggccctgtcgaacactatcatctccatttgtctagttgccatgagtgcctggaattagaaaacagcacaatagagtctgtgaagttcgcctcagctgaaaacatacctgatctaccttatgattacagctcgagcctggaatctgtggctgacgagacttccccagagcgcgagggcagaagagtcaacctcactggtaaagccccaaacatactactgtacgtgggaagtgattcacaggaggccctgggtagattccacgaagtgagatctgtacttgccgactgcgtcgacatcgattcttatatcctatatcacttactggaggattccgcactgcgagatccatggaccgacaactgccttctcctggttatcgccactagggagagtatccccgaagacctgtatcagaaattcatggcttacttaagtcagggaggcaaggtgctgggcctgtccagcagctttacgtttggaggatttcaggtcactagcaagggggccttgcataagactgttcaaaacctcgttttttccaaagccgatcagtcagaagtcaagctgtcggtgctgtcctcaggctgccgctatcaggaaggccctgtgcggctcagccccggaagacttcaggggcacctagagaatgaggacaaggaccgaatgattgtgcatgtgcctttcgggacaaggggcggagaggcagtcctttgccaggtgcacctggaactgccccccagctcaaatatagtgcagacgcccgaggattttaatttgttaaagtccagcaacttcagacgctatgaggtcctgcgtgagatcctcacaacactcgggttgagctgcgacatgaagcaggtgccagccctcacacctctttatctgctgtcggctgcagaagagattcgcgaccccctgatgcagtggttaggaaaacacgtcgactccgagggagagataaaatcgggacagctgtcactcagattcgtgtcgtcttacgtgagcgaggttgagatcactccctcatgcattccggtcgtgacgaacatggaggccttttccagcgaacactttaatctggagatttaccgtcagaatctccagactaaacaactcggtaaggtgatacttttcgccgaggtgaccccgacgacgatgcggttgctggacgggcttatgtttcagaccccccaggagatgggcctgattgtcatcgccgctagacagacagaagggaagggaaggggcggtaacgtgtggctttcccccgtcggatgcgccctttcaacgctcctgatttcaatccctttgcggagccaactcggccagagaatcccctttgtccagcatttgatgtcagtggccgtagtggaggccgttcggagcatccctgaatatcaggatataaaccttcgcgtcaaatggcctaacgatatttactatagtgatctgatgaagatcgggggcgttctcgtcaacagtactcttatgggtgagacattctacatactgattggctgcggattcaacgtcactaactcaaatcccacaatttgcatcaatgatctcatcacagaatataataaacagcacaaagccgagctgaagcccctgcgagccgactatctaatagctagggtggttacagtacttgagaaactcatcaaggaattccaggacaagggccccaacagcgtactccccctttactaccgctattgggtccacagtgggcaacaggtacacctgggaagtgctgaagggcctaaagtatccatagtcggtctagacgatagtggcttcctccaagtccaccaggagggcggtgaagtggtgacagtgcatcctgacgggaattcctttgacatgctgcgtaacctgattctcccaaagcgaagatag

SEQ ID NO: 322786 - DNA, 2181 bp, Artificial Sequence
  derived and/or modified sequence
atggaagaccgcctgcacatggacaatgggctggtccctcaaaaaatagtgtctgtacatcttcaagatagtacactgaaggaggtcaaggaccaggtgtccaataaacaggcccagattcttgaacctaaaccagaacctagcctggaaatcaaacctgagcaggacgggatggagcatgtggggagggacgatcccaaagcccttggggaagaaccaaagcaaaggagaggcagcgcatccggcagcgaacctgccggagactccgacaggggcggtggaccagtggagcactaccatctgcacctgtcaagttgccacgagtgtcttgagttggaaaatagcacaatcgaatcggtgaagttcgcatcggcagagaatattccagaccttccctacgactacagctcctccctcgagagtgtggcagatgaaaccagccccgaaagagaagggaggagagtcaatctaaccggaaaagctccaaacatcttactgtacgtggggtcagactcccaggaggcgctgggcagattccacgaggtgcggtcagtgctggccgactgtgtggacatcgattcttacatactgtatcaccttctggaggactcagctcttcgcgatccgtggaccgataattgtttgctgcttgtgatagcgactcgggagagcatccctgaagacctctatcagaaattcatggcttatctgtctcagggagggaaagtgcttggccttagcagtagctttacattcggtggcttccaggtcacaagtaagggcgctctacataaaacagtgcagaatttagtgttttctaaagccgatcagagtgaagtgaagctttccgtcttaagttcagggtgcagataccaggaaggcccagtgagactctcaccaggcaggctgcagggtcacctcgagaacgaggataaagatcggatgatagtgcacgtgcctttcggtactagggggggtgaagctgtgttgtgccaggtgcacctggaactgccacctagcagtaacatcgtgcaaactcctgaggatttcaacctcctgaagagctctaatttccggagatatgaagttttgagagagatcctcaccaccctcggactttcatgtgacatgaaacaggtgcccgcactcaccccgctgtatctgctgtctgccgcagaggaaattcgggacccgctgatgcagtggcttggtaaacacgtggacagcgaaggggaaatcaagagcggtcagctgagtctccgatttgtttcctcctacgtcagcgaagttgagatcacaccctcttgtatccccgtggtgacaaacatggaggccttttcaagtgagcatttcaacctggagatatacaggcagaacctgcagaccaagcagcttggaaaggtgatcctgtttgctgaagtgaccccaacaactatgcggttactggacggcctgatgttccagacgcctcaggaaatgggtctaatcgtgatcgccgcaaggcagacagaaggaaagggacgcggaggcaatgtttggctgtcccccgtgggctgtgccctctccacactgctcatctccattcctcttagaagccaattgggccaaaggattccctttgttcagcacctcatgagcgttgccgtggtggaggccgtgcgatcaatacctgaataccaagacatcaacctgcgagtgaagtggcccaatgacatctattactccgacctcatgaaaattggcggagtcctggtcaactctacgctgatgggcgagacattttatatcctgattggttgtggcttcaacgtgacaaactccaatccaacaatctgcatcaatgacttaatcacagagtataataagcaacacaaagcagagctcaagccattgagggctgattatcttatcgcccgagtggtcactgtgttagaaaagcttattaaggagttccaggacaagggccctaactcagtgctccccctgtattatcggtactgggtgcattcagggcagcaggtccacctggggagtgcggaaggccctaaggtctcgatcgtcggactcgatgattctggattcctccaggttcaccaagagggaggagaagttgttaccgtgcatcccgacggtaactcctttgatatgctacgcaatttgatactgccaaaaaggcggtag

SEQ ID NO: 322787 - DNA, 2181 bp, Artificial Sequence
  derived and/or modified sequence
atggaagaccggcttcatatggacaacgggctggtaccacagaaaatcgtgagcgtgcacctccaggattctactctgaaggaggtcaaggatcaagtgtcaaataagcaggcccagatcttggagcccaaacctgagccaagtctggaaattaagcctgagcaggatggaatggagcacgtaggtcgggacgatccaaaggcccttggggaggaacccaaacagcggaggggatccgcctcagggagtgaaccagcaggggacagtgacagagggggaggcccagtggagcattaccacctccacctgtctagctgtcacgagtgccttgagctcgaaaattcaactatcgagtctgtaaagttcgcaagcgccgagaacatccccgacctgccctacgactattccagttctctcgagagcgtggccgacgagacaagccctgagcgcgagggcaggcgtgttaatctgacaggtaaggcacccaatatcctgctctacgtggggagcgacagccaagaagcgctgggacgatttcatgaggtaagatccgtgctggctgattgcgtggacattgactcttatatcctgtaccatctcctggaggactctgccctccgggacccctggacagacaattgtctgctgctggttatcgcaacaagggagagcattcctgaagacttatatcagaagttcatggcctatctgtcccagggcggaaaggttttaggactgtcgtcttcctttacattcggaggcttccaggtaacgagcaagggagcactgcataaaacagtccagaacctggtgttctccaaggctgaccagtctgaggtgaaattgagtgtgctttcctcgggctgccgttaccaagagggacctgttcgattgtcccctggccgtttgcagggtcacctcgagaatgaggataaagacagaatgattgtccacgtgcccttcggaactcgcggtggagaggctgtcttgtgccaggtacatctcgagctaccccctagttcgaacatagtgcagacccctgaagatttcaatcttctgaagtcctccaacttccgtagatacgaagttctcagggaaatcctaacaaccctgggactctcttgtgatatgaaacaggtgcctgccttgactcctctgtacctccttagcgccgctgaagagatccgcgacccgctgatgcagtggctggggaagcatgtggactccgagggagagattaaatcagggcagctgtctctgaggtttgtgagcagttatgtctcagaggtagagataacacccagctgcattccggtggtgacaaatatggaggcctttagctcggaacatttcaacctcgaaatctatcgccaaaacctccagacaaagcagcttggaaaagtcattttgttcgccgaggttactcctaccactatgcgactgctagatggcctgatgttccaaactcctcaggagatggggctgatcgtcattgctgcacgacagaccgagggcaagggaagaggcggtaatgtgtggctatctcctgtgggatgcgcattaagtactctgctgatttcaattcctctgcgttcacagcttggccagaggattccttttgtccagcacctcatgtcggtcgcggtggtagaggctgtcaggagcatcccggagtaccaggacatcaacctgagagtgaagtggccaaacgatatttactacagtgatctgatgaagattggcggagtgctggtaaactcaaccctaatgggcgagactttttatattctgatcggttgcggattcaacgtcaccaattccaacccaactatctgcattaacgatttgattacggaatacaacaaacaacacaaagccgaactgaagcccctccgggctgactacctcattgcgagagtggtgacggtgctggagaagctgataaaagaattccaggataaaggacctaactccgtgcttcccctctattataggtattgggtccatagcggccagcaggttcatctcgggtccgccgagggtccaaaggtgagcattgtaggtctggacgattcaggcttcctccaggtgcatcaagagggaggcgaggtggtcactgttcaccctgacggcaattctttcgatatgctacgcaatttgattctgccaaaaagacgatag

SEQ ID NO: 322788 - DNA, 2181 bp, Artificial Sequence
  derived and/or modified sequence
atggaggacagactgcacatggacaacggcctggtgccccagaagatcgtgagcgtgcacctgcaggacagcaccctgaaggaggtgaaggaccaggtgagcaacaagcaggcccagatcctggagcccaagcccgagcccagcctggagatcaagcccgagcaggacggcatggagcacgtgggcagagacgaccccaaggccctgggcgaggagcccaagcagagaagaggcagcgccagcggcagcgagcccgccggcgacagcgacagaggcggcggccccgtggagcactaccacctgcacctgagcagctgccacgagtgcctggagctggagaacagcaccatcgagagcgtgaagttcgccagcgccgagaacatccccgacctgccctacgactacagcagcagcctggagagcgtggccgacgagaccagccccgagagagagggcagaagagtgaacctgaccggcaaggcccccaacatcctgctgtacgtgggcagcgacagccaggaggccctgggcagattccacgaggtgagaagcgtgctggccgactgcgtggacatcgacagctacatcctgtaccacctgctggaggacagcgccctgagagacccctggaccgacaactgcctgctgctggtgatcgccaccagagagagcatccccgaggacctgtaccagaagttcatggcctacctgagccagggcggcaaggtgctgggcctgagcagcagcttcaccttcggcggcttccaggtgaccagcaagggcgccctgcacaagaccgtgcagaacctggtgttcagcaaggccgaccagagcgaggtgaagctgagcgtgctgagcagcggctgcagataccaggagggccccgtgagactgagccccggcagactgcagggccacctggagaacgaggacaaggacagaatgatcgtgcacgtgcccttcggcaccagaggcggcgaggccgtgctgtgccaggtgcacctggagctgccccccagcagcaacatcgtgcagacccccgaggacttcaacctgctgaagagcagcaacttcagaagatacgaggtgctgagagagatcctgaccaccctgggcctgagctgcgacatgaagcaggtgcccgccctgacccccctgtacctgctgagcgccgccgaggagatcagagaccccctgatgcagtggctgggcaagcacgtggacagcgagggcgagatcaagagcggccagctgagcctgagattcgtgagcagctacgtgagcgaggtggagatcacccccagctgcatccccgtggtgaccaacatggaggccttcagcagcgagcacttcaacctggagatctacagacagaacctgcagaccaagcagctgggcaaggtgatcctgttcgccgaggtgacccccaccaccatgagactgctggacggcctgatgttccagaccccccaggagatgggcctgatcgtgatcgccgccagacagaccgagggcaagggcagaggcggcaacgtgtggctgagccccgtgggctgcgccctgagcaccctgctgatcagcatccccctgagaagccagctgggccagagaatccccttcgtgcagcacctgatgagcgtggccgtggtggaggccgtgagaagcatccccgagtaccaggacatcaacctgagagtgaagtggcccaacgacatctactacagcgacctgatgaagatcggcggcgtgctggtgaacagcaccctgatgggcgagaccttctacatcctgatcggctgcggcttcaacgtgaccaacagcaaccccaccatctgcatcaacgacctgatcaccgagtacaacaagcagcacaaggccgagctgaagcccctgagagccgactacctgatcgccagagtggtgaccgtgctggagaagctgatcaaggagttccaggacaagggccccaacagcgtgctgcccctgtactacagatactgggtgcacagcggccagcaggtgcacctgggcagcgccgagggccccaaggtgagcatcgtgggcctggacgacagcggcttcctgcaggtgcaccaggagggcggcgaggtggtgaccgtgcaccccgacggcaacagcttcgacatgctgagaaacctgatcctgcccaagagaagatag

SEQ ID NO: 322789 - DNA, 264 bp, Artificial Sequence
  derived and/or modified sequence
atggaggatcggctgcacatggacaacggcctcgtgccccagaagattgtttcggttcatttgcaagactcaacgcttaaggaggtgaaggaccaggtgtccaataaacaggcccagatcttagagccgaagcccgagccttctttagaaattaagccagagcaagacggaatggagcatgtggggcgcgatgatcctaaggctcttggcgaggagcctaagcagaggaggggtagcgcgtccgggtctgagcccgccggttag

SEQ ID NO: 322790 - DNA, 234 bp, Artificial Sequence
  derived and/or modified sequence
atggaggatcgtttacatatggataatggcttggttccacaaaaaatcgtgagcgtccacctccaggatagtacactcaaggaagtgaaggaccaagtgagcaacaaacaggcacagattctggaaccgaagcccgagccttctctcgagatcaaaccagagcaagacggaatggagcatgtgggtagggatgacccgaaggcactgggcgaggagcccaaacaaaggagatag

SEQ ID NO: 322791 - DNA, 279 bp, Artificial Sequence
  derived and/or modified sequence
atggaggataggctgcatatggataacggcctagtacctcagaagattgtatccgtgcatctgcaggacagcactctcaaggaggttaaggatcaggtctcaaataaacaggcccagattcttgagcccaagccagaacctagcctcgagattaagcctgagcaggatggtatggaacatgtgggcagggacgatccaaaagccctgggcgaagaaccaaagcaacgtcgggggtctgcttcaggatccgagcctgccggcgattctgatcgcggctag

SEQ ID NO: 322792 - DNA, 702 bp, Artificial Sequence
  derived and/or modified sequence
catgctcatcacgctgtgctacctgtacctgtgggcgcgctggggtcgccggccggctgagctcgtgcgcgccacggtgcggcggctgcgtgcctcgcgctgttccttcaccttctgcggcgcggccgcgcagcccccgggcgcccgcgtgtgcctgagccgtggcggccgcgtcttctgcgtcagcgacagccagtccattgaagacttgaacaagtgggccctatttcttgtgtctccttttatacttgaagcagaacacatagcatttgtgacggagagcatttgggtacaaagtgagaatttacagagatcatcctcttcagaaacaattgtcaagtggtcagactgttgtttgccattagcttgcagacctggggatccttatcggctaattgctgaagcaagtgtggacaacttcagcaagctgggggtggcgttcatggaagatagactccacatggataatggactggtaccccaaaagattgtgtcggtgcacttgcaggactccactctgaaggaagttaaggatcaggtctcaaacaagcaagcccagatcctagagccgaagcctgaaccttctcttgagattaagcctgagcaggacggtatggagcatgttggcagagatgacccaaaggctcttggtgaagaacccaaacaaaggagaggcagtgcctctgggagtgagcctgctgg

SEQ ID NO: 322793 - DNA, 666 bp, Artificial Sequence
  derived and/or modified sequence
agcgcggcgcggcagggattcgcgggcgaccacccggcgcaggagcggccgcgtttcggcctcagaatccattgaagacttgaacaagtgggccctatttcttgtgtctccttttatacttgaagcagaacacatagcatttgtgacggagagcatttgggtacaaagtgagaatttacagagatcatcctcttcagaaacaacggagtgtcgttctgtcgtccaggctggagtgcagtggtgtggtctcggctcaccacaacctctgcctactgggttccagtgattctcctgcctcagcatcccgagtagctgggactacagattgtcaagtggtcagactgttgtttgccattagcttgcagacctggggatccttatcggctaattgctgaagcaagtgtggacaacttcagcaagctgggggtggcgttcatggaagatagactccacatggataatggactggtaccccaaaagattgtgtcggtgcacttgcaggactccactctgaaggaagttaaggatcaggtctcaaacaagcaagcccagatcctagagccgaagcctgaaccttctcttgagattaagcctgagcaggacggtatggagcatgttggcagagatgacccaaaggctcttggtgaagaacccaaacaaaggaga

SEQ ID NO: 322794 - DNA, 780 bp, Artificial Sequence
  derived and/or modified sequence
ggccgcccggggctctggggactcgggtgtccaggtgccgaagtcgccgcttccacgggggactcaggcccgtgagtgggtttcctaagaacttaccagattccacggctcgggtttcctgccttggatcctgctttttattccccagggggagttatttatagacaggaatcgtgtgttcaaggcctggctcttcggactcggcgtttttcttgttcgaggtgcttcaatgggggctggatgccatcatcttccagtccattgaagacttgaacaagtgggccctatttcttgtgtctccttttatacttgaagcagaacacatagcatttgtgacggagagcatttgggtacaaagtgagaatttacagagatcatcctcttcagaaacaattgtcaagtggtcagactgttgtttgccattagcttgcagacctggggatccttatcggctaattgctgaagcaagtgtggacaacttcagcaagctgggggtggcgttcatggaagatagactccacatggataatggactggtaccccaaaagattgtgtcggtgcacttgcaggactccactctgaaggaagttaaggatcaggtctcaaacaagcaagcccagatcctagagccgaagcctgaaccttctcttgagattaagcctgagcaggacggtatggagcatgttggcagagatgacccaaaggctcttggtgaagaacccaaacaaaggagaggcagtgcctctgggagtgagcctgctggggacagtgacaggggag

SEQ ID NO: 322795 - DNA, 264 bp, Artificial Sequence
  derived and/or modified sequence
atggaggaccggctgcacatggacaatggcctggtgccccagaagatcgtgtctgtgcacctgcaggacagcaccctgaaggaggtgaaggaccaggtgagcaacaagcaggcccagatcctggagcccaagccagagcccagcctggagatcaagccagagcaggacggcatggagcacgtgggcagagatgaccccaaggccctgggggaggagcccaagcagaggcggggcagcgccagcggcagcgagcccgccggctag

SEQ ID NO: 322796 - DNA, 234 bp, Artificial Sequence
  derived and/or modified sequence
atggaggaccggctgcacatggacaatggcctggtgccccagaagatcgtgtctgtgcacctgcaggacagcaccctgaaggaggtgaaggaccaggtgagcaacaagcaggcccagatcctggagcccaagccagagcccagcctggagatcaagccagagcaggacggcatggagcacgtgggcagagatgaccccaaggccctgggggaggagcccaagcagaggaggtag

SEQ ID NO: 322797 - DNA, 279 bp, Artificial Sequence
  derived and/or modified sequence
atggaggaccggctgcacatggacaatggcctggtgccccagaagatcgtgtctgtgcacctgcaggacagcaccctgaaggaggtgaaggaccaggtgagcaacaagcaggcccagatcctggagcccaagccagagcccagcctggagatcaagccagagcaggacggcatggagcacgtgggcagagatgaccccaaggccctgggggaggagcccaagcagaggcggggcagcgccagcggcagcgagcctgctggggacagcgaccggggctag

SEQ ID NO: 322798 - DNA, 264 bp, Artificial Sequence
  derived and/or modified sequence
atggaggaccggctgcacatggacaacggcctggtgccccagaagattgtgtcagtccacctgcaggacagcacactcaaggaggtgaaagaccaggtgtctaacaagcaggctcaaattttagagcctaagcccgaacccagtttagagattaagccagagcaggatggcatggaacatgttggaagagacgatccgaaggcgctgggcgaggaaccaaaacagaggcggggttccgcttctgggtccgagccggccggctag

SEQ ID NO: 322799 - DNA, 234 bp, Artificial Sequence
  derived and/or modified sequence
atggaggaccggctgcacatggacaacggcctggtgccccagaagattgtctccgtccacctgcaggattctaccttgaaagaggtcaaggaccaggtgtcaaacaaacaggctcaaatcttggaaccgaagcccgagccaagcctggagatcaagcctgagcaggacggaatggagcacgtgggtcgagacgatccaaaagcgcttggcgaggagccaaagcaacgcagatag

SEQ ID NO: 322800 - DNA, 279 bp, Artificial Sequence
  derived and/or modified sequence
atggaggaccggctgcacatggacaacggcctggtgccccagaagattgtgtccgtgcacctacaggacagcacattgaaagaggtgaaagatcaggtctctaacaagcaggcacagatcctcgagcctaaaccggaaccatcactggaaatcaagccggagcaggacgggatggaacatgtgggacgagatgaccccaaggccctgggggaagagcccaagcagcgcagaggatctgcgagcggcagcgaacccgccggcgattcagaccgcgggtag

SEQ ID NO: 322801 - DNA, 264 bp, Artificial Sequence
  derived and/or modified sequence
atggaggaccgtttgcatatggacaatgggttggtgcctcagaagatagtaagcgtccacctccaggacagtacgctgaaggaagtgaaggaccaggtgagcaataaacaggcacagatactagagccgaagccagaaccctctcttgagataaagccggagcaggacgggatggagcacgtgggcagggacgatcctaaagcactgggggaggaacccaaacagcgtcgaggcagtgcctccgggagtgaaccagctggatag

SEQ ID NO: 322802 - DNA, 234 bp, Artificial Sequence
  derived and/or modified sequence
atggaggaccgcctgcacatggataatgggctggtcccccaaaagatagtttcagtgcacctgcaggactccacccttaaagaagtgaaggaccaagtaagcaataagcaggcacagatcctcgagcctaaacccgagccatcccttgaaattaagcccgaacaagatggcatggagcacgtaggaagggacgatcctaaagccctgggggaagagccaaagcagaggagatag

SEQ ID NO: 322803 - DNA, 279 bp, Artificial Sequence
  derived and/or modified sequence
atggaagaccgcctgcatatggacaacggactggtgccacagaaaatcgtttccgtgcatctacaagattctacactcaaagaagtcaaggatcaggtatctaacaagcaagctcagatccttgaacccaagccagaaccctccttggagatcaagcctgaacaggacgggatggagcacgtgggacgagacgaccctaaggcactgggcgaagaacctaagcagcgacgtggctcagcctctggatctgagcccgcaggcgattccgaccggggatag

SEQ ID NO: 322804 - DNA, 264 bp, Artificial Sequence
  derived and/or modified sequence
atggaggacagactgcacatggacaacggcctggtgccccagaagatcgtgagcgtgcacctgcaggacagcaccctgaaggaggtgaaggaccaggtgagcaacaagcaggcccagatcctggagcccaagcccgagcccagcctggagatcaagcccgagcaggacggcatggagcacgtgggcagagacgaccccaaggccctgggcgaggagcccaagcagagaagaggcagcgccagcggcagcgagcccgccggctag

SEQ ID NO: 322805 - DNA, 234 bp, Artificial Sequence
  derived and/or modified sequence
atggaggacagactgcacatggacaacggcctggtgccccagaagatcgtgagcgtgcacctgcaggacagcaccctgaaggaggtgaaggaccaggtgagcaacaagcaggcccagatcctggagcccaagcccgagcccagcctggagatcaagcccgagcaggacggcatggagcacgtgggcagagacgaccccaaggccctgggcgaggagcccaagcagagaagatag

SEQ ID NO: 322806 - DNA, 279 bp, Artificial Sequence
  derived and/or modified sequence
atggaggacagactgcacatggacaacggcctggtgccccagaagatcgtgagcgtgcacctgcaggacagcaccctgaaggaggtgaaggaccaggtgagcaacaagcaggcccagatcctggagcccaagcccgagcccagcctggagatcaagcccgagcaggacggcatggagcacgtgggcagagacgaccccaaggccctgggcgaggagcccaagcagagaagaggcagcgccagcggcagcgagcccgccggcgacagcgacagaggctag

SEQ ID NO: 322807 - protein, 168 aa, Artificial Sequence
  derived and/or modified sequence
MVLFFRINLQTKKCKQKGKGEQRENRPKWLTKKLKKTYLRKTGKRRLRRVQPLMKQERKKPSLINNHIPCLISGPCLPSCTIQRNIFINYFVNASFLVALETFLRRRESHLIPFFKCKCFFLRGEIICWLFIFWYNQKIVWDIELWEALTVSGVSLTFHRWGVSFYIL

SEQ ID NO: 322808 - DNA, 507 bp, Artificial Sequence
  derived and/or modified sequence
atggtgctctttttcagaatcaacctgcaaaccaagaagtgcaaacagaagggaaaaggcgaacagcgcgaaaataggcctaagtggctaaccaagaaactgaagaagacctacctgcggaagacgggaaagaggaggttgagacgggttcagccccttatgaaacaggaacgtaagaagcccagcttgattaacaatcacatcccgtgcttgataagtggaccatgtttaccctcctgtacaattcagcggaatattttcataaactatttcgtgaatgcctccttcctggtggccctggagaccttcctgcgccgacgcgaatcccacctgatcccttttttcaaatgcaagtgcttcttcctgcgaggcgaaatcatttgctggctctttattttctggtacaaccagaaaatcgtctgggatatcgaactttgggaggctctaactgtgtccggcgtcagcctgacattccaccgctggggcgtttctttctacatcctgtag

SEQ ID NO: 322809 - DNA, 1672 bp, Artificial Sequence
  derived and/or modified sequence
atttcaagtccaagatattatgtattctattttaactgtttcccagttttgtattttttgtattggaatgattatgaaattaatgagaaatctttagaaacagactacaaaagagtagttcttaaatacagaagtgattgtgaaactttgtgatagcaatgtgtgtagtagcagttttgtctcaaatacatttatcatttgttactcaaaggatgttgaagtattaaaagtcattatgctgtctgtggaatcctactattagtacagaacaccctgcagtgatttttccgcccgtgttagcattgaagttgtgagctctacttgcttgtctttatggccctttaattcaagtaattggtcagtatccgtatgggtcttttataccacccgctgggggctaaactaatttagctgctgctgtatacttactaacaaggaataaatgttaagctttcttctcagtattgatggatggtatctaaaagtatttttatgtttctttaacatggcttaaattttgaacttaatgtatcaagttagtatggtcatattaatacctgtgcttttcagattcttcaaacacctaaatgaaagtgataaattcaaaactgatccttttagttcctcattatatgatatgaagggattaactgtagcaggatagtcaacctgaccgtacggcatggtgctttttttcaggataaatcttcagacaaaaaagtgcaaacaaaagggaaaaggggagcaaagggaaaacaggccgaagtggctaaccaagaaactaaagaagacttacctgcggaaaacggggaaacgaagactgaggagagtccagcctctgatgaagcaggagagaaagaagccaagtctgattaataaccatataccatgtcttatcagtggtccctgtctcccttcttgtacaatccagaggaatatttttatcaactattttgtaaatgcaagttttttagtagctctagaaacatttttaagaaggagggaatcccacctcatcccattttttaagtgtaaatgcttttttttaagaggtgaaatcatttgctggttgtttattttttggtacaaccagaaaatagtgtgggatattgaattatgggaggctctgactgtctcgggtgtcagcttaacattccacagatggggggttagtttttatatcctataatacaaagcatattaaatggcaatatggagtcagtcctgcatttaatgtcttgaacattttaaattacttctattaccatgttgttttttagtagaattgtttcctaaagaaaaccactctttgatcatggctctctctgccagaattgtgtgcactctgtaacatctttgtggtagtcctgttttcctaataactttgttactgtgctgtgaaagattacagatttgaacatgtagtgtacgtgctgttgagttgtgaactggtgggccgtatgtaacagctgaccaacgtgaagatactggtacttgatagcctcttaaggaaaatttgcttccaaattttaagctggaaagtcactggaataactttaaaaaagaattacaatacatggctttttagaatttcgttacgtatgttaagatttgtgtacaaattgaaatgtctgtactgatcctcaaccaataaaatctcagttatgaaaat

SEQ ID NO: 322810 - DNA, 1383 bp, Artificial Sequence
  derived and/or modified sequence
gctgagtcccgtagccaatgggcgggggtggggggcggcccggccggcggggagggggagcccgcggccggggacgcggggggaggaggaggcgggctcccaatccggttccatccggttctcccaccgcccccgctgtgggtctcagcagctcgggcggcgggaggagtggcagcggcaaggcagcccagtttcgcgaaggctgtcggcgcgccgcggcccgcaggcacccggcacgcgccttccccgcaggcacccggcacgcgccttccccgccgccacgatgcccaagaggaaggtcagctccgccgaaggcgccgccaaggaagagcccaagaggagatcggcgcggttgtcagctaaacctcctgcaaaagtggaagcgaagccgaaaaaggcagcagcgaaggataaatcttcagacaaaaaagtgcaaacaaaagggaaaaggggagcaaagggaaaacaggccgaagtggctaaccaagaaactaaagaagacttacctgcggaaaacggggaaacgaagactgaggagagtccagcctctgatgaagcaggagagaaagaagccaagtctgattaataaccatataccatgtcttatcagtggtccctgtctcccttcttgtacaatccagaggaatatttttatcaactattttgtaaatgcaagttttttagtagctctagaaacatttttaagaaggagggaatcccacctcatcccattttttaagtgtaaatgcttttttttaagaggtgaaatcatttgctggttgtttattttttggtacaaccagaaaatagtgtgggatattgaattatgggaggctctgactgtctcgggtgtcagcttaacattccacagatggggggttagtttttatatcctataatacaaagcatattaaatggcaatatggagtcagtcctgcatttaatgtcttgaacattttaaattacttctattaccatgttgttttttagtagaattgtttcctaaagaaaaccactctttgatcatggctctctctgccagaattgtgtgcactctgtaacatctttgtggtagtcctgttttcctaataactttgttactgtgctgtgaaagattacagatttgaacatgtagtgtacgtgctgttgagttgtgaactggtgggccgtatgtaacagctgaccaacgtgaagatactggtacttgatagcctcttaaggaaaatttgcttccaaattttaagctggaaagtcactggaataactttaaaaaagaattacaatacatggctttttagaatttcgttacgtatgttaagatttgtgtacaaattgaaatgtctgtactgatcctcaaccaataaaatctcagttatgaaaata

SEQ ID NO: 322811 - DNA, 507 bp, Artificial Sequence
  derived and/or modified sequence
atggtgctcttcttccgcatcaacctgcagaccaagaagtgcaagcagaagggcaaaggagagcagcgggagaaccggcccaagtggctgaccaagaagctgaagaagacctacctgaggaagacaggcaagaggcggctgcggcgggtgcagcccctgatgaagcaggagaggaagaagcccagcctcatcaacaaccacatcccctgcctgatcagcggcccctgcctgcccagctgcaccatccagaggaacatcttcatcaactactttgtgaatgccagcttcctggtggccctggagaccttcctgcggcggcgggagagccacctgatccccttcttcaagtgcaagtgcttcttcctgcggggggagatcatctgctggctgttcatcttctggtacaaccagaagatcgtgtgggacatcgagctgtgggaggccctgactgtgtctggagtgtccctgaccttccaccgctggggcgtgtccttctacatcctgtag

SEQ ID NO: 322812 - DNA, 507 bp, Artificial Sequence
  derived and/or modified sequence
atggtgctgttcttccggatcaacctgcagaccaagaagtgcaagcagaaagggaagggtgagcagagagaaaatcgcccaaagtggctgaccaaaaaacttaaaaagacttatctcaggaaaaccggaaaaaggaggctacgcagggtgcagccattgatgaagcaagagcgtaaaaagccgtcccttatcaacaaccacataccctgcctgatcagtggaccttgcctgccaagttgcaccattcaacgcaatatttttatcaactatttcgtaaatgcgtcattcctggtggcgctcgaaacattccttaggcgtagggagtctcacctaattccatttttcaagtgcaagtgtttctttctgaggggagaaataatctgttggctattcatattttggtacaaccagaaaattgtgtgggatatcgaactctgggaggctttgacagtttctggggtttctttgacatttcatagatggggagtgagcttctatattctgtag

SEQ ID NO: 322813 - DNA, 507 bp, Artificial Sequence
  derived and/or modified sequence
atggtcttattcttccgcattaacttacagacaaagaagtgcaaacaaaaaggcaagggcgagcagagagaaaaccgaccaaagtggttaacaaagaaactcaaaaaaacttatctccgaaaaaccggcaagcgaaggctccgtcgggtccagccacttatgaaacaggagcgcaagaaaccatccctgataaacaatcacattccctgcctgattagcggaccgtgcttaccgtcatgtacgatccagagaaacatatttattaattacttcgttaacgcttccttcttagttgcgctggagacatttttgcggaggcgcgaatctcacctgatccctttctttaaatgcaagtgcttttttctgcgaggcgagattatttgctggctgtttatcttctggtacaaccagaaaattgtatgggatatcgagctgtgggaagcactgactgtgtcaggcgtctccctgacattccacaggtggggcgtgtcattttatattctttag

SEQ ID NO: 322814 - DNA, 507 bp, Artificial Sequence
  derived and/or modified sequence
atggtgctgttcttcagaatcaacctgcagaccaagaagtgcaagcagaagggcaagggcgagcagagagagaacagacccaagtggctgaccaagaagctgaagaagacctacctgagaaagaccggcaagagaagactgagaagagtgcagcccctgatgaagcaggagagaaagaagcccagcctgatcaacaaccacatcccctgcctgatcagcggcccctgcctgcccagctgcaccatccagagaaacatcttcatcaactacttcgtgaacgccagcttcctggtggccctggagaccttcctgagaagaagagagagccacctgatccccttcttcaagtgcaagtgcttcttcctgagaggcgagatcatctgctggctgttcatcttctggtacaaccagaagatcgtgtgggacatcgagctgtgggaggccctgaccgtgagcggcgtgagcctgaccttccacagatggggcgtgagcttctacatcctgtag

SEQ ID NO: 322815 - DNA, 402 bp, Artificial Sequence
  derived and/or modified sequence
atggctgccggagacggagacgttaagcttggcaccttaggctcaggtagtgaatcttctaacgatggcggcagtgagtcacctggagacgcaggagctgctgccgaagggggtgggtgggccgccgccgccctggcgttgttgacaggaggcggtgaaatgctgctcaatgtggccctggtggccctcgtactgctgggagcgtaccgactgtgggtgcgctggggccgaagaggtctcggagctggagctggggccggtcttcagcttggggccgccgccccggttcggagacttccgcaacccgctcacccagctcggggacaatgggagtctctgcgtcgggatcaacggcagcaggttctgagacccgggggcagcatctggaacatttgctggtag

SEQ ID NO: 322816 - protein, 375 aa, Artificial Sequence
  derived and/or modified sequence
MDAIHIGMSSTPLVKHTAGAGLKANRPRVMSKSGHSNVRIDKVDGIYLLYLQDLWTTVIDMKWRYKLTLFAATFVMTWFLFGVIYYAIAFIHGDLEPGEPISNHTPCIMKVDSLTGAFLFSLESQTTIGYGVRSITEECPHAIFLLVAQLVITTLIEIFITGTFLAKIARPKKRAETIKFSHCAVITKQNGKLCLVIQVANMRKSLLIQCQLSGKLLQTHVTKEGERILLNQATVKFHVDSSSESPFLILPMTFYHVLDETSPLRDLTPQNLKEKEFELVVLLNATVESTSAVCQSRTSYIPEEIYWGFEFVPVVSLSKNGKYVADFSQFEQIRKSPDCTFYCADSEKQQLEEKYRQEDQRERELRTLLLQQSNV

SEQ ID NO: 322817 - protein, 61 aa, Artificial Sequence
  derived and/or modified sequence
MDAIHIGMSSTPLVKHTAGAGLKANRPRVMSKSGHSNVRIDKVDGIYLLYLQDLWTTVIDM

SEQ ID NO: 322818 - protein, 156 aa, Artificial Sequence
  derived and/or modified sequence
MDAIHIGMSSTPLVKHTAGAGLKANRPRVMSKSGHSNVRIDKVDGIYLLYLQDLWTTVIDMKWRYKLTLFAATFVMTWFLFGVIYYAIAFIHGDLEPGEPISNHTPCIMKVDSLTGAFLFSLESQTTIGYGVRSITEECPHAIFLLVAQLVITTLI

SEQ ID NO: 322819 - protein, 19 aa, Artificial Sequence
  derived and/or modified sequence
MDAIHIGMSSTPLVKHTAG

SEQ ID NO: 322820 - protein, 139 aa, Artificial Sequence
  derived and/or modified sequence
MDAIHIGMSSTPLVKHTAGAGLKANRPRVMSKSGHSNVRIDKVDGIYLLYLQDLWTTVIDMKWRYKLTLFAATFVMTWFLFGVIYYAIAFIHGDLEPGEPISNHTPCIMKVDSLTGAFLFSLESQTTIGYGVRSITEEC

SEQ ID NO: 322821 - protein, 245 aa, Artificial Sequence
  derived and/or modified sequence
MDAIHIGMSSTPLVKHTAGAGLKANRPRVMSKSGHSNVRIDKVDGIYLLYLQDLWTTVIDMKWRYKLTLFAATFVMTWFLFGVIYYAIAFIHGDLEPGEPISNHTPCIMKVDSLTGAFLFSLESQTTIGYGVRSITEECPHAIFLLVAQLVITTLIEIFITGTFLAKIARPKKRAETIKFSHCAVITKQNGKLCLVIQVANMRKSLLIQCQLSGKLLQTHVTKEGERILLNQATVKFHVDSSSES

SEQ ID NO: 322822 - protein, 39 aa, Artificial Sequence
  derived and/or modified sequence
MDAIHIGMSSTPLVKHTAGAGLKANRPRVMSKSGHSNVR

SEQ ID NO: 322823 - protein, 48 aa, Artificial Sequence
  derived and/or modified sequence
MDAIHIGMSSTPLVKHTAGAGLKANRPRVMSKSGHSNVRIDKVDGIYL

SEQ ID NO: 322824 - protein, 25 aa, Artificial Sequence
  derived and/or modified sequence
MDAIHIGMSSTPLVKHTAGAGLKAN

SEQ ID NO: 322825 - DNA, 1128 bp, Artificial Sequence
  derived and/or modified sequence
atggatgccattcatattgggatgtcctcaaccccgctggtcaaacatacggccggcgcggggctgaaggccaaccgaccacgcgtgatgagtaagtctggccatagtaacgtacggatagacaaggtggatggtatatacctgctctacttgcaggatctctggaccacagtgattgacatgaagtggcgatataagcttacgttattcgccgccactttcgtcatgacgtggttcttgtttggagtgatctattacgctattgccttcattcatggcgacctagaacccggagaaccgatctctaatcacacaccctgtattatgaaggtggatagcttgacaggggcattcctgttttcactggaaagccaaacaacaatcggatacggcgtgcgctcaattactgaagagtgccctcacgctatattcctcctagttgcccagctggtgatcacgacactgattgagatatttataacagggaccttcctcgccaaaatcgctcgcccgaaaaaaagagctgaaacaattaagttctctcattgcgcggtcattacaaagcaaaacggaaaactctgcttggtgatccaagttgccaatatgcgcaagtcactcctgattcagtgtcagctctctggcaaacttttgcagacgcacgtgactaaggaaggcgagaggatcttattaaaccaggccactgtgaagtttcacgtggatagttcaagtgaatcaccttttcttatactgccgatgaccttctatcacgtgcttgacgagacctcacccttgagagatctgacccctcagaatctgaaagaaaaggagttcgagctcgtggtgctgctcaacgccactgtggagagtacgagcgctgtatgtcagtcccgcaccagctacattcctgaagaaatctactggggtttcgaattcgtcccagtagttagcttgtcaaaaaatggcaaatacgtagcggattttagccaattcgagcaaatccgcaagagtccagactgcaccttctactgcgccgatagcgagaaacagcagctagaggagaaataccgccaggaggaccagcgcgagagggaactgcggactctgttgttgcaacaaagtaatgtctag

SEQ ID NO: 322826 - DNA, 186 bp, Artificial Sequence
  derived and/or modified sequence
atggatgctatacatatcggcatgagctcaacccccctagtcaaacacactgccggggccggcctgaaagccaacaggccaagggttatgagcaaatcaggccattcgaacgtcaggatcgataaggtggatggtatttatctcctctatcttcaggatctgtggacgaccgtgattgacatgtag

SEQ ID NO: 322827 - DNA, 471 bp, Artificial Sequence
  derived and/or modified sequence
atggatgcgattcacatcggcatgtcctcaacccccctggtgaagcacacagccggtgcagggctgaaggctaatcgcccaagagtgatgtcaaagagcgggcactcaaacgtgagaatcgataaagttgatggtatctatctcctgtacctgcaggatctgtggaccacagtgattgatatgaaatggagatacaagctgacgctttttgccgcaaccttcgtgatgacgtggttcctattcggggttatctactatgccatcgcctttatacacggagacctcgaaccaggcgaacccatttctaaccacactccttgcatcatgaaagttgattccttgaccggtgccttcctgttttcactggagtcccagacaaccatagggtatggggttagaagcattacagaggagtgccctcatgctatttttctgctggttgcacagttagtcattactactcttatatag

SEQ ID NO: 322828 - DNA, 471 bp, Artificial Sequence
  derived and/or modified sequence
atggacgccattcacatcggtatgtcgagtactccattggttaagcacacagctggcgcaggcctcaaggccaacagacctagggtcatgagtaagagtggccacagcaatgtgcgaatagacaaggtagacggaatctatctcttgtacctacaagacctttggactaccgttatagatatgaagtggcggtataagctcactctgttcgcagccacgttcgtcatgacatggtttctgtttggagtgatctactatgctatagcattcatccacggcgacctggaaccaggggagcccataagcaaccacactccttgtataatgaaagtcgattccttaactggtgccttcctcttttccttggaaagtcaaaccactattggctacggagtacgcagcatcacagaggagtgcccacacgccatttttttacttgttgctcagctcgtcatcactacgttaatctag

SEQ ID NO: 322829 - DNA, 1128 bp, Artificial Sequence
  derived and/or modified sequence
atggatgccatccacatcggcatgtcaagcactccacttgtcaagcacactgccggagctggcttaaaagctaatcgacctcgggtcatgtcaaaatcgggacacagtaatgtccgaatcgacaaagtcgatggtatctatctcttgtatctccaggacctttggacaaccgtgattgacatgaagtggagatacaagttgactctgttcgctgccacattcgtgatgacttggtttttattcggtgtgatttactatgccattgcgttcatccacggggacctggaaccaggtgagccaatctcaaatcacacgccatgtattatgaaggtggacagtttgacaggggccttcttgttctccctagagagccagactacgattgggtacggagtgcggtcaattaccgaagaatgtccacacgcaatatttctcctcgtggcccaactggtaattacgactctgatcgagatctttatcacgggtactttcctggccaaaattgcaaggcccaaaaaacgcgcggaaactatcaaattttcacattgtgctgtaattacaaaacagaacggcaagctttgtctggtgattcaggtagctaatatgcgcaagagtctacttattcagtgccaactgtccgggaagctcctgcagactcatgtgacgaaggaaggtgaacgcatcctactcaatcaggctaccgtgaaattccacgttgacagcagtagtgagagcccttttctcattctgcctatgactttctatcacgttctcgatgaaacctcgccattgcgtgacctgactcctcagaacctcaaagaaaaagagttcgaactggttgtgctgctgaacgctaccgtagagtccacaagtgctgtctgccaaagtcggaccagttatatccccgaagaaatttattggggcttcgaattcgtgccagtggtgtccctctccaagaacgggaagtacgttgccgatttcagccaatttgagcaaattcggaagagcccggactgtaccttctactgcgccgatagcgaaaagcagcagcttgaggaaaagtacaggcaggaagatcagagggagagagagctgagaaccttattgctacagcagtcaaatgtgtag

SEQ ID NO: 322830 - DNA, 1128 bp, Artificial Sequence
  derived and/or modified sequence
atggatgccatccacattggcatgagtagtactccccttgtgaagcatacagcaggagcaggcttgaaggccaaccgacctcgcgtcatgagcaagtccgggcactcaaacgtcagaattgataaggtcgacgggatttatttactctacctccaagatttgtggactaccgtaatcgatatgaagtggagatacaaactgaccctcttcgcagcaacatttgtcatgacctggtttctctttggcgtcatctactacgctatagcgttcattcacggggacctggagcctggcgaacctattagcaatcacaccccatgcataatgaaggtggattccttgactggagcatttttatttagtttggagagccagaccacaataggatacggggtaaggagtatcaccgaagaatgccctcatgctatttttctactcgtggcgcagctggttatcacaaccctaatcgagatcttcatcaccgggacttttttggctaaaattgcaaggcccaaaaaacgcgccgaaaccattaagttttcccattgtgctgtaattaccaaacagaatggtaagctttgtctcgttatccaggtcgcaaacatgcggaagtctttactgattcaatgtcagctaagcggaaaactcctgcaaactcatgtgactaaggagggcgagcgtattctgctcaaccaggccacagttaaatttcacgtagacagctcaagcgagtccccctttctcatcctgcccatgactttttaccacgtgctcgacgagacctctccccttagggacctaactcctcagaatttgaaggagaaagagttcgaattggttgtgctgctgaacgctacagtggagagtaccagcgcagtgtgccaatcgagaaccagttatatccccgaagaaatctactgggggtttgaatttgtccctgtagtgagcctgagtaagaatggcaagtacgtggccgacttttcccaatttgaacagatcaggaagagcccagattgtacgttttactgtgctgactctgaaaagcaacagctggaagagaagtaccgccaagaagatcaaagagagcgggaattgcgcaccctcctgctgcaacaatcaaatgtgtag

SEQ ID NO: 322831 - DNA, 1128 bp, Artificial Sequence
  derived and/or modified sequence
atggacgccatccacatagggatgtcatctacacccctcgttaagcatacagccggcgctggccttaaggccaaccggccccgagtgatgtccaaaagcggccactccaatgtgagaattgacaaagtggacggaatctatttactttatctacaggatctctggacaacagtcattgacatgaaatggaggtataaacttaccttgttcgctgcgacgttcgtgatgacctggttcctcttcggagtgatatactatgctatcgctttcattcacggggacttggagcccggagagccaatatctaaccatacgccctgcattatgaaggtcgactccctgactggcgcttttttattctcactcgagtcccagaccacgatcggctatggagtgcggtccatcacagaggagtgcccacatgccatttttctcctggtggctcaactggtgattaccacactgattgagatatttatcacggggactttcttagctaagatcgctaggcctaaaaagcgcgctgaaacaattaagttttcacattgcgccgtcatcactaaacagaatggcaaattgtgtctggttatccaggtcgccaatatgcggaagagtctgttaatccaatgccagctgtccgggaaactgctgcagactcacgtgacgaaggagggcgaaagaatactgttaaaccaggcaaccgtgaagttccatgtagatagctcaagcgagagtccattcctcattttgccgatgaccttttaccacgtgctcgacgagacatctccactgcgagatctcactccccaaaacttgaaagagaaagaattcgagctggtggtgttactgaacgcaaccgtagaaagcacctccgccgtgtgccagagccgcacctcttacatacctgaagaaatctactggggttttgagtttgtaccagtggtctctctctctaaaaacgggaaatacgtggccgatttttcacagtttgaacagatccggaagtcacccgactgtaccttctattgcgctgactctgaaaagcagcagctcgaggaaaaatacagacaggaggaccagcgggaacgtgaattaaggaccctgctgttgcagcagtccaatgtgtag

SEQ ID NO: 322832 - DNA, 1128 bp, Artificial Sequence
  derived and/or modified sequence
atggatgccattcatatcgggatgtcttctaccccactggtgaagcacaccgccggcgcgggccttaaagcaaatcgccctcgggtgatgtccaagtcaggtcactctaacgtacgaatcgacaaggtcgacggtatctatctcctgtacttacaagacctgtggacaaccgtgattgacatgaaatggcggtacaaactaacccttttcgctgcaacctttgttatgacatggtttttatttggtgtgatctactacgctattgccttcattcatggggacctagaaccaggcgagcccatttccaaccacacaccctgcattatgaaagtcgattcattgaccggcgcctttctctttagcctggagtcacaaaccacaattggctatggagtcaggtcgatcactgaggagtgcccacacgcgatttttctgttggtggctcagctggtgattactacactaatcgaaatctttattacggggacattcctggctaaaatcgctcggccgaaaaagcgggcagagaccattaagttctcccattgtgcagtgatcacgaaacagaacgggaagctgtgtctagtgatccaggtggcaaatatgcgcaagtccttgctgatccagtgccagctttccggcaaacttctgcaaacccatgtaaccaaagagggggagcgcattctgctgaatcaggcgacggttaagttccatgtggactcatccagcgaatcaccattcctgatcctgcctatgacattttaccacgtgctggatgaaacttctcccctccgagacctgactccacagaatctgaaggagaaagaattcgagctagttgtcctccttaacgcgactgtagagtcgacgagtgccgtgtgtcagtccaggacctcctacatccctgaagagatttactggggctttgagttcgtgcctgtagtgagcctgtctaagaacggcaagtatgtagcagacttctctcagtttgaacagatcagaaagagtccggactgtaccttttactgcgccgacagtgaaaaacaacagctggaagaaaagtaccggcaagaggatcaaagagaacgagaactgcggacactcttgctccaacaaagtaacgtgtag

SEQ ID NO: 322833 - DNA, 60 bp, Artificial Sequence
  derived and/or modified sequence
atggacgccatacacattggaatgtccagcacacccctggtcaagcataccgcaggttag

SEQ ID NO: 322834 - DNA, 420 bp, Artificial Sequence
  derived and/or modified sequence
atggacgccatacatataggaatgtcttccactcctctcgtgaagcacactgcaggcgctggccttaaagccaacagacctcgcgttatgtccaagtccggacattccaacgtccgcatcgataaggtcgacggtatctatctgctttatctgcaggacttatggaccactgtgatagacatgaagtggaggtacaaactgacactattcgccgctacctttgtgatgacctggttcctgtttggggtcatctactacgcgatcgcctttattcatggagatctcgagccaggcgagccgatatccaaccacactccctgcatcatgaaggtggattcactgactggagcctttttgtttagtttagagagccagacgactattggttacggagtcaggtcaatcacagaagagtgttag

SEQ ID NO: 322835 - DNA, 738 bp, Artificial Sequence
  derived and/or modified sequence
atggacgctattcacattgggatgagtagtacccccctggtgaagcacaccgctggggctggtcttaaagccaaccggccacgggtgatgtcaaaatctggccattcaaacgtgcgaatagataaggtagacgggatctaccttttatacttacaggacttgtggacgaccgttattgatatgaagtggcgatacaagttaaccctctttgccgctaccttcgtcatgacttggttcctgtttggcgttatctattacgccatagcctttatccatggggatttggagcctggcgagcccatcagtaatcatacaccttgtatcatgaaggtggacagcttgactggtgcttttctcttcagccttgaatcccagaccacgatcggctacggggtacgatcgatcactgaagagtgtcctcatgctattttcctcctggttgctcaactcgtcatcactacgctgattgagatctttattactggaactttcctggccaagatagcccggccaaagaagagagccgaaaccatcaagttcagccattgcgccgtcattaccaagcagaacgggaagctctgcctggtcatccaggtagcaaatatgaggaaatcattgctcatccagtgtcaactgagtggcaagctccttcaaacccatgtcaccaaagagggagagaggattctgttaaatcaggctactgtgaaattccacgttgattcaagctccgaatcctag

SEQ ID NO: 322836 - DNA, 120 bp, Artificial Sequence
  derived and/or modified sequence
atggatgctattcacataggaatgagctctacgccactggtgaagcacaccgccggcgccggcctgaaagcaaaccggccaagagtcatgagcaagagcggacacagcaatgttcgttag

SEQ ID NO: 322837 - DNA, 147 bp, Artificial Sequence
  derived and/or modified sequence
atggacgccattcacataggcatgtctagtacccccctcgtgaaacacactgcaggcgcaggtctcaaagcaaacaggccacgggttatgtctaagagcggtcacagtaacgtgaggattgacaaagtcgacggaatctacctgtag

SEQ ID NO: 322838 - DNA, 147 bp, Artificial Sequence
  derived and/or modified sequence
atggacgcaatccacattggcatgagctcaacccctcttgtcaagcatacagcaggtgctggcttgaaggccaatcgacctagagttatgtcaaagagcggacacagtaatgtgcgcatcgacaaagtggacggtatttacttatag

SEQ ID NO: 322839 - DNA, 147 bp, Artificial Sequence
  derived and/or modified sequence
atggatgccatccacatcggaatgtcctcaacccctcttgtgaagcataccgcgggagccgggctgaaagccaatcggccccgggtcatgtcaaagagtgggcacagcaacgtgagaattgacaaggtggacggaatctacctctag

SEQ ID NO: 322840 - DNA, 78 bp, Artificial Sequence
  derived and/or modified sequence
atggacgcaattcatataggcatgtcctctacccccctggtcaagcatactgcaggagccggcctgaaggccaactag

SEQ ID NO: 322841 - DNA, 147 bp, Artificial Sequence
  derived and/or modified sequence
atggatgcgattcacattgggatgtcttccacccctctggtgaaacataccgccggagcaggactgaaagcaaatcgacctcgcgttatgtcgaaatctggccattccaatgtgcgaattgacaaagtagatggaatctatctgtag

SEQ ID NO: 322842 - DNA, 147 bp, Artificial Sequence
  derived and/or modified sequence
atggacgccattcacattgggatgtcctcgaccccactggttaagcacactgccggagccggcctaaaggctaaccggccaagagtcatgagtaagagtgggcattccaatgtgagaattgataaagtcgacgggatatacctctag

SEQ ID NO: 322843 - DNA, 147 bp, Artificial Sequence
  derived and/or modified sequence
atggacgccatccacatcggaatgtctagtactccactggtgaagcatactgccggcgcgggtcttaaggcgaatcgccccagagtaatgtccaagtccggacatagcaacgtgagaatcgacaaggtggacggcatctacctgtag

SEQ ID NO: 322844 - DNA, 1128 bp, Artificial Sequence
  derived and/or modified sequence
atggatgccatccacatcggcatgagcagcacccccctggtgaagcacacagctggggccggcctgaaggccaaccggccccgggtgatgagcaagagcggccacagcaatgtgagaattgacaaggtggatggcatctacctgctgtacctgcaggacctgtggaccaccgtgattgacatgaagtggagatacaagctgaccctgtttgctgccacctttgtgatgacctggttcctgtttggagtcatctactatgccatcgccttcatccacggggacctggagcctggagagcccatcagcaaccacaccccctgcatcatgaaggtggacagcctgactggagccttcctgttcagcctggagagccagaccaccatcggctacggcgtgcgcagcatcacagaggagtgcccccacgccatcttcctgctggtggcccagctggtgatcaccaccctcatcgagatcttcatcaccggcaccttcctggccaagatcgcccggcccaagaagagagctgagaccatcaagttcagccactgtgccgtcatcaccaagcagaatggcaagctgtgcctggtgatccaggtggccaacatgaggaagagcctgctgatccagtgccagctgagcggcaagctgctgcagacccacgtgaccaaggagggggagcgcatcctgctgaaccaggccaccgtgaagttccacgtggacagcagcagcgagagccccttcctgatcctgcccatgaccttctaccacgtgctggatgagaccagccccctgcgggacctgaccccccagaacctgaaggagaaggagtttgagctggtggtgctgctgaatgccaccgtggagagcaccagcgctgtgtgccagagcaggaccagctacatccctgaggagatctactggggctttgaatttgtgcctgtggtgtccctgagcaagaatggcaagtatgtggccgacttcagccagtttgagcagatcaggaagagcccagactgcaccttctactgtgccgacagcgagaagcagcagctggaggagaagtaccggcaggaggaccagcgggagcgggagctgcggaccctgctgctgcagcagagcaatgtgtag

SEQ ID NO: 322845 - DNA, 186 bp, Artificial Sequence
  derived and/or modified sequence
atggatgccatccacatcggcatgagcagcacccccctggtgaagcacacagctggggccggcctgaaggccaaccggccccgggtgatgagcaagagcggccacagcaatgtgagaattgacaaggtggatggcatctacctgctgtacctgcaggacctgtggaccaccgtgattgacatgtag

SEQ ID NO: 322846 - DNA, 471 bp, Artificial Sequence
  derived and/or modified sequence
atggatgccatccacatcggcatgagcagcacccccctggtgaagcacacagctggggccggcctgaaggccaaccggccccgggtgatgagcaagagcggccacagcaatgtgagaattgacaaggtggatggcatctacctgctgtacctgcaggacctgtggaccaccgtgattgacatgaagtggagatacaagctgaccctgtttgctgccacctttgtgatgacctggttcctgtttggagtcatctactatgccatcgccttcatccacggggacctggagcctggagagcccatcagcaaccacaccccctgcatcatgaaggtggacagcctgactggagccttcctgttcagcctggagagccagaccaccatcggctacggcgtgcgcagcatcacagaggagtgcccccacgccatcttcctgctggtggcccagctggtgatcaccaccctcatctag

SEQ ID NO: 322847 - DNA, 60 bp, Artificial Sequence
  derived and/or modified sequence
atggatgccatccacatcggcatgagcagcacccccctggtgaagcacacagctggatag

SEQ ID NO: 322848 - DNA, 420 bp, Artificial Sequence
  derived and/or modified sequence
atggatgccatccacatcggcatgagcagcacccccctggtgaagcacacagctggggccggcctgaaggccaaccggccccgggtgatgagcaagagcggccacagcaatgtgagaattgacaaggtggatggcatctacctgctgtacctgcaggacctgtggaccaccgtgattgacatgaagtggagatacaagctgaccctgtttgctgccacctttgtgatgacctggttcctgtttggagtcatctactatgccatcgccttcatccacggggacctggagcctggagagcccatcagcaaccacaccccctgcatcatgaaggtggacagcctgactggagccttcctgttcagcctggagagccagaccaccatcggctacggcgtgcgcagcatcacagaggagtgctag

SEQ ID NO: 322849 - DNA, 738 bp, Artificial Sequence
  derived and/or modified sequence
atggatgccatccacatcggcatgagcagcacccccctggtgaagcacacagctggggccggcctgaaggccaaccggccccgggtgatgagcaagagcggccacagcaatgtgagaattgacaaggtggatggcatctacctgctgtacctgcaggacctgtggaccaccgtgattgacatgaagtggagatacaagctgaccctgtttgctgccacctttgtgatgacctggttcctgtttggagtcatctactatgccatcgccttcatccacggggacctggagcctggagagcccatcagcaaccacaccccctgcatcatgaaggtggacagcctgactggagccttcctgttcagcctggagagccagaccaccatcggctacggcgtgcgcagcatcacagaggagtgcccccacgccatcttcctgctggtggcccagctggtgatcaccaccctcatcgagatcttcatcaccggcaccttcctggccaagatcgcccggcccaagaagagagctgagaccatcaagttcagccactgtgccgtcatcaccaagcagaatggcaagctgtgcctggtgatccaggtggccaacatgaggaagagcctgctgatccagtgccagctgagcggcaagctgctgcagacccacgtgaccaaggagggggagcgcatcctgctgaaccaggccaccgtgaagttccacgtggacagcagcagcgagagctag

SEQ ID NO: 322850 - DNA, 120 bp, Artificial Sequence
  derived and/or modified sequence
atggatgccatccacatcggcatgagcagcacccccctggtgaagcacacagctggggccggcctgaaggccaaccggccccgggtgatgagcaagagcggccacagcaatgtgaggtag

SEQ ID NO: 322851 - DNA, 147 bp, Artificial Sequence
  derived and/or modified sequence
atggatgccatccacatcggcatgagcagcacccccctggtgaagcacacagctggggccggcctgaaggccaaccggccccgggtgatgagcaagagcggccacagcaatgtgagaattgacaaggtggatggcatctacctgtag

SEQ ID NO: 322852 - DNA, 78 bp, Artificial Sequence
  derived and/or modified sequence
atggatgccatccacatcggcatgagcagcacccccctggtgaagcacacagctggggccggcctgaaggccaactag

SEQ ID NO: 322853 - DNA, 1128 bp, Artificial Sequence
  derived and/or modified sequence
atggacgccatccacatcggcatgagcagcacccccctggtgaagcataccgccggggctgggcttaaagcgaatcgcccgcgggtgatgtcaaagagtggccactcaaacgttcggattgacaaggtcgacggcatttacttactatatttacaagatctctggacgaccgtcatcgatatgaagtggcgttacaagctcacattatttgcggccacgttcgttatgacctggttcctattcggggtaatatactacgctatcgcttttattcatggcgatttggaaccgggggagccaatctccaaccacacaccctgcattatgaaggtggatagtctgaccggtgctttcctattctctttggaatcccagaccaccattggttacggggtacgcagtatcaccgaagagtgtcctcacgccatattcctccttgtcgctcagcttgtcattacgaccctaatcgagattttcatcacaggaacattcctggccaagatcgctagacctaagaagagggctgagacaataaagtttagtcactgcgccgtgataactaagcagaacgggaaattatgcctcgttatccaagtggcaaacatgcgcaagtccctccttattcagtgccagctctccggcaaactgcttcagacccacgtgaccaaggagggtgaacgcatcctcctgaaccaggccaccgtaaagttccatgtagacagcagcagcgagagccctttcctgatactcccaatgacgttctaccatgttctcgacgagaccagtcctcttagagatcttaccccccagaacctgaaggaaaaggaatttgagctggtggtcctgctcaacgccacggtggaatccaccagcgccgtgtgccagagtaggacaagctacatccccgaagagatctattggggattcgaattcgttccagtcgtgagtctgagcaagaacggaaagtatgttgccgacttctctcagtttgaacagatccggaagtcccctgactgcaccttttattgtgccgattccgaaaagcagcagctcgaggagaaatatagacaagaggaccagcgggagcgtgagctcagaacacttcttctacagcaaagcaatgtgtag

SEQ ID NO: 322854 - DNA, 186 bp, Artificial Sequence
  derived and/or modified sequence
atggacgccatccacatcggcatgagcagcacccccctggtgaagcacacagctggggccggcctgaaagctaaccggccgagggtcatgtctaaatctggccattcaaatgtcaggatcgataaggtagatgggatctatctgctgtatttgcaggacttgtggaccaccgtcatagacatgtag

SEQ ID NO: 322855 - DNA, 471 bp, Artificial Sequence
  derived and/or modified sequence
atggacgccatccacatcggcatgagcagcacccccctggtgaagcacacagcgggagctggcctgaaagcaaaccgcccacgagttatgagtaagagcggtcatagtaacgtgagaatagacaaagtggacgggatttatctgctctacttgcaggacctctggacaaccgtcatcgacatgaaatggcgctacaagctgactctgtttgcggccactttcgttatgacctggttcctctttggagttatttattacgcaatcgcttttatacatggcgacctagagcctggcgagcccatatcgaaccatactccttgcatcatgaaagtggatagtcttacaggggccttcctatttagcctagaaagccagaccacaataggctatggtgtacgttccatcaccgaggagtgcccacatgccatttttttactagtcgcacaacttgtaataaccactctcatttag

SEQ ID NO: 322856 - DNA, 471 bp, Artificial Sequence
  derived and/or modified sequence
atggacgccatccacatcggcatgagcagcacccccctggtgaagcacaccgccggggctggcctgaaggcaaatcgcccaagggttatgtcaaagtcaggacactccaacgtcagaatcgacaaggtggacggaatatacttactgtaccttcaagacctgtggacaacagtaatagacatgaaatggcgctacaagctgactctgttcgctgctaccttcgtcatgacatggttcctgttcggcgtgatctactatgccatcgcttttatacatggggacctagagcccggtgaaccaatttcaaaccacaccccttgtatcatgaaagtagactccctgaccggcgcattcctgtttagcttagagtcccaaacaacaattggctatggtgtgcggtctatcacggaggagtgccctcacgccatctttttacttgtcgcacagctagtgattacgacattgatctag

SEQ ID NO: 322857 - DNA, 1128 bp, Artificial Sequence
  derived and/or modified sequence
atggacgccatccacatcggcatgagcagcacccccctggtgaagcacaccgcaggggccgggctaaaagcaaatcgacctagggtgatgagcaaaagcggccactcaaatgtccgtatcgataaagtagacggaatctacctactgtacctgcaggatctgtggactactgtcatagatatgaagtggcgctataagctgacactgtttgccgccacttttgtgatgacttggttcttgttcggtgttatctattacgccatcgcctttattcatggcgatcttgagcctggcgagcccatcagtaaccatactccctgcataatgaaggtggattcactcacaggggccttcctttttagccttgagtcccagacaaccattggttacggagtgaggagcatcactgaggagtgtccgcatgccatcttcctcctcgttgcccaacttgttattacaacactgattgagatcttcattacagggacttttcttgcgaagatcgcacggccaaaaaaaagagctgagaccatcaaattttctcactgtgccgttatcacaaagcagaacgggaaactttgtctcgtaatccaggtggctaacatgcgcaaatcgctgctgatccagtgtcagttgagcggaaagttactccaaacacacgtgacaaaggagggggaacgtatcctgctcaaccaggcgactgtgaagtttcatgtagattcgtccagtgagtcaccgttcctgatactgccaatgactttctaccacgtgctggatgagacatcccccctgcgcgatcttacccctcagaacttaaaagagaaagagttcgaactcgtcgtgctacttaacgccactgtggagagcacatccgctgtctgccagagtagaacgtcttacatacctgaggaaatctactggggcttcgagtttgtgccagttgtgtccctgagtaaaaacggaaagtacgtggcagatttttcccaatttgagcagatccgcaagagccccgactgtactttttattgcgccgactctgagaagcagcagctggaggaaaagtaccgtcaagaggatcagagggagcgggagctgcgtaccctcctcctgcagcagtcaaatgtttag

SEQ ID NO: 322858 - DNA, 1128 bp, Artificial Sequence
  derived and/or modified sequence
atggacgccatccacatcggcatgagcagcacccccctggtgaagcatacagccggagcgggcctgaaagctaatcggccccgcgtcatgtcgaagagtgggcactctaatgttcgcatagataaggtggatggcatttacttactttatctccaggatctgtggactacagtcatagacatgaaatggcgttataaattgaccttgtttgccgcgactttcgttatgacctggttcctgtttggggtgatctactacgctatcgcctttatccatggcgaccttgagcccggggaacctataagcaaccataccccgtgcataatgaaagtcgattctttaacgggcgctttcctgttctctttagaatcacagacgactattggatacggagtcaggagcattaccgaggaatgcccgcatgctatctttctcctagttgcccagcttgttataactacgcttattgagatctttatcaccggcacgtttcttgcaaaaatcgcacggccaaagaagagagccgagaccatcaagttcagccactgtgctgttataaccaagcagaacggtaagttatgcctggtcatccaggtcgccaacatgcgtaaaagtttattgattcagtgtcagctctccggtaagcttctccagacccacgtgaccaaggaaggggagcgaattctgttgaatcaggcgaccgttaaattccacgtcgattctagcagcgagtcgcctttcctgatcctgcctatgactttctaccatgtcctggatgagacaagcccgctgagagatttaacaccccagaacctgaaggaaaaggaatttgagctggttgtgctcctgaacgccactgtggagagtacctccgctgtatgccaatcccgaacttcttacatcccagaggagatatattggggattcgagttcgtgccagttgtgtccctgtccaagaacgggaagtatgtcgccgacttttcgcaatttgagcagattaggaagagccctgattgcaccttttactgtgccgactcagaaaagcagcagttagaagagaaatatagacaagaggatcagcgcgagcgagaattgcgcacactcctgctccagcagagcaacgtgtag

SEQ ID NO: 322859 - DNA, 1128 bp, Artificial Sequence
  derived and/or modified sequence
atggacgccatccacatcggcatgagcagcacccccctggtgaagcacacagccggagccggtcttaaggctaaccggccacgtgtgatgagtaagtcgggtcacagcaacgtccgcatcgataaggtcgatggaatctatctgctgtatctgcaagatttgtggaccaccgtcattgatatgaaatggcgctataagttaacattgtttgcggcgacttttgttatgacatggttcctatttggggttatttactacgcgattgcatttattcacggagatcttgaacccggagagcccatcagcaaccatacaccctgtataatgaaggtggattctttgacaggggctttcctgttctccctggaatctcaaacaactattggctatggtgttcggagcatcaccgaagagtgcccccatgccatctttctgttggtcgcgcagctggtgattactacgctgatagagatttttatcactggaactttcctggcaaagattgcccgccctaagaaacgggcagagacaattaagttttcccactgcgccgtcattaccaaacagaatggcaaactctgtctggtgatccaggtggcaaacatgcggaaaagcttactcatccaatgccaattgtcaggcaaactgctccaaacccatgttactaaagaaggggagcgtatcctgttgaaccaagcaacagtgaaattccacgttgactccagtagcgagtccccctttctgatcctgccaatgactttttaccatgtgttggatgaaacgagccctctgcgggacctcacgccacagaatctgaaggagaaagagtttgaactcgtggtactgctgaatgccaccgttgagagcacaagcgctgtctgtcagagtcgtaccagttacatcccagaagaaatttactgggggtttgagttcgtgcctgtggtctccctgtcaaagaacggcaagtatgtggcagatttttctcaatttgaacagattaggaaatcacccgattgcaccttctactgcgccgactcggagaaacagcaactggaggagaagtatagacaggaagatcagagagagcgcgagttaagaaccctgcttctccaacagagcaatgtgtag

SEQ ID NO: 322860 - DNA, 1128 bp, Artificial Sequence
  derived and/or modified sequence
atggacgccatccacatcggcatgagcagcacccccctggtgaagcatacagccggggccggactgaaagcaaacaggccacgggtgatgtcgaaatctggtcattcgaatgtgagaattgacaaggtcgacgggatctacctcctgtaccttcaggatctttggaccacagtaattgatatgaagtggcggtacaaactgacgctcttcgcagcaacgttcgtgatgacctggttcctgtttggtgtgatctactatgcgattgcattcattcatggtgatctcgaaccgggagaacccatttccaatcacaccccatgcatcatgaaggttgactccctgactggggcttttttatttagtctagagtcccagaccactattggctacggtgtgcgcagcatcactgaagagtgtcctcatgccatcttccttctagtggctcaactggtgattacaacccttatagagatattcatcaccggtacattccttgccaagattgccagacctaagaagagagcggagacaattaagtttagtcattgtgccgttattaccaagcagaacggcaagctttgtttggtgattcaggtggctaacatgcgtaaaagcctgttgatccagtgtcagctgagcggaaaattgctccagactcatgttacaaaggagggcgagcgaatcctgttgaatcaagctaccgtgaaattccacgtggattcaagctccgaatccccttttctaattctgccgatgacattttatcacgtgcttgacgagactagcccgttacgcgacctgacaccccagaacctgaaggaaaaggagtttgagctggttgtgctactgaatgctaccgtcgaaagtacgagtgcagtgtgtcaatcccggacttcttacattccagaagaaatatattgggggtttgagtttgtacccgtggtgtcactttctaaaaacggaaaatacgtggccgattttagtcagttcgaacagattcggaagtctcctgattgtaccttctattgcgctgattcagagaaacagcaactggaggagaaataccgacaagaggatcagcgcgaacgagagctgagaacgctgctcttgcagcaaagcaacgtatag

SEQ ID NO: 322861 - DNA, 420 bp, Artificial Sequence
  derived and/or modified sequence
atggacgccatccacatcggcatgagcagcacccccctggtgaagcacacagccggagcaggtctcaaagcgaacagaccaagggtgatgagtaagtccgggcacagtaacgtaagaatagataaagtcgatggcatttatctgctgtatctgcaagacctatggactacagtcattgacatgaaatggaggtacaagctgacactgttcgccgctacctttgtgatgacgtggttcctcttcggcgtgatctattacgctatcgccttcatccatggggaccttgagccaggggaacctattagcaaccatactccctgcattatgaaggtcgattcactcacgggtgctttcttgttctctctcgagtcgcagaccactatcgggtacggcgtgcgctcaattacggaggaatgctag

SEQ ID NO: 322862 - DNA, 738 bp, Artificial Sequence
  derived and/or modified sequence
atggacgccatccacatcggcatgagcagcacccccctggtgaagcacacggcgggtgctggcctgaaagcgaacaggccccgtgtgatgtccaaatcgggccattcaaatgttcggattgataaggtggatggcatttatctactttacctgcaggatctgtggaccacagtcattgacatgaagtggaggtacaagctgacccttttcgcggccacattcgtcatgacctggtttcttttcggagtgatttactatgccattgcattcatccacggggacctcgaacctggagagccaatctccaatcatacaccatgtataatgaaagttgattcgctcacgggtgcctttttattctccttagagtcacagaccacaatcggatacggcgtccgctccataactgaagaatgtcctcatgcgatctttctgctggtagcgcagctcgtgataacaactctcattgagattttcatcaccggtaccttccttgcaaaaattgccaggccaaagaaaagggccgagacaattaagttttcacactgtgccgtcatcacgaaacagaacgggaaattgtgtctcgtgatccaggtggctaacatgcgcaagtcccttcttattcagtgccaactcagcgggaaattgcttcagacccatgtgaccaaagaaggggagaggatcctgctgaatcaagctactgttaaattccacgttgacagctctagcgaaagttag

SEQ ID NO: 322863 - DNA, 120 bp, Artificial Sequence
  derived and/or modified sequence
atggacgccatccacatcggcatgagcagcacccccctggtgaagcacacagcaggggcagggctaaaggcaaatagaccaagggtgatgagcaagagtggtcactccaatgtgcgttag

SEQ ID NO: 322864 - DNA, 147 bp, Artificial Sequence
  derived and/or modified sequence
atggacgccatccacatcggcatgagcagcacccccctggtgaagcacacagccggagccgggctaaaggcgaaccggccccgggtcatgagcaagtccggacatagcaacgtgagaatagacaaagtagacggtatttatctttag

SEQ ID NO: 322865 - DNA, 147 bp, Artificial Sequence
  derived and/or modified sequence
atggacgccatccacatcggcatgagcagcacccccctggtgaagcacaccgccggcgccggccttaaggccaatcgccctcgagtcatgtcaaaaagcggtcactccaacgttaggattgataaagtagatggcatttatctgtag

SEQ ID NO: 322866 - DNA, 147 bp, Artificial Sequence
  derived and/or modified sequence
atggacgccatccacatcggcatgagcagcacccccctggtgaagcacacagcaggcgccgggctgaaggccaatcgacccagggtcatgtcaaagtccgggcattccaacgtgagaattgataaagtcgacggtatttatttgtag

SEQ ID NO: 322867 - DNA, 78 bp, Artificial Sequence
  derived and/or modified sequence
atggacgccatccacatcggcatgagcagcacccccctggtgaagcacactgctggcgccggattgaaagccaattag

SEQ ID NO: 322868 - DNA, 147 bp, Artificial Sequence
  derived and/or modified sequence
atggacgccatccacatcggcatgagcagcacccccctggtgaagcacacggccggcgccggactcaaggccaacaggccgagggtgatgagcaaaagcggtcactcaaatgtgcgcatcgataaggtggacggtatttatctttag

SEQ ID NO: 322869 - DNA, 147 bp, Artificial Sequence
  derived and/or modified sequence
atggacgccatccacatcggcatgagcagcacccccctggtgaagcacaccgccggagctggccttaaggcaaatagacctcgcgtcatgtcgaagagtgggcatagtaacgtacggatcgataaggtggacgggatctatctgtag

SEQ ID NO: 322870 - DNA, 147 bp, Artificial Sequence
  derived and/or modified sequence
atggacgccatccacatcggcatgagcagcacccccctggtgaagcatacagctggagcggggctaaaggccaataggccgagggtgatgtccaaaagtggccactctaatgtccggattgacaaggtggacgggatttacctgtag

SEQ ID NO: 322871 - DNA, 2863 bp, Artificial Sequence
  derived and/or modified sequence
aggtgtttggagagcccggactggatgcccactagaatcctgtgctgtgaacagtgagagagttttcttcattttgaggaaccctaaacacctatctttcccaaggcaacctgtctggactgagcatttctctgacttgacataacttcccatccagccaggagtctgcactcttcagtctttgcaggcagtagcagaatcccatggtagccaggtgggtgaaggggagcgaggacgttctacctgccttgaagaagacacctgacctgcggagtgagtgaccagtgtttccagagcctggcaatggatgccattcacatcggcatgtccagcacccccctggtgaagcacactgctggggctgggctcaaggccaacagaccccgcgtcatgtccaagagtgggcacagcaacgtgagaattgacaaagtggatggcatatacctactctacctgcaagacctgtggaccacagttatcgacatgaagtggagatacaaactcaccctgttcgctgccacttttgtgatgacctggttcctttttggagtcatctactatgccatcgcgtttattcatggggacttagaacccggtgagcccatttcaaatcataccccctgcatcatgaaagtggactctctcactggggcgtttctcttttccctggaatcccagacaaccattggctatggagtccgttccatcacagaggaatgtcctcatgccatcttcctgttggttgctcagttggtcatcacgaccttgattgagatcttcatcaccggaaccttcctggccaaaatcgccagacccaaaaagcgggctgagaccatcaagttcagccactgtgcagtcatcaccaagcagaatgggaagctgtgcttggtgattcaggtagccaatatgaggaagagcctcttgattcagtgccagctctctggcaagctcctgcagacccacgtcaccaaggagggggagcggattctcctcaaccaagccactgtcaaattccacgtggactcctcctctgagagccccttcctcattctgcccatgacattctaccatgtgctggatgagacgagccccctgagagacctcacaccccaaaacctaaaggagaaggagtttgagcttgtggtcctcctcaatgccactgtggaatccaccagcgctgtctgccagagccgaacatcttatatcccagaggaaatctactggggttttgagtttgtgcctgtggtatctctctccaaaaatggaaaatatgtggctgatttcagtcagtttgaacagattcggaaaagcccagattgcacattttactgtgcagattctgagaaacagcaactcgaggagaagtacaggcaggaggatcagagggaaagagaactgaggacacttttattacaacagagcaatgtctgatcacaggggcgccatccaggtttaaccctgcaagctgtttccacatcagaactcccttcaaacacaaagattgctgtgaaaacgaaaatgtgtagacgcactctcaaaaactgcacggacatacaaaatcaatcttttcctttgatcttgtggctaaaccagcatttctgtgtttgagagatttcctgttaggtgcttcgtctgaaagtgaactctcataattcaaattgtataaaataaagctacatttctaagagcttggtgtagggcaattggaataatgtcctgttagataaacagacatttagcaatcctgacattaaaaggaaatgtatttctatacaagattattagctgtaatacaagatatttatttaaccaatgaccttatggctgagagttgaattgtggttcagtattcattgatctcactgctttaaaacatgctctttttgttcaagcaggaaaaatattatatctaattatgtctatgtggtaatacctaaaaagaggtagagagactctatgttcacaaaatatagtaatttcatttttacctttcttcagtggactgaattgtatggaaggaaattgatcagatctgtaattcacaactgtggaaacctacacaaatggggctgatgccattgtttcctctattttattttatttatttttgaatccactatctctttccattcaaaatatttccattcaaaatgtggttcacagacccgccacatcagcaccatccgagagcttattagtaatgtgtagattctcatgtcccagccagacttacagaattggggtctgtatcttaacaagaaccccagatgatttgtgtacaaatgaaagttcgaaagctgtgctctggacagtgttctcaaagcaactttctgaagccgtgtggaaaactgactctgtgtgggtcccgtatccctgtggcatccagacctggcctctcttcatttcattattattggccaatatttctttcagccatttcatttcttatctattaaaatggcttgcccataaaggaactgcataggattatcccctgacattccaagagcaaaataaagctcttgagagtaattgttgtctcagtcatgcttgctgattacagttagcacaaaagaaaaattcagctgcctgacaatacaggaaatgttctcagatgctgatgtttgtaaggtccggtggggccatgaggaagaagaggagctgaaggtaagaaactcataaacaagatgactctttgatgcatgaacaagatttgaaaatctcaagcctgtaaagaatacccctgctatttaaataaagctcataccaagaggtaacattttgccccgggccaaattcaggggtctagtgccctgcattcctttgaggcaaaaaataaatgggctatgactggttaaatgtc

SEQ ID NO: 322872 - DNA, 532 bp, Artificial Sequence
  derived and/or modified sequence
aggtgtttggagagcccggactggatgcccactagaatcctgtgctggcaacctgtctggactgagcatttctctgacttgacataacttcccatccagccaggagtctgcactcttcagtctttgcaggacaggtgggagttaaccaagaaagggagaaaatgaagaaccttcaggaaggaattcatgtgccagatgtgggctgagagggcacccagctgctcaggaaggggcagtagcagaatcccatggtagccaggtgggtgaaggggagcgaggacgttctacctgccttgaagaagacacctgacctgcggagtgagtgaccagtgtttccagagcctggcaatggatgccattcacatcggcatgtccagcacccccctggtgaagcacactgctggggctgggctcaaggccaacagaccccgcgtcatgtccaagagtgggcacagcaacgtgagaattgacaaagtggatggcatatacctactctacctgcaagacctgtggaccacagttatcgacatga

SEQ ID NO: 322873 - DNA, 665 bp, Artificial Sequence
  derived and/or modified sequence
aaaatattctagactcttcccttccagcgctcactgtttacttcctctgcacttccccttcctgcctccccgtgtgccggcagtagcagaatcccatggtagccaggtgggtgaaggggagcgaggacgttctacctgccttgaagaagacacctgacctgcggagtgagtgaccagtgtttccagagcctggcaatggatgccattcacatcggcatgtccagcacccccctggtgaagcacactgctggggctgggctcaaggccaacagaccccgcgtcatgtccaagagtgggcacagcaacgtgagaattgacaaagtggatggcatatacctactctacctgcaagacctgtggaccacagttatcgacatgaagtggagatacaaactcaccctgttcgctgccacttttgtgatgacctggttcctttttggagtcatctactatgccatcgcgtttattcatggggacttagaacccggtgagcccatttcaaatcataccccctgcatcatgaaagtggactctctcactggggcgtttctcttttccctggaatcccagacaaccattggctatggagtccgttccatcacagaggaatgtcctcatgccatcttcctgttggttgctcagttggtcatcacgaccttgattga

SEQ ID NO: 322874 - DNA, 715 bp, Artificial Sequence
  derived and/or modified sequence
aggtgtttggagagcccggactggatgcccactagaatcctgtgctggcaacctgtctggactgagcatttctctgacttgacataacttcccatccagccaggagtctgcactcttcagtctttgcaggcagtagcagaatcccatggtagccaggtgggtgaaggggagcgaggacgttctacctgccttgaagaagacacctgacctgcggagtgagtgaccagtgtttccagagcctggcaatggatgccattcacatcggcatgtccagcacccccctggtgaagcacactgctggggctgggctcaaggccaacagaccccgcgtcatgtccaagagtgggcacagcaacgtgagaattgacaaagtggatggcatatacctactctacctgcaagacctgtggaccacagttatcgacatgaagtggagatacaaactcaccctgttcgctgccacttttgtgatgacctggttcctttttggagtcatctactatgccatcgcgtttattcatggggacttagaacccggtgagcccatttcaaatcataccccctgcatcatgaaagtggactctctcactggggcgtttctcttttccctggaatcccagacaaccattggctatggagtccgttccatcacagaggaatgtcctcatgccatcttcctgttggttgctcagttggtcatcacgaccttgattga

SEQ ID NO: 322875 - DNA, 2914 bp, Artificial Sequence
  derived and/or modified sequence
acaggagcacgtagcctgcaggtgtgggttgtacacaggcttccccctgctgagtcagttccccagatctcttcatcacttccccagatctctgggatcttcagctgagattgggccccagcacctggactcaaggacaggtgggagttaaccaagaaagggagaaaatgaagaaccttcaggaaggaattcatgtgccagatgtgggctgagagggcacccagctgctcaggaaggggcagtagcagaatcccatggtagccaggtgggtgaaggggagcgaggacgttctacctgccttgaagaagacacctgacctgcggagtgagtgaccagtgtttccagagcctggcaatggatgccattcacatcggcatgtccagcacccccctggtgaagcacactgctggggctgggctcaaggccaacagaccccgcgtcatgtccaagagtgggcacagcaacgtgagaattgacaaagtggatggcatatacctactctacctgcaagacctgtggaccacagttatcgacatgaagtggagatacaaactcaccctgttcgctgccacttttgtgatgacctggttcctttttggagtcatctactatgccatcgcgtttattcatggggacttagaacccggtgagcccatttcaaatcataccccctgcatcatgaaagtggactctctcactggggcgtttctcttttccctggaatcccagacaaccattggctatggagtccgttccatcacagaggaatgtcctcatgccatcttcctgttggttgctcagttggtcatcacgaccttgattgagatcttcatcaccggaaccttcctggccaaaatcgccagacccaaaaagcgggctgagaccatcaagttcagccactgtgcagtcatcaccaagcagaatgggaagctgtgcttggtgattcaggtagccaatatgaggaagagcctcttgattcagtgccagctctctggcaagctcctgcagacccacgtcaccaaggagggggagcggattctcctcaaccaagccactgtcaaattccacgtggactcctcctctgagagccccttcctcattctgcccatgacattctaccatgtgctggatgagacgagccccctgagagacctcacaccccaaaacctaaaggagaaggagtttgagcttgtggtcctcctcaatgccactgtggaatccaccagcgctgtctgccagagccgaacatcttatatcccagaggaaatctactggggttttgagtttgtgcctgtggtatctctctccaaaaatggaaaatatgtggctgatttcagtcagtttgaacagattcggaaaagcccagattgcacattttactgtgcagattctgagaaacagcaactcgaggagaagtacaggcaggaggatcagagggaaagagaactgaggacacttttattacaacagagcaatgtctgatcacaggggcgccatccaggtttaaccctgcaagctgtttccacatcagaactcccttcaaacacaaagattgctgtgaaaacgaaaatgtgtagacgcactctcaaaaactgcacggacatacaaaatcaatcttttcctttgatcttgtggctaaaccagcatttctgtgtttgagagatttcctgttaggtgcttcgtctgaaagtgaactctcataattcaaattgtataaaataaagctacatttctaagagcttggtgtagggcaattggaataatgtcctgttagataaacagacatttagcaatcctgacattaaaaggaaatgtatttctatacaagattattagctgtaatacaagatatttatttaaccaatgaccttatggctgagagttgaattgtggttcagtattcattgatctcactgctttaaaacatgctctttttgttcaagcaggaaaaatattatatctaattatgtctatgtggtaatacctaaaaagaggtagagagactctatgttcacaaaatatagtaatttcatttttacctttcttcagtggactgaattgtatggaaggaaattgatcagatctgtaattcacaactgtggaaacctacacaaatggggctgatgccattgtttcctctattttattttatttatttttgaatccactatctctttccattcaaaatatttccattcaaaatgtggttcacagacccgccacatcagcaccatccgagagcttattagtaatgtgtagattctcatgtcccagccagacttacagaattggggtctgtatcttaacaagaaccccagatgatttgtgtacaaatgaaagttcgaaagctgtgctctggacagtgttctcaaagcaactttctgaagccgtgtggaaaactgactctgtgtgggtcccgtatccctgtggcatccagacctggcctctcttcatttcattattattggccaatatttctttcagccatttcatttcttatctattaaaatggcttgcccataaaggaactgcataggattatcccctgacattccaagagcaaaataaagctcttgagagtaattgttgtctcagtcatgcttgctgattacagttagcacaaaagaaaaattcagctgcctgacaatacaggaaatgttctcagatgctgatgtttgtaaggtccggtggggccatgaggaagaagaggagctgaaggtaagaaactcataaacaagatgactctttgatgcatgaacaagatttgaaaatctcaagcctgtaaagaatacccctgctatttaaataaagctcataccaagaggtaacattttgccccgggccaaattcaggggtctagtgccctgcattcctttgaggcaaaaaataaatgggctatgactggttaaatgtc

SEQ ID NO: 322876 - DNA, 2747 bp, Artificial Sequence
  derived and/or modified sequence
ctgtctttcacccataaaaactgaagccatgtgccagaagccctcgtggctcaagggctctgtccttggacacggatgagggcagctgggcggtgggaccgaggctctgcctgaatgctcagcttctgcaagctggggtggagagtgtgttcctgcctaccggctcagccagcacaggagcacgtagcctgcaggtgtgggttgtacacaggcttccccctgctgagtcagttccccagatctcttcatcacttccccagatctctgggatcttcagctgagattgggccccagcacctggactcaaggacaggtgggagttaaccaagaaagggagaaaatgaagaaccttcaggaaggaattcatgtgccagatgtgggctgagagggcacccagctgctcaggaaggggcagtagcagaatcccatggtagccaggtgggtgaaggggagcgaggacgttctacctgccttgaagaagacacctgacctgcggagtgagtgaccagagcctggcaatggatgccattcacatcggcatgtccagcacccccctggtgaagcacactgctggggctgggctcaaggccaacagaccccgcgtcatgtccaagagtgggcacagcaacgtgagaattgacaaagtggatggcatatacctactctacctgcaagacctgtggaccacagttatcgacatgaagtggagatacaaactcaccctgttcgctgccacttttgtgatgacctggttcctttttggagtcatctactatgccatcgcgtttattcatggggacttagaacccggtgagcccatttcaaatcataccccctgcatcatgaaagtggactctctcactggggcgtttctcttttccctggaatcccagacaaccattggctatggagtccgttccatcacagaggaatgtcctcatgccatcttcctgttggttgctcagttggtcatcacgaccttgattgagatcttcatcaccggaaccttcctggccaaaatcgccagacccaaaaagcgggctgagaccatcaagttcagccactgtgcagtcatcaccaagcagaatgggaagctgtgcttggtgattcaggtagccaatatgaggaagagcctcttgattcagtgccagctctctggcaagctcctgcagacccacgtcaccaaggagggggagcggattctcctcaaccaagccactgtcaaattccacgtggactcctcctctgagagccccttcctcattctgcccatgacattctaccatgtgctggatgagacgagccccctgagagacctcacaccccaaaacctaaaggagaaggagtttgagcttgtggtcctcctcaatgccactgtggaatccaccagcgctgtctgccagagccgaacatcttatatcccagaggaaatctactggggttttgagtttgtgcctgtggtatctctctccaaaaatggaaaatatgtggctgatttcagtcagtttgaacagattcggaaaagcccagattgcacattttactgtgcagattctgagaaacagcaactcgaggagaagtacaggcaggaggatcagagggaaagagaactgaggacacttttattacaacagagcaatgtctgatcacaggggcgccatccaggtttaaccctgcaagctgtttccacatcagaactcccttcaaacacaaagattgctgtgaaaacgaaaatgtgtagacgcactctcaaaaactgcacggacatacaaaatcaatcttttcctttgatcttgtggctaaaccagcatttctgtgtttgagagatttcctgttaggtgcttcgtctgaaagtgaactctcataattcaaattgtataaaataaagctacatttctaagagcttggtgtagggcaattggaataatgtcctgttagataaacagacatttagcaatcctgacattaaaaggaaatgtatttctatacaagattattagctgtaatacaagatatttatttaaccaatgaccttatggctgagagttgaattgtggttcagtattcattgatctcactgctttaaaacatgctctttttgttcaagcaggaaaaatattatatctaattatgtctatgtggtaatacctaaaaagaggtagagagactctatgttcacaaaatatagtaatttcatttttacctttcttcagtggactgaattgtatggaaggaaattgatcagatctgtaattcacaactgtggaaacctacacaaatggggctgatgccattgtttcctctattttattttatttatttttgaatccactatctctttccattcaaaatatttccattcaaaatgtggttcacagacccgccacatcagcaccatccgagagcttattagtaatgtgtagattctcatgtcccagccagacttacagaattggggtctgtatcttaacaagaaccccagatgatttgtgtacaaatgaaagttcgaaagctgtgctctggacagtgttctcaaagcaactttctgaagccgtgtggaaaactgactctgtgtgggtcccgtatccctgtggcatccagacctggcctctcttcatttcattattattggccaatatttctttcagccatttcatttcttatctattaaaatggcttgcccataaaggaactgcataggattatcccctgacattccaagagcaaaataaagctcttgagagtaa

SEQ ID NO: 322877 - DNA, 2732 bp, Artificial Sequence
  derived and/or modified sequence
cagatctctgggatcttcagctgagattgggccccagcacctggactcaaggcagtagcagaatcccatggtagccaggtgggtgaaggggagcgaggacgttctacctgccttgaagaagacacctgacctgcggagtgagtgaccagtgtttccagagcctggcaatggatgccattcacatcggcatgtccagcacccccctggtgaagcacactgctggggctgggctcaaggccaacagaccccgcgtcatgtccaagagtgggcacagcaacgtgagaattgacaaagtggatggcatatacctactctacctgcaagacctgtggaccacagttatcgacatgaagtggagatacaaactcaccctgttcgctgccacttttgtgatgacctggttcctttttggagtcatctactatgccatcgcgtttattcatggggacttagaacccggtgagcccatttcaaatcataccccctgcatcatgaaagtggactctctcactggggcgtttctcttttccctggaatcccagacaaccattggctatggagtccgttccatcacagaggaatgtcctcatgccatcttcctgttggttgctcagttggtcatcacgaccttgattgagatcttcatcaccggaaccttcctggccaaaatcgccagacccaaaaagcgggctgagaccatcaagttcagccactgtgcagtcatcaccaagcagaatgggaagctgtgcttggtgattcaggtagccaatatgaggaagagcctcttgattcagtgccagctctctggcaagctcctgcagacccacgtcaccaaggagggggagcggattctcctcaaccaagccactgtcaaattccacgtggactcctcctctgagagccccttcctcattctgcccatgacattctaccatgtgctggatgagacgagccccctgagagacctcacaccccaaaacctaaaggagaaggagtttgagcttgtggtcctcctcaatgccactgtggaatccaccagcgctgtctgccagagccgaacatcttatatcccagaggaaatctactggggttttgagtttgtgcctgtggtatctctctccaaaaatggaaaatatgtggctgatttcagtcagtttgaacagattcggaaaagcccagattgcacattttactgtgcagattctgagaaacagcaactcgaggagaagtacaggcaggaggatcagagggaaagagaactgaggacacttttattacaacagagcaatgtctgatcacaggggcgccatccaggtttaaccctgcaagctgtttccacatcagaactcccttcaaacacaaagattgctgtgaaaacgaaaatgtgtagacgcactctcaaaaactgcacggacatacaaaatcaatcttttcctttgatcttgtggctaaaccagcatttctgtgtttgagagatttcctgttaggtgcttcgtctgaaagtgaactctcataattcaaattgtataaaataaagctacatttctaagagcttggtgtagggcaattggaataatgtcctgttagataaacagacatttagcaatcctgacattaaaaggaaatgtatttctatacaagattattagctgtaatacaagatatttatttaaccaatgaccttatggctgagagttgaattgtggttcagtattcattgatctcactgctttaaaacatgctctttttgttcaagcaggaaaaatattatatctaattatgtctatgtggtaatacctaaaaagaggtagagagactctatgttcacaaaatatagtaatttcatttttacctttcttcagtggactgaattgtatggaaggaaattgatcagatctgtaattcacaactgtggaaacctacacaaatggggctgatgccattgtttcctctattttattttatttatttttgaatccactatctctttccattcaaaatatttccattcaaaatgtggttcacagacccgccacatcagcaccatccgagagcttattagtaatgtgtagattctcatgtcccagccagacttacagaattggggtctgtatcttaacaagaaccccagatgatttgtgtacaaatgaaagttcgaaagctgtgctctggacagtgttctcaaagcaactttctgaagccgtgtggaaaactgactctgtgtgggtcccgtatccctgtggcatccagacctggcctctcttcatttcattattattggccaatatttctttcagccatttcatttcttatctattaaaatggcttgcccataaaggaactgcataggattatcccctgacattccaagagcaaaataaagctcttgagagtaattgttgtctcagtcatgcttgctgattacagttagcacaaaagaaaaattcagctgcctgacaatacaggaaatgttctcagatgctgatgtttgtaaggtccggtggggccatgaggaagaagaggagctgaaggtaagaaactcataaacaagatgactctttgatgcatgaacaagatttgaaaatctcaagcctgtaaagaatacccctgctatttaaataaagctcataccaagaggtaacattttgccccgggccaaattcaggggtctagtgccctgcattcctttgaggcaaaaaataaatgggctatgactggttaaatgtccaaaa

SEQ ID NO: 322878 - DNA, 2583 bp, Artificial Sequence
  derived and/or modified sequence
ctcctctgcccaatgtctcccaatctctttcctttctctcttcagttcctccaggtaattcttactcaaacttgtaccaacttgtttttgactgacagtgaacagtgagagagttttcttcattttgaggaaccctaaacacctatctttcccaaggcaacctgtctggactgagcatttctctgacttgacataacttcccatccagccaggagtctgcactcttcagtctttgcaggcagtagcagaatcccatggtagccaggtgggtgaaggggagcgaggacgttctacctgccttgaagaagacacctgacctgcggagtgagtgaccagtgtttccagagcctggcaatggatgccattcacatcggcatgtccagcacccccctggtgaagcacactgctggggctgggctcaaggccaacagaccccgcgtcatgtccaagagtgggcacagcaacgtgagaattgacaaagtggatggcatatacctactctacctgcaagacctgtggaccacagttatcgacatgaagtggagatacaaactcaccctgttcgctgccacttttgtgatgacctggttcctttttggagtcatctactatgccatcgcgtttattcatggggacttagaacccggtgagcccatttcaaatcataccccctgcatcatgaaagtggactctctcactggggcgtttctcttttccctggaatcccagacaaccattggctatggagtccgttccatcacagaggaatgtcctcatgccatcttcctgttggttgctcagttggtcatcacgaccttgattgagatcttcatcaccggaaccttcctggccaaaatcgccagacccaaaaagcgggctgagaccatcaagttcagccactgtgcagtcatcaccaagcagaatgggaagctgtgcttggtgattcaggtagccaatatgaggaagagcctcttgattcagtgccagctctctggcaagctcctgcagacccacgtcaccaaggagggggagcggattctcctcaaccaagccactgtcaaattccacgtggactcctcctctgagagccccttcctcattctgcccatgacattctaccatgtgctggatgagacgagccccctgagagacctcacaccccaaaacctaaaggagaaggagtttgagcttgtggtcctcctcaatgccactgtggaatccaccagcgctgtctgccagagccgaacatcttatatcccagaggaaatctactggggttttgagtttgtgcctgtggtatctctctccaaaaatggaaaatatgtggctgatttcagtcagtttgaacagattcggaaaagcccagattgcacattttactgtgcagattctgagaaacagcaactcgaggagaagtacaggcaggaggatcagagggaaagagaactgaggacacttttattacaacagagcaatgtctgatcacaggggcgccatccaggtttaaccctgcaagctgtttccacatcagaactcccttcaaacacaaagattgctgtgaaaacgaaaatgtgtagacgcactctcaaaaactgcacggacatacaaaatcaatcttttcctttgatcttgtggctaaaccagcatttctgtgtttgagagatttcctgttaggtgcttcgtctgaaagtgaactctcataattcaaattgtataaaataaagctacatttctaagagcttggtgtagggcaattggaataatgtcctgttagataaacagacatttagcaatcctgacattaaaaggaaatgtatttctatacaagattattagctgtaatacaagatatttatttaaccaatgaccttatggctgagagttgaattgtggttcagtattcattgatctcactgctttaaaacatgctctttttgttcaagcaggaaaaatattatatctaattatgtctatgtggtaatacctaaaaagaggtagagagactctatgttcacaaaatatagtaatttcatttttacctttcttcagtggactgaattgtatggaaggaaattgatcagatctgtaattcacaactgtggaaacctacacaaatggggctgatgccattgtttcctctattttattttatttatttttgaatccactatctctttccattcaaaatatttccattcaaaatgtggttcacagacccgccacatcagcaccatccgagagcttattagtaatgtgtagattctcatgtcccagccagacttacagaattggggtctgtatcttaacaagaaccccagatgatttgtgtacaaatgaaagttcgaaagctgtgctctggacagtgttctcaaagcaactttctgaagccgtgtggaaaactgactctgtgtgggtcccgtatccctgtggcatccagacctggcctctcttcatttcattattattggccaatatttctttcagccatttcatttcttatctattaaaatggcttgcccataaaggaactgcataggattatcccctgacattccaagagcaaaataaagctcttgagagtaa

SEQ ID NO: 322879 - DNA, 727 bp, Artificial Sequence
  derived and/or modified sequence
actctctctctctgtctctcactttctctcctttcctccctccctccctccctccctccttccctatccctccctcctctgcccaatgtctcccaatctctttcctttctctcttcagttcctccaggtaattcttactcaaacttgtaccaacttgtttttgactgacagtgaacagtgagagagttttcttcattttgaggaaccctaaacacctatctttcccaaggcaacctgtctggactgagcatttctctgacttgacataacttcccatccagccaggagtctgcactcttcagtctttgcaggacaggtgggagttaaccaagaaagggagaaaatgaagaaccttcaggaaggaattcatgtgccagatgtgggctgagagggcacccagctgctcaggaaggggcagtagcagaatcccatggtagccaggtgggtgaaggggagcgaggacgttctacctgccttgaagaagacacctgacctgcggagtgagtgaccaggaatgtgggggaaatttatgtcagtcatcaggcaggtactagaagatgctaggggcctcacagacagcttgttcccggctgttaacatggagcagagcgttccctggggctgagcatgggagcccagcacttcttatagtgtttccagagcctggcaatggatgccattcacatcggcatgtccagcacccccctggtgaagcacactgctgggg

SEQ ID NO: 322880 - DNA, 521 bp, Artificial Sequence
  derived and/or modified sequence
gcagtagcagaatcccatggtagccaggtgggtgaaggggagcgaggacgttctacctgccttgaagaagacacctgacctgcggatgtttccagagcctggcaatggatgccattcacatcggcatgtccagcacccccctggtgaagcacactgctggggctgggctcaaggccaacagaccccgcgtcatgtccaagagtgggcacagcaacgtgagaattgacaaagtggatggcatatacctactctacctgcaagacctgtggaccacagttatcgacatgaagtggagatacaaactcaccctgttcgctgccacttttgtgatgacctggttcctttttggagtcatctactatgccatcgcgtttattcatggggacttagaacccggtgagcccatttcaaatcataccccctgcatcatgaaagtggactctctcactggggcgtttctcttttccctggaatcccagacaaccattggctatggagtccgttccatcacagaggaatgt

SEQ ID NO: 322881 - DNA, 1115 bp, Artificial Sequence
  derived and/or modified sequence
gtggctcaagggctctgtccttggacacggatgagggcagctgggcggtgggaccgaggctctgcctgaatgctcagcttctgcaagctggggtggagagtgtgttcctgcctaccggctcagccagcacaggagcacgtagcctgcaggtgtgggttgtacacaggcttccccctgctgagtcagttccccagatctcttcatcacttccccagatctctgggatcttcagctgagattgggccccagcacctggactcaaggcagtagcagaatcccatggtagccaggtgggtgaaggggagcgaggacgttctacctgccttgaagaagacacctgacctgcggagtgagtgaccagtgtttccagagcctggcaatggatgccattcacatcggcatgtccagcacccccctggtgaagcacactgctggggctgggctcaaggccaacagaccccgcgtcatgtccaagagtgggcacagcaacgtgagaattgacaaagtggatggcatatacctactctacctgcaagacctgtggaccacagttatcgacatgaagtggagatacaaactcaccctgttcgctgccacttttgtgatgacctggttcctttttggagtcatctactatgccatcgcgtttattcatggggacttagaacccggtgagcccatttcaaatcataccccctgcatcatgaaagtggactctctcactggggcgtttctcttttccctggaatcccagacaaccattggctatggagtccgttccatcacagaggaatgtcctcatgccatcttcctgttggttgctcagttggtcatcacgaccttgattgagatcttcatcaccggaaccttcctggccaaaatcgccagacccaaaaagcgggctgagaccatcaagttcagccactgtgcagtcatcaccaagcagaatgggaagctgtgcttggtgattcaggtagccaatatgaggaagagcctcttgattcagtgccagctctctggcaagctcctgcagacccacgtcaccaaggagggggagcggattctcctcaaccaagccactgtcaaattccacgtggactcctcctctgagagcc

SEQ ID NO: 322882 - DNA, 711 bp, Artificial Sequence
  derived and/or modified sequence
ggtgtttggagagcccggactggatgcccactagaatcctgtgctgtgaacagtgagagagttttcttcattttgaggaaccctaaacacctatctttcccaaggcaacctgtctggactgagcatttctctgacttgacataacttcccatccagccaggagtctgcactcttcagtctttgcaggagatgttggaaacagagactggatccctgaggagatgctgttagaccaggctgagctcaaggcttgtccctaaggcagctggtgaaggaaaggttcgacttggtggtagaagccctggactggagtccccacctatgggctgagggatcctccacaagtgattcaacttcttagtttctcacctacaaaaggtgggagttaaccaagaaagggagaaaatgaagaaccttcaggaaggaattcatgtgccagatgtgggctgagagggcacccagctgctcaggaaggggcagtagcagaatcccatggtagccaggtgggtgaaggggagcgaggacgttctacctgccttgaagaagacacctgacctgcggagtgagtgaccagtgtttccagagcctggcaatggatgccattcacatcggcatgtccagcacccccctggtgaagcacactgctggggctgggctcaaggccaacagaccccgcgtcatgtccaagagtgggcacagcaacgtgagaat

SEQ ID NO: 322883 - DNA, 595 bp, Artificial Sequence
  derived and/or modified sequence
cgtcttcagaggaaggatagctgtacagcgtggtgaaggactcaatgagaagtgaacagtgagagagttttcttcattttgaggaaccctaaacacctatctttcccaaggcaacctgtctggactgagcatttctctgacttgacataacttcccatccagccaggagtctgcactcttcagtctttgcagataacttttaagtggtgaagagtataaatcgtggttttccaagtgtagtctaaggtctaacagcatcggggatatctgggaaattatcagaactacagaccctctggctgcaccccaaacctgctgaatcggaaattctgaggcagtagcagaatcccatggtagccaggtgggtgaaggggagcgaggacgttctacctgccttgaagaagacacctgacctgcggagtgagtgaccagtgtttccagagcctggcaatggatgccattcacatcggcatgtccagcacccccctggtgaagcacactgctggggctgggctcaaggccaacagaccccgcgtcatgtccaagagtgggcacagcaacgtgagaattgacaaagtggatggcatatacctac

SEQ ID NO: 322884 - DNA, 313 bp, Artificial Sequence
  derived and/or modified sequence
cgtcttcagaggaaggatagctgtacagcgtggtgaaggactcaatgagaaggcagtagcagaatcccatggtagccaggtgggtgaaggggagcgaggacgttctacctgccttgaagaagacacctgacctgcggagtgagtgaccagtgtttccagagcctggcaatggatgccattcacatcggcatgtccagcacccccctggtgaagcacactgctggggctgggctcaaggccaacagaccccgcgtcatgtccaagagtgggcacagcaacgtgagaattgacaaagtggatggcatatacctac

SEQ ID NO: 322885 - DNA, 304 bp, Artificial Sequence
  derived and/or modified sequence
cgtcttcagaggaaggatagctgtacagcgtggtgaaggactcaatgagaaggcagtagcagaatcccatggtagccaggtgggtgaaggggagcgaggacgttctacctgccttgaagaagacacctgacctgcggagtgagtgaccagagcctggcaatggatgccattcacatcggcatgtccagcacccccctggtgaagcacactgctggggctgggctcaaggccaacagaccccgcgtcatgtccaagagtgggcacagcaacgtgagaattgacaaagtggatggcatatacctac

SEQ ID NO: 322886 - DNA, 626 bp, Artificial Sequence
  derived and/or modified sequence
cgtcttcagaggaaggatagctgtacagcgtggtgaaggactcaatgagaaggtgcattgcccatccttcagagagctctgtgtgaatccataaaaggtgcttaaagcttttcactccatgaagcctcatctgtctcatgaaagcaataaattgaacagtgagagagttttcttcattttgaggaaccctaaacacctatctttcccaaggcaacctgtctggactgagcatttctctgacttgacataacttcccatccagccaggagtctgcactcttcagtctttgcagataacttttaagtggtgaagagtataaatcgtggttttccaagtgtagtctaaggtctaacagcatcggggatatctgggaaattatcagaactacagaccctctggctgcaccccaaacctgctgaatcggaaattctgaggcagtagcagaatcccatggtagccaggtgggtgaaggggagcgaggacgttctacctgccttgaagaagacacctgacctgcggagtgagtgaccagtgtttccagagcctggcaatggatgccattcacatcggcatgtccagcacccccctggtgaagcacactgctggggctgggctcaaggccaaca

SEQ ID NO: 322887 - DNA, 740 bp, Artificial Sequence
  derived and/or modified sequence
cgtcttcagaggaaggatagctgtacagcgtggtgaaggactcaatgagaaggtgcattgcccatccttcagagagctctgtgtgaatccataaaaggtgcttaaagcttttcactccatgaagcctcatctgtctcatgaaagcaataaatgtgtttggagagcccggactggatgcccactagaatcctgtgctgtgaacagtgagagagttttcttcattttgaggaaccctaaacacctatctttcccaaggcaacctgtctggactgagcatttctctgacttgacataacttcccatccagccaggagtctgcactcttcagtctttgcagataacttttaagtggtgaagagtataaatcgtggttttccaagtgtagtctaaggtctaacagcatcggggatatctgggaaattatcagaactacagaccctctggctgcaccccaaacctgctgaatcggaaattctgaggcagtagcagaatcccatggtagccaggtgggtgaaggggagcgaggacgttctacctgccttgaagaagacacctgacctgcggagtgagtgaccagtgtttccagagcctggcaatggatgccattcacatcggcatgtccagcacccccctggtgaagcacactgctggggctgggctcaaggccaacagaccccgcgtcatgtccaagagtgggcacagcaacgtgagaattgacaaagtggatggcatatacctac

SEQ ID NO: 322888 - DNA, 555 bp, Artificial Sequence
  derived and/or modified sequence
cgtcttcagaggaaggatagctgtacagcgtggtgaaggactcaatgagaaggtgcattgcccatccttcagagagctctgtgtgaatccataaaaggtgcttaaagcttttcactccatgaagcctcatctgtctcatgaaagcaataaatataacttttaagtggtgaagagtataaatcgtggttttccaagtgtagtctaaggtctaacagcatcggggatatctgggaaattatcagaactacagaccctctggctgcaccccaaacctgctgaatcggaaattctgaggcagtagcagaatcccatggtagccaggtgggtgaaggggagcgaggacgttctacctgccttgaagaagacacctgacctgcggagtgagtgaccagtgtttccagagcctggcaatggatgccattcacatcggcatgtccagcacccccctggtgaagcacactgctggggctgggctcaaggccaacagaccccgcgtcatgtccaagagtgggcacagcaacgtgagaattgacaaagtggatggcatatacctac

SEQ ID NO: 322889 - DNA, 413 bp, Artificial Sequence
  derived and/or modified sequence
cgtcttcagaggaaggatagctgtacagcgtggtgaaggactcaatgagaaggtgcattgcccatccttcagagagctctgtgtgaatccataaaaggtgcttaaagcttttcactccatgaagcctcatctgtctcatgaaagcaataaatgcagtagcagaatcccatggtagccaggtgggtgaaggggagcgaggacgttctacctgccttgaagaagacacctgacctgcggagtgagtgaccagtgtttccagagcctggcaatggatgccattcacatcggcatgtccagcacccccctggtgaagcacactgctggggctgggctcaaggccaacagaccccgcgtcatgtccaagagtgggcacagcaacgtgagaattgacaaagtggatggcatatacctac

SEQ ID NO: 322890 - DNA, 1128 bp, Artificial Sequence
  derived and/or modified sequence
atggacgccatccacattgggatgagctccacgccactagtaaagcatacggccggagctggacttaaggcgaaccggccacgcgtgatgtcaaaaagcggccatagcaatgttaggattgacaaggttgacggaatttaccttttgtatctgcaggacttgtggactactgttattgacatgaaatggcggtataagctgactctgttcgctgcgaccttcgttatgacctggtttctcttcggagtgatctactacgctatcgccttcatccacggcgacctggaaccgggtgagcccatatctaaccataccccttgcataatgaaagtcgactcactaacaggagctttcctgttcagtcttgagtcacagacgacaatcggctacggcgtacgctcaatcacggaggagtgtccccacgccatcttcttgctggttgcacagctggtgatcacgacgctcatcgaaatatttatcactggtacctttctcgcaaagatcgctcgccctaagaaacgcgcagagacaataaagttttcgcactgcgccgtcattacaaagcagaatggcaagctctgtcttgtgatacaggtggcgaatatgagaaaatctctgttgattcagtgccagctgagtggaaagctgttgcaaacccatgtgaccaaggaaggagagaggatactgctgaatcaggccactgtcaagttccatgtggacagtagtagtgaaagcccattcctgatcctgcccatgacattctatcacgtcctggatgagacgagccccctgcgcgacttaaccccccagaacctgaaggaaaaggaattcgagctagtggtactcctgaacgccacagttgagagcacttctgctgtgtgccaatcaagaacaagctacatcccagaggaaatttactggggtttcgagttcgtgccagtagtaagcctgtcaaagaatggaaaatacgtggccgattttagtcagttcgagcagatacgaaaaagccctgattgcaccttctactgtgcggactctgagaagcaacaactcgaagaaaagtatcgacaggaggatcaaagggagagggaactgaggacacttctcctgcagcagtcgaatgtctag

SEQ ID NO: 322891 - DNA, 186 bp, Artificial Sequence
  derived and/or modified sequence
atggacgccatccacatcggcatgagctccacaccattggtgaagcacaccgctggtgctgggctgaaagccaacaggccaagagtgatgtctaaaagcggtcattccaatgtgcgcatagacaaggtggacggcatctacttgctgtaccttcaagacttgtggacgactgtcatcgacatgtag

SEQ ID NO: 322892 - DNA, 471 bp, Artificial Sequence
  derived and/or modified sequence
atggacgctatccacattggcatgtccagcactcccctggtcaagcatacggcaggcgctggccttaaggctaacagaccaagagtgatgtccaagtcaggacactctaacgtcaggatagacaaggtcgacggcatctatttgctgtaccttcaggatctctggaccacagtaatcgacatgaaatggaggtataaactaaccctcttcgcagcaacattcgtaatgacctggttcctgtttggggtgatttactatgccatagcatttattcacggtgacttagaaccaggtgagcccatctccaatcataccccatgtatcatgaaagttgacagcttaactggcgcattcttatttagtctggagtcacagacaaccatcggttatggcgttcggtccattaccgaggaatgcccccacgccatcttcctgcttgttgcccaactcgttatcacgactctgatttag

SEQ ID NO: 322893 - DNA, 471 bp, Artificial Sequence
  derived and/or modified sequence
atggacgcaatccacatcgggatgagttctaccccgctagtaaagcatactgcaggtgctggactgaaggcaaatcggcctagggtcatgtcaaagtcagggcatagcaacgtgcgcattgacaaagttgatggaatttatctgctctatctccaggatctgtggaccacagtgatagatatgaaatggagatacaaactgaccctcttcgctgcaacttttgtgatgacgtggtttctttttggtgtcatctattatgctattgcattcatccacggcgacttggaacctggtgagccgatttcaaatcatacaccgtgcattatgaaggtggattccctgaccggggcttttctgttcagcctcgaaagccaaacgactataggatatggggtgcgctccatcaccgaggagtgccctcatgctatcttcctgctggtagcccagttggtgattacaacattgatttag

SEQ ID NO: 322894 - DNA, 1128 bp, Artificial Sequence
  derived and/or modified sequence
atggacgccattcacattgggatgagctctacacccttggtgaaacacacagctggcgctggactgaaagcaaatcggcctcgggtcatgtccaaatctgggcattcaaacgtccggattgacaaggtggacggtatctatctcctgtacctccaggatctctggactacagtcattgatatgaaatggagatataagttgactctgtttgccgcaacctttgtgatgacctggtttctgtttggtgtgatttactacgctatcgccttcatacatggcgacttggagccgggagagccgatcagcaatcatacgccatgtatcatgaaagtggactccctgactggggcttttctcttttccctcgaatcacaaacaactattggatatggagtgagatctataacagaggagtgcccccacgctattttcctattggtcgctcagctggtgatcactaccctgattgagatattcattacagggaccttcctggcaaaaattgcccgacctaagaaaagagccgaaacaatcaaattctctcactgtgcagtgatcactaagcaaaacggaaaactttgtctggtgatccaggtcgctaatatgcggaaaagcctgctgatacagtgccagctgtccggaaagctgttgcagactcacgtgacgaaggaaggtgaacgcattctattgaaccaggccaccgtgaaatttcacgtggactctagcagtgaaagcccctttctgattctccccatgaccttctatcacgttctggacgaaacatctcctctgagggacctcacaccccagaacctaaaggaaaaggaatttgagttggtggtgctgctcaacgcaacagtcgagtcaactagcgccgtctgccagtctagaacgagctacattccagaggaaatttactggggcttcgagttcgttcctgttgtctctctgtcaaagaacggtaagtacgtggccgactttagtcaattcgaacaaatccgtaaatccccagactgcactttctattgcgcagatagcgagaagcaacagctggaagagaaatacagacaggaagaccaacgagaacgtgagctcaggaccctgttgttgcaacagagcaacgtctag

SEQ ID NO: 322895 - DNA, 1128 bp, Artificial Sequence
  derived and/or modified sequence
atggacgccatccatattgggatgagctcaaccccgttggttaagcatacggccggagccggtctgaaagccaaccggcctcgtgtcatgagtaaatccggacattcaaacgtcagaatcgacaaggtcgacgggatctacctactgtatctgcaagatctatggacaacggtgattgatatgaagtggaggtacaaacttacgctgttcgccgctacatttgtgatgacctggttcctttttggggtgatttattatgccattgcttttatacacggtgatcttgagccaggagagcctatcagcaaccatactccctgcatcatgaaagtggattctctgacgggcgcattcctgttctctcttgagtcccagactaccatcggctacggcgtgcggtctataaccgaagaatgcccgcacgcaatttttctacttgttgcccagcttgtgattaccacgctgattgagatctttatcactggcacatttctggccaagattgccagacctaagaaacgagccgagaccattaagttctctcactgtgccgtgattacaaaacagaatggcaagctgtgcctggtgattcaggttgccaatatgcggaaatctttgttaatccagtgccagctatcaggcaagctgctccagacccatgtcaccaaggagggtgagaggatactactgaaccaggctactgtgaaatttcacgtggactcatcctcggaatccccattccttatccttccaatgaccttctaccacgtgctggacgagacgagccccctgagggacctcaccccgcagaacctcaaagagaaggagtttgaattagtcgtgctcctgaacgccaccgtggagtccacttccgccgtgtgtcaatctaggacttcgtatattcctgaggagatctactggggtttcgaatttgtgccagtggtctccctgtcaaagaacggcaaatatgtcgctgacttttcccaattcgagcaaatccgaaagtcacccgattgtacattttactgtgcagacagtgagaaacaacagcttgaggaaaagtatcggcaggaagatcagagggagcgggagctccgtactttactgttgcagcagtctaatgtgtag

SEQ ID NO: 322896 - DNA, 1128 bp, Artificial Sequence
  derived and/or modified sequence
atggacgccattcacattggaatgtcctcgacacctcttgtcaaacataccgctggcgctggcctcaaggccaacagaccacgcgtaatgagcaagtccggtcattccaatgttcggatagataaggtggatgggatttacttgctgtatcttcaggacctctggactaccgtgatcgacatgaagtggcggtacaagctgactctttttgctgcaacttttgtgatgacatggttcctgtttggcgtcatttattacgccatcgccttcatccatggagatttggagcctggtgaacctatctctaaccacacaccctgtattatgaaggttgactccctaacaggtgctttcctatttagtctcgagagccagactaccatcggctacggcgtgcggtctatcaccgaggagtgcccccatgccatttttttgctagtggcacagctggtcattaccactctcattgaaatcttcataaccggaacgttccttgctaagatagccaggccaaagaagcgcgctgagaccatcaagttctctcactgcgccgtgatcacgaagcagaacggaaagctgtgtctcgtgatccaggtcgctaatatgaggaagtcattgctcatccagtgtcagctctcagggaaattactacagacccatgtgactaaggagggggagcggattctgctgaatcaggccacggtgaaatttcatgttgattcttctagcgaatcgcctttcttaattctcccaatgacattttatcatgttctcgatgaaacgtctccactaagggatttgacgcctcagaacctgaaagaaaaagagttcgagctagtcgtactccttaatgctaccgtcgaatccaccagcgctgtgtgccagtccaggacctcatacattcccgaagagatttactggggattcgagttcgttcccgtggtctcactgagcaagaatggtaagtacgtggctgactttagccagttcgaacagatacgcaagtcgccagactgcactttctattgtgccgattccgaaaaacaacagttggaggagaagtataggcaggaagatcagcgtgagagagaattacgcacccttctcctgcaacaatcaaacgtatag

SEQ ID NO: 322897 - DNA, 1128 bp, Artificial Sequence
  derived and/or modified sequence
atggatgctattcacatcggcatgagcagcacgcccctggtaaaacacacagcgggagcaggactgaaggccaacaggcctcgggtcatgagtaagtctggacacagcaacgtgcgaatcgacaaagtcgacggaatctaccttctgtacttgcaggacctatggactaccgtgattgacatgaagtggagatacaaactaaccctgtttgcagccacatttgtgatgacatggttcctttttggagttatctattacgcaatagcctttatccacggcgacttggaacccggtgaaccaatctctaaccacacgccgtgtatcatgaaggtcgatagcttgacaggcgctttcctattctccctcgaaagccagaccaccatcgggtatggcgtgcggtcgatcactgaggagtgcccgcacgcaatattcctgttggtggcccaactagtgatcaccaccctgattgagatcttcattacgggaacttttctggctaaaatagccaggcctaagaaacgggctgaaacaattaaattctcccattgtgcggtgatcacaaagcagaatggcaagctgtgcctggtgatccaggtcgcaaacatgagaaagtctttgctgattcaatgtcaactcagcggaaagctgctgcaaactcatgtgactaaggagggcgagaggatcctcctgaaccaggcgactgttaagttccacgttgattcatcttctgagagcccctttcttatccttcctatgacattttatcatgtgctggacgagaccagcccactccgagaccttaccccccagaatttgaaggaaaaagaatttgagctggttgttctccttaatgctacagttgaatctacatccgcagtatgtcagtctcgcacctcctatatacctgaagagatctactgggggttcgagtttgtgcccgtcgtatctctgagtaaaaacgggaagtatgttgccgatttcagccaattcgagcagatacggaagtccccagactgcacgttctactgtgccgactctgaaaagcagcagctcgaagaaaagtataggcaggaggaccagagagaaagggaattaaggaccctgctactgcaacagagcaacgtttag

SEQ ID NO: 322898 - DNA, 60 bp, Artificial Sequence
  derived and/or modified sequence
atggacgccattcacattggcatgtcatcaactcccctggtgaagcatactgccggttag

SEQ ID NO: 322899 - DNA, 420 bp, Artificial Sequence
  derived and/or modified sequence
atggacgccatccatatcgggatgtcgagcaccccactcgtgaagcataccgccggagccggactgaaagcaaatcgtccacgagtgatgtcaaaatcgggtcattctaacgtcagaatcgataaggtggacggaatatacctgctgtatttgcaagacttgtggaccaccgtcattgatatgaagtggcgttacaagctgactcttttcgccgcaacgttcgttatgacatggttcctgtttggagtcatatattatgcaatcgcgttcatccatggagatctggaaccaggcgaaccgatatccaaccataccccctgtatcatgaaggtcgatagcttaaccggcgctttcctgttctcgctggagtcacagacaacgatcgggtatggcgtgcgttccattacagaggagtgttag

SEQ ID NO: 322900 - DNA, 738 bp, Artificial Sequence
  derived and/or modified sequence
atggacgcgatccacatcgggatgagctctactcctctcgtgaaacacaccgccggtgctggattaaaggccaaccgaccaagagtgatgagcaagtccggccactctaatgttcgaatcgacaaggtggacggaatctatctcttgtatctgcaagatctctggacgactgtgatcgacatgaaatggcgctacaagctgacgttgtttgcagcaactttcgtaatgacttggttcctgtttggcgtgatctactacgccattgcctttattcatggagacctggaaccgggtgagcctatttcgaatcacaccccatgcattatgaaagtggactctctgaccggagcctttctgttttcgctggagtcgcagactactattgggtacggggttcggagtatcacagaagaatgtccacacgctatattcctcttggttgcgcagctggtgatcacaaccctgatagagatatttatcacgggtactttcttggcaaagatcgctcgcccaaaaaagagggctgagaccataaaattttcgcactgcgccgtcatcacaaaacagaatggcaagctttgcctggtgatccaggtagccaacatgcggaaatccttactgattcagtgccagctgagtggaaagcttctgcagactcacgttacgaaggaaggtgagcgtatccttctgaatcaggcgacagtgaagtttcacgtggatagctcaagtgagtcgtag

SEQ ID NO: 322901 - DNA, 120 bp, Artificial Sequence
  derived and/or modified sequence
atggatgcaattcacatcggtatgtcttctactccgctagtgaaacacaccgcaggcgcaggactgaaggccaaccggccaagagtgatgagcaaaagtgggcactccaatgtgaggtag

SEQ ID NO: 322902 - DNA, 147 bp, Artificial Sequence
  derived and/or modified sequence
atggatgcaattcacatcggaatgtccagcacccctttggttaagcatacagcaggcgcaggccttaaagccaatcggccacgggtgatgtcgaagtctggacactcaaatgtgagaatcgacaaggtggacggcatctacttgtag

SEQ ID NO: 322903 - DNA, 147 bp, Artificial Sequence
  derived and/or modified sequence
atggatgccattcacattggtatgagtagtactcccttggtcaagcacaccgctggcgctggcctcaaggcaaacaggcctcgggtcatgtctaaaagtggccactccaacgtgaggattgacaaagttgacgggatctacctttag

SEQ ID NO: 322904 - DNA, 147 bp, Artificial Sequence
  derived and/or modified sequence
atggacgcaattcacattggcatgtctagcacccctctcgtgaagcacacagcaggcgctggcctcaaggccaaccgtcctcgcgtaatgagtaaatccggccactccaatgttagaatagataaggtcgatggaatctatctgtag

SEQ ID NO: 322905 - DNA, 78 bp, Artificial Sequence
  derived and/or modified sequence
atggatgccatccatatcgggatgagctctacacctctggttaagcatacagctggcgctgggctaaaggctaactag

SEQ ID NO: 322906 - DNA, 147 bp, Artificial Sequence
  derived and/or modified sequence
atggacgctatccacatcggcatgtctagtactccactggttaaacataccgctggggctgggttaaaagcaaacaggcccagggtgatgagcaaaagcgggcactccaatgtaagaatcgacaaagtcgacgggatttatctgtag

SEQ ID NO: 322907 - DNA, 147 bp, Artificial Sequence
  derived and/or modified sequence
atggacgcaatacatatcggaatgtccagtactcctctggtgaaacatactgccggagcgggactgaaggcgaatcgacctagagttatgtctaagagcggtcattcaaatgtccgaatagataaagttgacggcatctacctgtag

SEQ ID NO: 322908 - DNA, 147 bp, Artificial Sequence
  derived and/or modified sequence
atggatgcaatacatatcggcatgagttccacacccctggtgaagcacacagcaggcgcaggcttgaaggcaaatagacccagggtgatgtctaagagtggtcactctaatgtgcgcatcgataaagttgacggaatatatttatag

SEQ ID NO: 322909 - DNA, 1128 bp, Artificial Sequence
  derived and/or modified sequence
atggacgccatccacatcggcatgagcagcacccccctggtgaagcacaccgccggcgccggcctgaaggccaacagacccagagtgatgagcaagagcggccacagcaacgtgagaatcgacaaggtggacggcatctacctgctgtacctgcaggacctgtggaccaccgtgatcgacatgaagtggagatacaagctgaccctgttcgccgccaccttcgtgatgacctggttcctgttcggcgtgatctactacgccatcgccttcatccacggcgacctggagcccggcgagcccatcagcaaccacaccccctgcatcatgaaggtggacagcctgaccggcgccttcctgttcagcctggagagccagaccaccatcggctacggcgtgagaagcatcaccgaggagtgcccccacgccatcttcctgctggtggcccagctggtgatcaccaccctgatcgagatcttcatcaccggcaccttcctggccaagatcgccagacccaagaagagagccgagaccatcaagttcagccactgcgccgtgatcaccaagcagaacggcaagctgtgcctggtgatccaggtggccaacatgagaaagagcctgctgatccagtgccagctgagcggcaagctgctgcagacccacgtgaccaaggagggcgagagaatcctgctgaaccaggccaccgtgaagttccacgtggacagcagcagcgagagccccttcctgatcctgcccatgaccttctaccacgtgctggacgagaccagccccctgagagacctgaccccccagaacctgaaggagaaggagttcgagctggtggtgctgctgaacgccaccgtggagagcaccagcgccgtgtgccagagcagaaccagctacatccccgaggagatctactggggcttcgagttcgtgcccgtggtgagcctgagcaagaacggcaagtacgtggccgacttcagccagttcgagcagatcagaaagagccccgactgcaccttctactgcgccgacagcgagaagcagcagctggaggagaagtacagacaggaggaccagagagagagagagctgagaaccctgctgctgcagcagagcaacgtgtag

SEQ ID NO: 322910 - DNA, 186 bp, Artificial Sequence
  derived and/or modified sequence
atggacgccatccacatcggcatgagcagcacccccctggtgaagcacaccgccggcgccggcctgaaggccaacagacccagagtgatgagcaagagcggccacagcaacgtgagaatcgacaaggtggacggcatctacctgctgtacctgcaggacctgtggaccaccgtgatcgacatgtag

SEQ ID NO: 322911 - DNA, 471 bp, Artificial Sequence
  derived and/or modified sequence
atggacgccatccacatcggcatgagcagcacccccctggtgaagcacaccgccggcgccggcctgaaggccaacagacccagagtgatgagcaagagcggccacagcaacgtgagaatcgacaaggtggacggcatctacctgctgtacctgcaggacctgtggaccaccgtgatcgacatgaagtggagatacaagctgaccctgttcgccgccaccttcgtgatgacctggttcctgttcggcgtgatctactacgccatcgccttcatccacggcgacctggagcccggcgagcccatcagcaaccacaccccctgcatcatgaaggtggacagcctgaccggcgccttcctgttcagcctggagagccagaccaccatcggctacggcgtgagaagcatcaccgaggagtgcccccacgccatcttcctgctggtggcccagctggtgatcaccaccctgatctag

SEQ ID NO: 322912 - DNA, 60 bp, Artificial Sequence
  derived and/or modified sequence
atggacgccatccacatcggcatgagcagcacccccctggtgaagcacaccgccggctag

SEQ ID NO: 322913 - DNA, 420 bp, Artificial Sequence
  derived and/or modified sequence
atggacgccatccacatcggcatgagcagcacccccctggtgaagcacaccgccggcgccggcctgaaggccaacagacccagagtgatgagcaagagcggccacagcaacgtgagaatcgacaaggtggacggcatctacctgctgtacctgcaggacctgtggaccaccgtgatcgacatgaagtggagatacaagctgaccctgttcgccgccaccttcgtgatgacctggttcctgttcggcgtgatctactacgccatcgccttcatccacggcgacctggagcccggcgagcccatcagcaaccacaccccctgcatcatgaaggtggacagcctgaccggcgccttcctgttcagcctggagagccagaccaccatcggctacggcgtgagaagcatcaccgaggagtgctag

SEQ ID NO: 322914 - DNA, 738 bp, Artificial Sequence
  derived and/or modified sequence
atggacgccatccacatcggcatgagcagcacccccctggtgaagcacaccgccggcgccggcctgaaggccaacagacccagagtgatgagcaagagcggccacagcaacgtgagaatcgacaaggtggacggcatctacctgctgtacctgcaggacctgtggaccaccgtgatcgacatgaagtggagatacaagctgaccctgttcgccgccaccttcgtgatgacctggttcctgttcggcgtgatctactacgccatcgccttcatccacggcgacctggagcccggcgagcccatcagcaaccacaccccctgcatcatgaaggtggacagcctgaccggcgccttcctgttcagcctggagagccagaccaccatcggctacggcgtgagaagcatcaccgaggagtgcccccacgccatcttcctgctggtggcccagctggtgatcaccaccctgatcgagatcttcatcaccggcaccttcctggccaagatcgccagacccaagaagagagccgagaccatcaagttcagccactgcgccgtgatcaccaagcagaacggcaagctgtgcctggtgatccaggtggccaacatgagaaagagcctgctgatccagtgccagctgagcggcaagctgctgcagacccacgtgaccaaggagggcgagagaatcctgctgaaccaggccaccgtgaagttccacgtggacagcagcagcgagagctag

SEQ ID NO: 322915 - DNA, 120 bp, Artificial Sequence
  derived and/or modified sequence
atggacgccatccacatcggcatgagcagcacccccctggtgaagcacaccgccggcgccggcctgaaggccaacagacccagagtgatgagcaagagcggccacagcaacgtgagatag

SEQ ID NO: 322916 - DNA, 147 bp, Artificial Sequence
  derived and/or modified sequence
atggacgccatccacatcggcatgagcagcacccccctggtgaagcacaccgccggcgccggcctgaaggccaacagacccagagtgatgagcaagagcggccacagcaacgtgagaatcgacaaggtggacggcatctacctgtag

SEQ ID NO: 322917 - DNA, 78 bp, Artificial Sequence
  derived and/or modified sequence
atggacgccatccacatcggcatgagcagcacccccctggtgaagcacaccgccggcgccggcctgaaggccaactag

SEQ ID NO: 322918 - protein, 197 aa, Artificial Sequence
  derived and/or modified sequence
MVVSEVDIAKADPAAASHPLLLNGDATVAQKNPGSVAENNLCSQYEEKVRPCIDLIDSLRALGVEQDLALPAIAVIGDQSSGKSSVLEALSGVALPRGSGIVTRCPLVLKLKKLVNEDKWRGKVSYQDYEIEISDASEVEKEINKAQNAIAGEGMGISHELITLEISSRDVPDLTLIDLPGITRVAVGNQPADIGYK

SEQ ID NO: 322919 - protein, 68 aa, Artificial Sequence
  derived and/or modified sequence
MVVSEVDIAKADPAAASHPLLLNGDATVAQKNPGSVAENNLCSQYEEKVRPCIDLIDSLRALGVEQDL

SEQ ID NO: 322920 - DNA, 480 bp, Artificial Sequence
  derived and/or modified sequence
atggccaccgtggaccccgccggcctggccctgcaccccgcctgccccagagtgtggggccccagcgaccagcacagacccccccaggagggcagccacctgcccgccagaagaagaggcctggccagaaaccagagctgccagcaccccgacctgggcccccccgccagcagaaccgagaaggagatgagcgccgtggccgcccccggctgcgccgccctgctgcagcccccccagcagaccagcgtgcagagcttcaagggcatgagcctgagcgtggaggccggcctgtgcggcgagcccgccggcaagctgctgggcgagggcggcggccagagagaggccagcctggtgggcaagaagggctgggagtggagaagacacagaggcagaaccctgagcgaggaggaccagggcgccagacccttcagccccggcagctgcgccctgagaggcgacagagagggcggcatcggctag

SEQ ID NO: 322921 - DNA, 480 bp, Artificial Sequence
  derived and/or modified sequence
atggccaccgtggaccctgctggcctggccctgcacccagcctgcccccgggtgtggggccccagcgaccagcacaggcctccccaggagggcagccacctgcctgcccggcggcggggcctggccaggaaccagagctgccagcacccagacctgggccccccagccagcaggacagagaaggagatgtctgctgtggccgcccctggctgtgccgccctgctgcagcccccccagcagacctctgtgcagagcttcaagggcatgagcctgtctgtggaggccggcctgtgtggggagcctgctgggaagctgctgggggagggcggcggccagcgggaggccagcctggtgggcaagaagggctgggagtggaggaggcaccggggccgcaccctgtctgaggaggaccagggcgcccggcccttcagccctggcagctgtgccctgcggggggaccgggagggcggcatcggctag

SEQ ID NO: 322922 - DNA, 207 bp, Artificial Sequence
  derived and/or modified sequence
atggttgtgagtgaagtcgacatcgctaaggctgatcccgcggccgcttcccatcccctgttgctgaacggagatgccacagtggcccaaaagaacccagggagtgtcgccgagaacaacctgtgtagtcagtatgaagagaaggtgaggccctgtatcgacctcatagacagcttgcgggcgttaggtgtagaacaggatctctag

SEQ ID NO: 322923 - DNA, 606 bp, Artificial Sequence
  derived and/or modified sequence
atggtggtgagcgaggtcgatatcgcaaaggcagatcccgccgccgccagccaccctctcctgctaaatggcgatgccacggtggcccagaagaacccagggtcagtggctgagaacaacctgtgctcacagtatgaggaaaaggtgagaccgtgcatcgacctcatagacagcttacgcgccctcggagtcgagcaggacctcgccctgcctgcgattgctgttataggcgaccagagttcaggcaagtcctctgtgttggaagctttgagtggcgtggcgctacctagggggtcaggaatcgtaacgagatgtcccctcgtcctcaagttgaaaaagctggtcaatgaggataagtggcgggggaaggtgtcttatcaggactacgaaatcgaaattagcgacgcctctgaggtggagaaagagatcaataaagcccaaaatgccatcgcaggcgaggggatgggcatctctcacgaattaatcaccctggagatctccagcagggacgtgcccgatctaacacttattgatctccctgggatcacccgcgtcgccgtgggtaaccagccggccgatattggctataagattaagaccctctag

SEQ ID NO: 322924 - DNA, 594 bp, Artificial Sequence
  derived and/or modified sequence
atggtggtttccgaggtagacatcgctaaggccgatccagccgcagcaagtcatcccctactgttgaacggagatgccactgtggcgcaaaagaatcctggaagtgtggctgaaaataacctttgctcccagtacgaagagaaggtgcggccatgcattgatcttatcgacagtctgagagccctcggcgtagagcaggacctggctttgcctgccatcgccgtcatcggcgaccaaagcagcggaaagtcctctgttctggaggccctcagtggagtggcgcttcctcgcggctcaggcatcgttacacggtgcccactggtgctcaagctgaaaaagctagtgaatgaggataaatggcgcggcaaagtctcataccaggactatgagatcgagatttcggacgcctctgaggtggagaaggagatcaataaggcgcagaacgctatcgcaggcgaaggaatgggcatctcacatgagctaattacacttgaaatttcatcaagggatgtgccagacctgacactgatcgatctacctggcatcacgcgggtggctgtgggcaatcaacctgccgacataggatataaatag

SEQ ID NO: 322925 - DNA, 234 bp, Artificial Sequence
  derived and/or modified sequence
atggtggtgtccgaggtcgacatcgccaaagcagaccccgccgcggcttcacacccattgttactcaacggtgacgccacagtcgctcaaaaaaatcctgggtctgtcgcagagaacaacttgtgtagccagtatgaggaaaaagtccgtccttgtatcgatctgatcgatagcttgcgggctctgggcgtggaacaggacctggctctccctgctatagccgtcatcgggtag

SEQ ID NO: 322926 - DNA, 207 bp, Artificial Sequence
  derived and/or modified sequence
atggtggtgtctgaggtggacatcgccaaggctgaccctgctgctgccagccaccccctgctgctgaatggagatgccaccgtggcccagaagaaccctggctctgtggccgagaacaacctgtgcagccagtatgaggagaaggtgcggccctgcatcgacctgattgacagcctgcgggccctgggcgtggagcaggacctgtag

SEQ ID NO: 322927 - DNA, 606 bp, Artificial Sequence
  derived and/or modified sequence
atggtggtgtctgaggtggacatcgccaaggctgaccctgctgctgccagccaccccctgctgctgaatggagatgccaccgtggcccagaagaaccctggctctgtggccgagaacaacctgtgcagccagtatgaggagaaggtgcggccctgcatcgacctgattgacagcctgcgggccctgggcgtggagcaggacctggccctgcctgccatcgccgtcatcggggaccagagcagcggcaagagctctgtgctggaggccctgtctggagtggccctgccccggggcagcggcatcgtgacccgctgccccctggtgctgaagctgaagaagctggtgaatgaagacaagtggaggggcaaggtgtcctaccaggactatgaaattgagatcagtgatgccagcgaggtggagaaggagatcaacaaggcccagaatgccatcgccggggagggcatgggcatcagccatgagctgatcaccctggagatcagcagcagagatgtgcctgacctgaccctgattgacctgcccggcatcaccagggtggccgtgggcaaccagcctgctgacatcggctacaagatcaagaccctgtag

SEQ ID NO: 322928 - DNA, 594 bp, Artificial Sequence
  derived and/or modified sequence
atggtggtgtctgaggtggacatcgccaaggctgaccctgctgctgccagccaccccctgctgctgaatggagatgccaccgtggcccagaagaaccctggctctgtggccgagaacaacctgtgcagccagtatgaggagaaggtgcggccctgcatcgacctgattgacagcctgcgggccctgggcgtggagcaggacctggccctgcctgccatcgccgtcatcggggaccagagcagcggcaagagctctgtgctggaggccctgtctggagtggccctgccccggggcagcggcatcgtgacccgctgccccctggtgctgaagctgaagaagctggtgaatgaagacaagtggaggggcaaggtgtcctaccaggactatgaaattgagatcagtgatgccagcgaggtggagaaggagatcaacaaggcccagaatgccatcgccggggagggcatgggcatcagccatgagctgatcaccctggagatcagcagcagagatgtgcctgacctgaccctgattgacctgcccggcatcaccagggtggccgtgggcaaccagcctgctgacatcggctacaagtag

SEQ ID NO: 322929 - DNA, 234 bp, Artificial Sequence
  derived and/or modified sequence
atggtggtgtctgaggtggacatcgccaaggctgaccctgctgctgccagccaccccctgctgctgaatggagatgccaccgtggcccagaagaaccctggctctgtggccgagaacaacctgtgcagccagtatgaggagaaggtgcggccctgcatcgacctgattgacagcctgcgggccctgggcgtggagcaggacctggccctgcctgccatcgccgtcatcggctag

SEQ ID NO: 322930 - DNA, 887 bp, Artificial Sequence
  derived and/or modified sequence
gacgggcaggagacagatgccttcctcttgtctcaactgcaagaggcacctaagtccacctgggcctggagcaggacagaaccctgttgtcagaggtacacccagagcaactccacaccgggtgcatgccacagcaactccatcttaaataggagctggtaaaacgaggctgatacctactgggctgcattcccagacggcatagcgaggaggtgctgaagagcgcaggtttggagaatgatcacctggattggaaccatagctctaccaatatggaacccagctccttaggcctcggtcttctcatggagaacatggtgtgataatcctactcctctgggagggtggctgttaagccttggaccgcagttgccggccaggaatcccagtgtcacggtggacacgcctccctcgcgcccttgccgcccacctgctcacccagctcaggggctttggaattctgtggccacactgcgaggagatcggttctgggtcggaggctacaggaagactcccactccctgaaatctggagtgaagaacgccgccatccagccaccattccaaggaggtgcaggagaacagctctgtgataccatttaacttgttgacattacttttatttgaaggaacgtatattagaggcatctgctttattttaagcttactttgcaaagaaggaagatggttgtttccgaagtggacatcgcaaaagctgatccagctgctgcatcccaccctctattactgaatggagatgctactgtggcccagaaaaatccaggctcggtggctgagaacaacctgtgcagccagtatgaggagaaggtgcgcccctgcatcgacctcattgactccctgcgggctctaggtgtggagcaggacctg

SEQ ID NO: 322931 - DNA, 872 bp, Artificial Sequence
  derived and/or modified sequence
gcggggtgaaagaggcgaagcgagagcggaggccgcactccagcactgcgcagggaccggaattctgtggccacactgcgaggagatcggttctgggtcggaggctacaggaagactcccactccctgaaatctggagtgaagaacgccgccatccagccaccattccaaggaggtgcaggagaacagctctgtgataccatttaacttgttgacattacttttatttgaaggaacgtatattagagcttactttgcaaagaaggaagatggttgtttccgaagtggacatcgcaaaagctgatccagctgctgcatcccaccctctattactgaatggagatgctactgtggcccagaaaaatccaggctcggtggctgagaacaacctgtgcagccagtatgaggagaaggtgcgcccctgcatcgacctcattgactccctgcgggctctaggtgtggagcaggacctggccctgccagccatcgccgtcatcggggaccagagctcgggcaagagctccgtgttggaggcactgtcaggagttgcccttcccagaggcagcgggatcgtgaccagatgcccgctggtgctgaaactgaagaaacttgtgaacgaagataagtggagaggcaaggtcagttaccaggactacgagattgagatttcggatgcttcagaggtagaaaaggaaattaataaagcccagaatgccatcgccggggaaggaatgggaatcagtcatgagctaatcaccctggagatcagctcccgagatgtcccggatctgactctaatagaccttcctggcataaccagagtggctgtgggcaatcagcctgctgacattgggtataagatcaagacactca

SEQ ID NO: 322932 - DNA, 516 bp, Artificial Sequence
  derived and/or modified sequence
atctgattcagcaggcctgggttcgggcccgagaacctgcgtctcccgcgagttcccgcgaggcaagtgctgcaggtgcggggccaggagctaggtttcgtttctgcgcccggagccgccctcagcacaggccttggaccgcagttgccggccaggaatcccagtgtcacggtggacacgcctccctcgcgcccttgccgcccacctgctcacccagctcaggggctttggaattctgtggccacactgcgaggagatcggttctgggtcggaggctacaggaagactcccactccctgaaatctggagtgaagaacgccgccatccagccaccattccaaggaggtgcaggagaacagctctgtgataccatttaacttgttgacattacttttatttgaaggaacgtatattagagcttactttgcaaagaaggaagatggttgtttccgaagtggacatcgcaaaagctgatccagctgctgcatcccaccctctattactgaatggagatgc

SEQ ID NO: 322933 - DNA, 905 bp, Artificial Sequence
  derived and/or modified sequence
tcttcgcggcgcggggcggggctgggcgcggggtgaaagaggcgaagcgagagcggaggccgcactccagcactgcgcagggaccggaattctgtggccacactgcgaggagatcggttctgggtcggaggctacaggaagactcccactccctgaaatctggagtgaagaacgccgccatccagccaccattccaaggaggtgcaggagaacagctctgtgataccatttaacttgttgacattacttttatttgaaggaacgtatattagaggcatctgctttattttaagcttactttgcaaagaaggaagatggttgtttccgaagtggacatcgcaaaagctgatccagctgctgcatcccaccctctattactgaatggagatgctactgtggcccagaaaaatccaggctcggtggctgagaacaacctgtgcagccagtatgaggagaaggtgcgcccctgcatcgacctcattgactccctgcgggctctaggtgtggagcaggacctggccctgccagccatcgccgtcatcggggaccagagctcgggcaagagctccgtgttggaggcactgtcaggagttgcccttcccagaggcagcgggatcgtgaccagatgcccgctggtgctgaaactgaagaaacttgtgaacgaagataagtggagaggcaaggtcagttaccaggactacgagattgagatttcggatgcttcagaggtagaaaaggaaattaataaagcccagaatgccatcgccggggaaggaatgggaatcagtcatgagctaatcaccctggagatcagctcccgagatgtcccggatctgactctaatagaccttcctggcataaccagagtggctgtgggcaatcagcctgctgacattgggtataag

SEQ ID NO: 322934 - DNA, 281 bp, Artificial Sequence
  derived and/or modified sequence
cccagaagactggtactcctgagaggcagatgaagtggtggtctttgatatcgagcctgggatgccctgggcacatgaggaggtgcaggagaacagctctgtgataccatttaacttgttgacattacttttatttgaaggaacgtatattagagcttactttgcaaagaaggaagatggttgtttccgaagtggacatcgcaaaagctgatccagctgctgcatcccaccctctattactgaatggagatgctactgtggcccagaaaaatccaggctcg

SEQ ID NO: 322935 - DNA, 583 bp, Artificial Sequence
  derived and/or modified sequence
actccagcactgcgcagggaccgccttggaccgcagttgccggccaggaatcccagtgtcacggtggacacgcctccctcgcgcccttgccgcccacctgctcacccagctcaggggctttggaattctgtggccacactgcgaggagatcggttctgggtcggaggctacaggaagactcccactccctgaaatctggagtgaagaacgccgccatccagccaccattccaaggaggtgcaggagaacagctctgtgataccatttaacttgttgacattacttttatttgaaggaacgtatattagaggcatctgctttattttaagcttactttgcaaagaaggaagatggttgtttccgaagtggacatcgcaaaagctgatccagctgctgcatcccaccctctattactgaatggagatgctactgtggcccagaaaaatccaggctcggtggctgagaacaacctgtgcagccagtatgaggagaaggtgcgcccctgcatcgacctcattgactccctgcgggctctaggtgtggagcaggacctggccctgccagccatcgccgtcatcgggga

SEQ ID NO: 322936 - DNA, 207 bp, Artificial Sequence
  derived and/or modified sequence
atggtggtgagcgaggtggacatcgccaaggccgaccccgccgccgctagtcaccccctgctgttgaatggcgacgccacggtcgcccagaaaaaccccggatctgtggcagagaacaatctttgcagccagtatgaagaaaaagtgagaccttgtatcgatttgatagattccctgcgcgcattgggggtggaacaggacttatag

SEQ ID NO: 322937 - DNA, 606 bp, Artificial Sequence
  derived and/or modified sequence
atggtggtgagcgaggtggacatcgccaaggccgaccccgccgccgcatcccatcctttgttgctgaatggagacgccacagtggctcaaaaaaatccgggctccgtagctgaaaacaatttatgttctcagtacgaggaaaaggtgcgcccatgtattgatctgattgattctttgcgtgcattgggcgtggaacaggacttagccctaccagcgatcgctgttattggagaccaaagctcgggtaagtcaagcgttctggaggccctgtccggagtagcactcccaagggggtcaggcattgtgacccggtgtccccttgttctgaaacttaagaaacttgtcaacgaagacaagtggaggggtaaagtctcttaccaggactacgaaatcgagatatcagacgcttccgaagtggaaaaggagataaacaaggcgcagaacgctattgcgggggagggcatgggtatctcccacgaactgattacccttgagatcagtagtagggatgtacccgacttaactctcatcgatttgcccggcatcacgcgcgtggctgtggggaatcagcctgctgacattggatataagatcaagactctctag

SEQ ID NO: 322938 - DNA, 594 bp, Artificial Sequence
  derived and/or modified sequence
atggtggtgagcgaggtggacatcgccaaggccgaccccgccgccgcttcacatcctctcttgctcaatggggacgccacggtggctcagaagaatcctggtagtgtcgcagaaaataatctgtgctcgcagtacgaagaaaaggtgaggccatgcattgacctgattgactccttgcgggccctgggcgtggaacaggatttggctttacctgcgatcgcggtaatcggggatcagtcgtctgggaaatcctcggtcctcgaagcgctgagcggcgtggccctgccgcgtgggtcagggatagtgactaggtgccctctcgtgctgaaattaaagaaactggtcaatgaggataagtggaggggaaaagtgagctatcaggattatgagatcgagatttctgatgcaagcgaggtcgaaaaggagataaataaggctcagaacgcaatcgccggagagggtatggggattagccacgagttgatcaccttagaaatttccagccgtgatgtgccggacctgactcttatcgacctgcccggcataacgcgtgtggctgtagggaaccaacctgcggatatcggttacaaatag

SEQ ID NO: 322939 - DNA, 234 bp, Artificial Sequence
  derived and/or modified sequence
atggtggtgagcgaggtggacatcgccaaggccgaccccgccgccgccagccacccgctgctgctgaacggggacgccaccgtggcacaaaagaatccagggtctgtggccgaaaacaatctttgctcacagtatgaggaaaaggtgagaccctgtatcgacctgattgattctctgagagccctgggagtggagcaagacctggctctacctgcaatcgcagtgatcggctag

SEQ ID NO: 322940 - DNA, 207 bp, Artificial Sequence
  derived and/or modified sequence
atggtcgtgtccgaggtggatattgccaaggccgacccagccgcagcttcacacccactgctgctgaatggagatgctacggtcgcccagaaaaatcctggatcggtggcggagaacaatctatgtagccagtacgaggagaaggtccgcccatgcatagacctaatcgacagcttaagggctctcggggtggaacaggatctttag

SEQ ID NO: 322941 - DNA, 606 bp, Artificial Sequence
  derived and/or modified sequence
atggtcgttagcgaggtcgacatagccaaagcagatccagcggctgcgtcgcaccccctcttacttaacggggatgccacagtcgcccaaaagaatccagggagcgtggcagagaacaacctgtgttcgcagtacgaggagaaagttagaccttgtatcgatctcattgacagccttagggccctgggcgtcgagcaggacctggccctcccagctatagcagtgattggcgatcagagttcgggaaagtcttccgttctcgaggcattgtcaggagttgccctacctagagggtctgggatcgtaacacggtgcccgctggtgttaaagctcaaaaagctggtaaatgaagacaaatggagaggaaaggtgtcctaccaggactacgagatcgaaatctccgacgcttcagaggtcgagaaggagatcaacaaagcacagaacgccattgctggagaagggatggggataagccacgagctcattaccttagagatttcttctagagatgtgcctgacttaacacttattgatcttccaggaattacacgtgtcgctgtcggcaatcagcctgcagatattggttacaaaatcaaaacgctatag

SEQ ID NO: 322942 - DNA, 594 bp, Artificial Sequence
  derived and/or modified sequence
atggttgtaagcgaggtcgacatagctaaggccgatcctgccgcagcttcacaccctctattactgaacggggacgccacagttgctcaaaaaaacccgggaagtgtcgccgaaaacaacctgtgctcccagtacgaggagaaggtccgaccctgcattgatttaatcgatagtctgcgcgctttgggagtggagcaagatctggcacttcctgctatcgcggtcattggagaccagagtagtggaaaatcatctgtcctcgaggccttgtcaggggtcgcgctcccacggggaagcgggatcgtcacaaggtgtcccttggtgctgaaacttaagaaacttgtgaatgaagataagtggcggggtaaggtgtcatatcaggattacgaaatcgagatatccgatgcatcggaggttgagaaagagatcaacaaggcacagaatgctatagccggtgaaggaatgggtatcagccatgaactcattacactcgagatcagctctcgggatgtcccagatctcacgttaattgacctgccaggcattacacgagtggccgtcggcaaccaacccgctgacatcggttataaatag

SEQ ID NO: 322943 - DNA, 234 bp, Artificial Sequence
  derived and/or modified sequence
atggtcgtgagtgaagttgatatcgctaaagctgacccagccgcagcttctcacccattgctcttaaatggcgacgctactgtcgcacagaagaatccaggctcagtggctgagaacaatctgtgctcacagtacgaggagaaggtcagaccctgtatcgacctgatcgacagcctacgggcactgggagtggaacaggaccttgctcttccggcaattgccgttatcggttag

SEQ ID NO: 322944 - DNA, 207 bp, Artificial Sequence
  derived and/or modified sequence
atggtggtgagcgaggtggacatcgccaaggccgaccccgccgccgccagccaccccctgctgctgaacggcgacgccaccgtggcccagaagaaccccggcagcgtggccgagaacaacctgtgcagccagtacgaggagaaggtgagaccctgcatcgacctgatcgacagcctgagagccctgggcgtggagcaggacctgtag

SEQ ID NO: 322945 - DNA, 606 bp, Artificial Sequence
  derived and/or modified sequence
atggtggtgagcgaggtggacatcgccaaggccgaccccgccgccgccagccaccccctgctgctgaacggcgacgccaccgtggcccagaagaaccccggcagcgtggccgagaacaacctgtgcagccagtacgaggagaaggtgagaccctgcatcgacctgatcgacagcctgagagccctgggcgtggagcaggacctggccctgcccgccatcgccgtgatcggcgaccagagcagcggcaagagcagcgtgctggaggccctgagcggcgtggccctgcccagaggcagcggcatcgtgaccagatgccccctggtgctgaagctgaagaagctggtgaacgaggacaagtggagaggcaaggtgagctaccaggactacgagatcgagatcagcgacgccagcgaggtggagaaggagatcaacaaggcccagaacgccatcgccggcgagggcatgggcatcagccacgagctgatcaccctggagatcagcagcagagacgtgcccgacctgaccctgatcgacctgcccggcatcaccagagtggccgtgggcaaccagcccgccgacatcggctacaagatcaagaccctgtag

SEQ ID NO: 322946 - DNA, 594 bp, Artificial Sequence
  derived and/or modified sequence
atggtggtgagcgaggtggacatcgccaaggccgaccccgccgccgccagccaccccctgctgctgaacggcgacgccaccgtggcccagaagaaccccggcagcgtggccgagaacaacctgtgcagccagtacgaggagaaggtgagaccctgcatcgacctgatcgacagcctgagagccctgggcgtggagcaggacctggccctgcccgccatcgccgtgatcggcgaccagagcagcggcaagagcagcgtgctggaggccctgagcggcgtggccctgcccagaggcagcggcatcgtgaccagatgccccctggtgctgaagctgaagaagctggtgaacgaggacaagtggagaggcaaggtgagctaccaggactacgagatcgagatcagcgacgccagcgaggtggagaaggagatcaacaaggcccagaacgccatcgccggcgagggcatgggcatcagccacgagctgatcaccctggagatcagcagcagagacgtgcccgacctgaccctgatcgacctgcccggcatcaccagagtggccgtgggcaaccagcccgccgacatcggctacaagtag

SEQ ID NO: 322947 - DNA, 234 bp, Artificial Sequence
  derived and/or modified sequence
atggtggtgagcgaggtggacatcgccaaggccgaccccgccgccgccagccaccccctgctgctgaacggcgacgccaccgtggcccagaagaaccccggcagcgtggccgagaacaacctgtgcagccagtacgaggagaaggtgagaccctgcatcgacctgatcgacagcctgagagccctgggcgtggagcaggacctggccctgcccgccatcgccgtgatcggctag

SEQ ID NO: 322948 - protein, 715 aa, Artificial Sequence
  derived and/or modified sequence
MSKAHKPWPYRRRSQFSSRKYLKKEMNSFQQQPPPFGTVPPQMMFPPNWQGAEKDAAFLAKDFNFLTLNNQPPPGNRSQPRAMGPENNLYSQYEQKVRPCIDLIDSLRALGVEQDLALPAIAVIGDQSSGKSSVLEALSGVALPRGSGIVTRCPLVLKLKKQPCEAWAGRISYRNTELELQDPGQVEKEIHKAQNVMAGNGRGISHELISLEITSPEVPDLTIIDLPGITRVAVDNQPRDIGLQIKALIKKYIQRQQTINLVVVPCNVDIATTEALSMAHEVDPEGDRTIGILTKPDLMDRGTEKSVMNVVRNLTYPLKKGYMIVKCRGQQEITNRLSLAEATKKEITFFQTHPYFRVLLEEGSATVPRLAERLTTELIMHIQKSLPLLEGQIRESHQKATEELRRCGADIPSQEADKMFFLIEKIKMFNQDIEKLVEGEEVVRENETRLYNKIREDFKNWVGILATNTQKVKNIIHEEVEKYEKQYRGKELLGFVNYKTFEIIVHQYIQQLVEPALSMLQKAMEIIQQAFINVAKKHFGEFFNLNQTVQSTIEDIKVKHTAKAENMIQLQFRMEQMVFCQDQIYSVVLKKVREEIFNPLGTPSQNMKLNSHFPSNESSVSSFTEIGIHLNAYFLETSKRLANQIPFIIQYFMLRENGDSLQKAMMQILQEKNRYSWLLQEQSETATKRRILKERIYRLTQARHALCQFSSKEIH

SEQ ID NO: 322949 - DNA, 2148 bp, Artificial Sequence
  derived and/or modified sequence
atgagtaaggcacataagccttggccctaccgcaggaggagccaattctcaagcagaaaatacctgaagaaggaaatgaatagttttcaacagcaaccaccaccctttgggactgtgcctccacagatgatgtttcctccaaattggcaaggcgccgagaaggacgccgcgttcctggctaaggattttaacttccttactctgaataatcagcccccccctggtaatagatcccagcctcgagccatggggcccgagaacaacctgtacagtcagtacgagcagaaggtcaggccttgcatcgatcttatcgattcattgagagccctcggcgttgagcaggaccttgcgcttcctgctattgctgtcatcggggaccagtcctccggcaaatcttcagtcttagaagccctgtccggagtcgcccttcctcgcgggagcgggattgtaacaaggtgtcccctggtcctcaaacttaaaaaacagccttgtgaggcttgggccgggcgcatttcatatcgaaataccgagctggagttacaagacccaggccaagttgagaaggaaatacacaaagcccaaaacgtcatggctgggaacgggaggggcatctcccatgagctgatcagccttgagataacaagcccagaagtaccggacctgaccattatcgaccttcccgggattacccgggttgccgtagacaatcaaccaagagacattggcttacagatcaaagccttaataaagaagtacattcaacggcaacagaccattaatttagtggtggtgccatgcaacgttgacattgctacgaccgaggccctatccatggctcatgaggtcgaccctgaaggagacagaacaatcggaatactaacaaagcctgatctcatggatcggggcaccgagaaaagcgtgatgaacgtggtgcgaaacctcacctacccgcttaagaaaggatacatgattgtgaaatgccgggggcagcaggaaatcacaaatagactgagtctcgcagaagccaccaagaaggaaatcactttctttcagacacacccctattttagagtgcttctggaagaaggatccgctactgtaccacgacttgccgagcggctgaccacagagctaattatgcatatccagaagagcctgccccttctcgagggtcaaatccgggagagtcaccagaaggcaacggaggagctacggcgctgcggggccgatatccctagtcaagaggcagataaaatgtttttcctgatcgaaaagataaagatgttcaaccaggacattgaaaagctcgttgagggagaagaggtggtgcgcgagaatgaaaccaggctgtacaacaagattcgcgaagactttaaaaattgggttggaatcctcgccactaatacccaaaaggtcaagaatatcattcacgaagaggtcgagaagtacgagaagcagtatcggggtaaagagttattgggatttgttaactacaagaccttcgaaattattgtgcatcaatatatccagcaactcgtcgagcccgctctgtctatgctccaaaaagccatggaaatcattcagcaggccttcattaacgtcgctaagaaacatttcggggaatttttcaacctgaaccagactgtgcagagcactattgaagatattaaagttaagcacaccgcgaaggccgagaacatgatccagcttcaatttcggatggaacagatggtattttgccaggatcagatatacagcgtggtgttaaaaaaagtgagggaggaaatctttaaccctctgggcacaccctctcagaatatgaagctcaatagccacttcccgtccaatgagagcagtgttagtagttttacagaaattggcatccatctcaatgcttactttctggaaacctctaaaaggttggctaatcagattccttttataattcagtatttcatgctgagagagaatggcgactccctgcagaaagctatgatgcaaatcttgcaggagaagaacagatattcttggctgctgcaggagcagagcgagaccgccaccaagcgccgtattttgaaagaaagaatataccgtcttactcaggctcgccacgccctctgtcagttttcatccaaagaaatccattag

SEQ ID NO: 322950 - DNA, 45 bp, Artificial Sequence
  derived and/or modified sequence
atgtccaaggcccacaaaccctggccgtacaggcgcaggagttag

SEQ ID NO: 322951 - DNA, 2148 bp, Artificial Sequence
  derived and/or modified sequence
atgagcaaggcccacaagccctggccctacagaagaagaagccagttcagcagcaggaagtacctgaagaaggagatgaacagcttccagcagcagcccccacccttcggcaccgtgcccccccagatgatgttcccccccaactggcagggcgctgagaaggatgctgccttcctggccaaggacttcaacttcctgaccctgaacaaccagcccccacctggcaacagaagccagccccgggccatgggccctgagaacaacctgtacagccagtatgagcagaaggtgcggccctgcatcgacctgattgacagcctgcgggccctgggcgtggagcaggacctggccctgcctgccatcgccgtcatcggggaccagagcagcggcaagagctctgtgctggaggccctgtctggagtggccctgccccggggcagcggcatcgtgacccgctgccccctggtgctgaagctgaagaagcagccctgtgaggcctgggccggccgcatctcctacagaaacacagagctggagctgcaggaccccggccaggtggagaaggagatccacaaggcccagaatgtgatggctggaaatggccggggcatcagccatgagctgatcagcctggagatcaccagccctgaggtgcctgacctgaccatcatcgacctgcccggcatcaccagggtggccgtggacaaccagccccgggacatcggcctgcagatcaaggccctgatcaagaagtacatccagaggcagcagaccatcaacctggtggtggtgccctgcaatgtggacatcgccaccacagaggccctgtccatggcccacgaggtggaccctgagggggacaggaccatcggcatcctgaccaagccagacctgatggaccggggcacagagaagtctgtgatgaatgtggtgaggaacctgacctaccccctgaagaagggctacatgattgtgaagtgccggggccagcaggagatcaccaaccggctgagcctggccgaggccaccaagaaggagatcaccttcttccagacccacccctacttccgggtgctgctggaggagggcagcgccaccgtgccccggctggccgagcggctgaccacagagctgatcatgcacatccagaagagcctgcccctgctggagggccagatccgggagagccaccagaaggccacagaggagctgcggcgctgtggggctgacatccccagccaggaggccgacaagatgttcttcctgattgagaagatcaagatgttcaaccaggacatcgagaagctggtggagggggaggaggtggtgagagaaaatgagacccggctgtacaacaagatccgggaggacttcaagaactgggtgggcatcctggccaccaacacccagaaggtgaagaacatcatccacgaggaggtggagaagtatgagaagcagtaccggggcaaggagctgctgggctttgtgaactacaagacctttgagatcatcgtgcaccagtacatccagcagctggtggagcccgccctgtccatgctgcagaaggccatggagatcatccagcaggccttcatcaacgtggccaagaagcactttggagagttcttcaacctgaaccagacagtgcagagcaccatcgaggacatcaaggtgaagcacacagccaaggccgagaacatgatccagctgcagttcaggatggagcagatggtgttctgccaggaccagatctacagcgtggtgctgaagaaggtgcgggaggagatcttcaaccccctgggcacccccagccagaacatgaagctgaacagccacttccccagcaatgaatcttctgtgagcagcttcacagagatcggcatccacctgaatgcctacttcctggagaccagcaagaggctggccaaccagatccccttcatcatccagtacttcatgctgcgggagaatggagacagcctgcagaaggccatgatgcagatcctgcaggagaagaaccgctacagctggctgctgcaggagcagagcgagacagccaccaagaggcgcatcctgaaggagcgcatctaccgcctgacccaggcccggcatgccctgtgccagttcagcagcaaggagatccactag

SEQ ID NO: 322952 - DNA, 3042 bp, Artificial Sequence
  derived and/or modified sequence
atttctctccctgtttgttgatgacggagcaggggagggagtggttcatatgccacataaaagtgaagtggaggaaagggaagagatgatttctccatcctgaacgtgcagcgagcttgtcaggaagatcggaggtgccaagtagcagagaaagcatcccccagctctgacagggagacagcacatgtctaaggcccacaagccttggccctaccggaggagaagtcaattttcttctcgaaaatacctgaaaaaagaaatgaattccttccagcaacagccaccgccattcggcacagtgccaccacaaatgatgtttcctccaaactggcagggggcagagaaggacgctgctttcctcgccaaggacttcaactttctcactttgaacaatcagccaccaccaggaaacaggagccaaccaagggcaatggggcccgagaacaacctgtacagccagtacgagcagaaggtgcgcccctgcattgacctcatcgactccctgcgggctctgggtgtggagcaggacctggccctgccagccatcgccgtcatcggggaccagagctcgggcaagagctctgtgctggaggcactgtcaggagtcgcgcttcccagaggcagcggaatcgtaaccaggtgtccgctggtgctgaaactgaaaaagcagccctgtgaggcatgggccggaaggatcagctaccggaacaccgagctagagcttcaggaccctggccaggtggagaaagagatacacaaagcccagaacgtcatggccgggaatggccggggcatcagccatgagctcatcagcctggagatcacctcccctgaggttccagacctgaccatcattgaccttcccggcatcaccagggtggctgtggacaaccagccccgagacatcggactgcagatcaaggctctcatcaagaagtacatccagaggcagcagacgatcaacttggtggtggttccctgtaacgtggacattgccaccacggaggcgctgagcatggcccatgaggtggacccggaaggggacaggaccatcggtatcctgaccaaaccagatctaatggacaggggcactgagaaaagcgtcatgaatgtggtgcggaacctcacgtaccccctcaagaagggctacatgattgtgaagtgccggggccagcaggagatcacaaacaggctgagcttggcagaggcaaccaagaaagaaattacattctttcaaacacatccatatttcagagttctcctggaggaggggtcagccacggttccccgactggcagaaagacttaccactgaactcatcatgcatatccaaaaatcgctcccgttgttagaaggacaaataagggagagccaccagaaggcgaccgaggagctgcggcgttgcggggctgacatccccagccaggaggccgacaagatgttctttctaattgagaaaatcaagatgtttaatcaggacatcgaaaagttagtagaaggagaagaagttgtaagggagaatgagacccgtttatacaacaaaatcagagaggattttaaaaactgggtaggcatacttgcaactaatacccaaaaagttaaaaatattatccacgaagaagttgaaaaatatgaaaagcagtatcgaggcaaggagcttctgggatttgtcaactacaagacatttgagatcatcgtgcatcagtacatccagcagctggtggagcccgcccttagcatgctccagaaagccatggaaattatccagcaagctttcattaacgtggccaaaaaacattttggcgaatttttcaaccttaaccaaactgttcagagcacgattgaagacataaaagtgaaacacacagcaaaggcagaaaacatgatccaacttcagttcagaatggagcagatggttttttgtcaagatcagatttacagtgttgttctgaagaaagtccgagaagagatttttaaccctctggggacgccttcacagaatatgaagttgaactctcattttcccagtaatgagtcttcggtttcctcctttactgaaataggcatccacctgaatgcctacttcttggaaaccagcaaacgtctcgccaaccagatcccatttataattcagtattttatgctccgagagaatggtgactccttgcagaaagccatgatgcagatactacaggaaaaaaatcgctattcctggctgcttcaagagcagagtgagaccgctaccaagagaagaatccttaaggagagaatttaccggctcactcaggcgcgacacgcactctgtcaattctccagcaaagagatccactgaagggcggcgatgcctgtggttgttttcttgtgcgtactcattcattctaaggggagtcggtgcaggatgccgcttctgctttggggccaaactcttctgtcactatcagtgtccatctctactgtactccctcagcatcagagcatgcatcaggggtccacacaggctcagctctctccaccacccagctcttccctgaccttcacgaagggatggctctccagtccttgggtcccgtagcacacagttacagtgtcctaagatactgctatcattcttcgctaatttgtatttgtattcccttccccctacaagattatgagaccccagagggggaaggtctgggtcaaattcttcttttgtatgtccagtctcctgcacagcacctgcagcattgtaactgcttaataaatgacatctcactgaacgaatgagtgctgtgtaagtgatggagatacctgaggctattgctcaagcccaggccttggacatttagtgactgttagccggtccctttcagatccagtggccatgccccctgcttcccatggttcactgtcattgtgtttcccagcctctccactcccccgccagaaaggagcctgagtgattctcttttcttcttgtttccctgattatgatgagcttccattgttctgttaagtcttgaagaggaatttaataaagcaaagaaactttttaaaaacgta

SEQ ID NO: 322953 - DNA, 2148 bp, Artificial Sequence
  derived and/or modified sequence
atgagcaaggcccacaagccctggccctaccggcggcggagccagttcagctcccggaagtacctcaagaaagagatgaatagttttcagcagcaaccccctcctttcggcacagtaccgccccaaatgatgtttccaccaaactggcagggtgccgaaaaagatgcagccttcctggcaaaagattttaattttctgactttaaacaaccagcctcccccagggaaccgtagccaaccaagggcgatgggtcccgaaaacaacttatactctcagtacgagcaaaaggtccgtccttgcattgaccttattgattcactcagggcgctgggggtggagcaggatcttgccctgccagctatcgccgtgataggcgatcaaagcagtgggaagtcttccgttttggaagctctgagcggcgtcgcgttgccccgggggtctggaatcgtgacgcgttgtccgttggtcttgaagcttaaaaagcagccgtgtgaggcctgggccggacggatttcttaccgtaacacagagctagaactgcaggaccctggacaagtggaaaaagaaattcataaggcccagaacgtcatggccggcaacggacgtggaatcagtcacgagttaatcagccttgagatcacctcacccgaggttccagatctgacgatcattgacctccccgggattacacgcgttgcagttgacaatcagccacgtgacatcgggctacaaatcaaggccctcattaaaaaatacattcagagacagcagacaattaatttggtcgttgtaccttgtaacgtggatatagcaaccacggaggcattatctatggcacatgaggtggatcccgaaggagaccggaccatcggaatccttacgaaacccgatcttatggacagaggaacagagaagagcgtgatgaatgtggtaagaaacctgacatacccattgaagaaagggtacatgattgtgaagtgccggggccagcaggaaatcactaatcgtctgtccctcgcagaggccactaagaaggagattacatttttccagacacatccgtattttcgagtgctcctagaggagggctccgcaaccgtcccaagactggcagagcgactgacaacggagctgatcatgcacattcagaagtccctccccctattagaggggcagatcagggagtcccatcagaaggctactgaggagttgcgaagatgcggcgcggatatcccttcacaggaagcagataagatgttctttcttatcgaaaagatcaagatgttcaaccaggatatcgaaaaactggtggagggggaagaggtagtgcgggagaatgagaccagactttacaacaagatccgcgaagattttaaaaactgggtaggaatcttggccaccaatactcagaaagtcaagaatattatacacgaggaggtcgaaaagtatgaaaaacagtatcgagggaaagaactattggggttcgtcaattacaagacattcgaaatcatcgtgcaccaatatatccagcaactggtggaacctgcactgtccatgctgcagaaggctatggagattattcagcaggcatttatcaacgtcgccaagaagcatttcggtgagttttttaacctgaaccagaccgttcagagcacaatcgaagatatcaaagtgaagcataccgccaaagcggaaaatatgattcagttgcaatttagaatggaacaaatggtgttttgccaagatcaaatctactctgttgttctgaagaaggtccgggaagaaatctttaaccctttggggactccctctcagaatatgaagcttaatagccacttcccctctaacgaatctagcgtgagttctttcactgagattggcatacacctgaacgcttacttccttgaaacttctaaaaggctggcgaaccagatcccctttataatacaatactttatgttgcgcgagaatggtgatagcttacagaaggccatgatgcagatactccaggaaaagaacaggtactcatggctcctacaggagcagtccgaaaccgcaaccaagaggaggatactaaaggaacggatctacaggctgacacaggcacgacatgccctgtgtcagttttcttccaaggaaatccattag

SEQ ID NO: 322954 - DNA, 45 bp, Artificial Sequence
  derived and/or modified sequence
atgagcaaggcccacaagccctggccctaccggcggcggagctag

SEQ ID NO: 322955 - DNA, 2148 bp, Artificial Sequence
  derived and/or modified sequence
atgagcaaggcccataagccatggccataccgcagacgatcacaattttcatcgcgtaaatatctgaaaaaggaaatgaactcatttcagcagcagcctcctccgttcggaacagtgccacctcaaatgatgttcccacccaattggcagggggcagagaaggacgctgctttcctggcaaaagatttcaactttctgactctgaacaaccagcctccccctgggaataggagccagcccagggctatgggacctgagaataacttgtactcgcagtatgagcagaaagtgcggccttgcatagatctgatcgactcccttagagccctgggggtggagcaagacctcgccctccccgctattgccgtaattggggatcaaagcagcggcaagtcgagtgtgctcgaagctttgtctggcgtggctctgcctagaggcagcggaatcgttaccagatgtccattggtcctgaagctgaaaaagcaaccatgtgaggcctgggcaggaaggatttcatataggaataccgaactggagctccaggaccccggacaggttgagaaggagattcataaagcccagaacgtgatggctggcaatgggaggggaatcagtcatgaactaatctccctcgaaattacatcccccgaggtaccagaccttactataatcgacctcccaggcatcacaagggtcgccgtcgataatcagccgagagacatcggcctacagattaaagcactcataaagaaatacattcagaggcaacagactataaacctggtagttgttccctgcaatgtagacatagccacaacagaggctctctctatggcacacgaagttgaccccgaaggagatcggacaatcgggatcctcacaaaacctgacctcatggacaggggaactgagaaatcagtcatgaatgtcgtgcgaaatctaacctaccctcttaaaaaggggtatatgatagtgaaatgccgaggacaacaggagataacaaataggcttagcttggcagaggccacaaagaaagaaatcaccttctttcagacgcacccttacttcagagtcctcttagaagaaggctccgctacagtgcctcggctcgccgaacggctcaccacagagctgatcatgcacattcagaagtctctgccactgctcgagggtcagatacgcgagtcccatcagaaggctaccgaagagctgcggaggtgcggggcagacattccgagccaggaagctgataaaatgttttttctcatcgagaaaataaagatgttcaaccaggacattgagaaactggttgagggggaggaggtggtaagggagaatgagacaagactctataataagatcagagaggacttcaaaaactgggtcggcatcttagccacgaatactcagaaggtgaagaacatcatccacgaggaggtcgagaagtatgagaaacagtaccgtggcaaggagctgctcgggtttgtcaattacaagacgtttgaaattattgtgcatcagtacatccagcagttggtcgagcccgctctgagcatgctgcaaaaggctatggagatcatccagcaggcatttattaacgtcgccaagaagcattttggagaatttttcaacctgaaccagaccgttcagagtactatagaggacataaaggttaagcatacagctaaggccgaaaacatgattcagctgcagttcagaatggagcagatggtcttctgtcaggaccaaatctattctgtggttttaaagaaagtgagagaggaaattttcaatccccttgggacgccgtcacaaaacatgaagttgaacagccactttccatctaacgaaagttcggtcagcagtttcacggaaataggtatccacctaaatgcatactttttggagaccagcaagcgcctggctaaccagattcctttcatcatccagtattttatgttgcgcgagaacggcgattctctgcagaaagctatgatgcagatactgcaagaaaaaaacaggtattcttggttactgcaggagcagtccgagacggccacaaagcgacgaatcttaaaggagagaatataccgtctcactcaagcacgccacgctctgtgtcagttctcctctaaagagattcattag

SEQ ID NO: 322956 - DNA, 45 bp, Artificial Sequence
  derived and/or modified sequence
atgtcaaaagctcacaaaccgtggccatacagacgccgtagttag

SEQ ID NO: 322957 - DNA, 2148 bp, Artificial Sequence
  derived and/or modified sequence
atgagcaaggcccacaagccctggccctacagaagaagaagccagttcagcagcagaaagtacctgaagaaggagatgaacagcttccagcagcagcccccccccttcggcaccgtgcccccccagatgatgttcccccccaactggcagggcgccgagaaggacgccgccttcctggccaaggacttcaacttcctgaccctgaacaaccagcccccccccggcaacagaagccagcccagagccatgggccccgagaacaacctgtacagccagtacgagcagaaggtgagaccctgcatcgacctgatcgacagcctgagagccctgggcgtggagcaggacctggccctgcccgccatcgccgtgatcggcgaccagagcagcggcaagagcagcgtgctggaggccctgagcggcgtggccctgcccagaggcagcggcatcgtgaccagatgccccctggtgctgaagctgaagaagcagccctgcgaggcctgggccggcagaatcagctacagaaacaccgagctggagctgcaggaccccggccaggtggagaaggagatccacaaggcccagaacgtgatggccggcaacggcagaggcatcagccacgagctgatcagcctggagatcaccagccccgaggtgcccgacctgaccatcatcgacctgcccggcatcaccagagtggccgtggacaaccagcccagagacatcggcctgcagatcaaggccctgatcaagaagtacatccagagacagcagaccatcaacctggtggtggtgccctgcaacgtggacatcgccaccaccgaggccctgagcatggcccacgaggtggaccccgagggcgacagaaccatcggcatcctgaccaagcccgacctgatggacagaggcaccgagaagagcgtgatgaacgtggtgagaaacctgacctaccccctgaagaagggctacatgatcgtgaagtgcagaggccagcaggagatcaccaacagactgagcctggccgaggccaccaagaaggagatcaccttcttccagacccacccctacttcagagtgctgctggaggagggcagcgccaccgtgcccagactggccgagagactgaccaccgagctgatcatgcacatccagaagagcctgcccctgctggagggccagatcagagagagccaccagaaggccaccgaggagctgagaagatgcggcgccgacatccccagccaggaggccgacaagatgttcttcctgatcgagaagatcaagatgttcaaccaggacatcgagaagctggtggagggcgaggaggtggtgagagagaacgagaccagactgtacaacaagatcagagaggacttcaagaactgggtgggcatcctggccaccaacacccagaaggtgaagaacatcatccacgaggaggtggagaagtacgagaagcagtacagaggcaaggagctgctgggcttcgtgaactacaagaccttcgagatcatcgtgcaccagtacatccagcagctggtggagcccgccctgagcatgctgcagaaggccatggagatcatccagcaggccttcatcaacgtggccaagaagcacttcggcgagttcttcaacctgaaccagaccgtgcagagcaccatcgaggacatcaaggtgaagcacaccgccaaggccgagaacatgatccagctgcagttcagaatggagcagatggtgttctgccaggaccagatctacagcgtggtgctgaagaaggtgagagaggagatcttcaaccccctgggcacccccagccagaacatgaagctgaacagccacttccccagcaacgagagcagcgtgagcagcttcaccgagatcggcatccacctgaacgcctacttcctggagaccagcaagagactggccaaccagatccccttcatcatccagtacttcatgctgagagagaacggcgacagcctgcagaaggccatgatgcagatcctgcaggagaagaacagatacagctggctgctgcaggagcagagcgagaccgccaccaagagaagaatcctgaaggagagaatctacagactgacccaggccagacacgccctgtgccagttcagcagcaaggagatccactag

SEQ ID NO: 322958 - DNA, 45 bp, Artificial Sequence
  derived and/or modified sequence
atgagcaaggcccacaagccctggccctacagaagaagaagctag

SEQ ID NO: 322959 - protein, 14 aa, Artificial Sequence
  derived and/or modified sequence
MSKAHKPWPYRRRS

SEQ ID NO: 322960 - protein, 134 aa, Artificial Sequence
  derived and/or modified sequence
MSKAHKPWPYRRRSQFSSRKYLKKEMNSFQQQPPPFGTVPPQMMFPPNWQGAEKDAAFLAKDFNFLTLNNQPPPGNRSQPRAMGPENNLYSQYEQKVRPCIDLIDSLRALGVEQDLALPAIAVIGDQSSGKSSV

SEQ ID NO: 322961 - protein, 125 aa, Artificial Sequence
  derived and/or modified sequence
MSKAHKPWPYRRRSQFSSRKYLKKEMNSFQQQPPPFGTVPPQMMFPPNWQGAEKDAAFLAKDFNFLTLNNQPPPGNRSQPRAMGPENNLYSQYEQKVRPCIDLIDSLRALGVEQDLALPAIAVIG

SEQ ID NO: 322962 - protein, 129 aa, Artificial Sequence
  derived and/or modified sequence
MSKAHKPWPYRRRSQFSSRKYLKKEMNSFQQQPPPFGTVPPQMMFPPNWQGAEKDAAFLAKDFNFLTLNNQPPPGNRSQPRAMGPENNLYSQYEQKVRPCIDLIDSLRALGVEQDLALPAIAVIGDQSS

SEQ ID NO: 322963 - protein, 201 aa, Artificial Sequence
  derived and/or modified sequence
MSKAHKPWPYRRRSQFSSRKYLKKEMNSFQQQPPPFGTVPPQMMFPPNWQGAEKDAAFLAKDFNFLTLNNQPPPGNRSQPRAMGPENNLYSQYEQKVRPCIDLIDSLRALGVEQDLALPAIAVIGDQSSGKSSVLEALSGVALPRGSAQNVMAGNGRGISHELISLEITSPEVPDLTIIDLPGITRVAVDNQPRDIGLQVS

SEQ ID NO: 322964 - DNA, 405 bp, Artificial Sequence
  derived and/or modified sequence
atgtctaaggctcataagccctggccatatagaagacggtctcagttctcatcaaggaaatacctgaaaaaggaaatgaatagcttccagcagcaaccgcccccatttgggacggtgccccctcaaatgatgtttccaccaaattggcaaggagccgaaaaggatgctgcattcctggccaaggactttaattttttgacgctcaacaaccagccaccgccagggaatcggagccagccccgggctatgggtcctgaaaataacctgtattcccagtatgagcagaaggttaggccctgcattgaccttatcgattctctgcgcgccctgggggtggaacaggatctcgccctgccagctatagctgtgatcggcgaccagtcttctgggaaaagttcagtgtag

SEQ ID NO: 322965 - DNA, 378 bp, Artificial Sequence
  derived and/or modified sequence
atgagtaaagcccacaagccttggccatacaggagacgtagtcagtttagctcgcgcaaatatctgaaaaaagagatgaactccttccagcagcagcctcctcctttcggaacggttcccccacaaatgatgttccctcccaactggcagggcgcagagaaggatgcagcgttcctggccaaagactttaacttcttgacactcaacaatcagcctccacctgggaatcggtcacaacctagagccatgggcccagagaacaacttatacagccagtacgaacagaaggttcggccttgtatcgacttgattgattccctgcgggccttgggcgtggagcaggacctcgccctcccggccatcgccgttatcggttag

SEQ ID NO: 322966 - DNA, 390 bp, Artificial Sequence
  derived and/or modified sequence
atgtctaaagcgcataagccttggccgtaccggagacggagtcagttcagctcccggaagtacctcaagaaggagatgaatagcttccagcaacagcctccacccttcggcacggtgccaccacagatgatgttcccaccgaattggcagggtgcggagaaggatgccgcctttctggccaaagacttcaattttcttactttgaacaatcagccgcctccagggaaccgaagtcaaccaagggccatggggccagagaataacctgtacagccagtacgagcagaaagttagaccatgtatcgatcttattgacagtctacgagctctcggggtagagcaagatctggctcttcccgctattgccgtgattggagatcagtccagttag

SEQ ID NO: 322967 - DNA, 606 bp, Artificial Sequence
  derived and/or modified sequence
atgagtaaagcccacaagccatggccttaccgccgccggtcacagttctcatctcggaagtacctcaaaaaggagatgaattcctttcaacaacagccccctcccttcggtacggtccccccccaaatgatgttccctcccaattggcagggtgccgaaaaggacgcggccttcttagctaaagactttaatttcttaaccctgaataaccagccaccaccagggaacaggagccagccaagggccatgggacccgaaaataatctctatagtcagtacgagcagaaagtccggccatgtattgatctgatagactcactacgggccttgggggtggaacaggacttagctctgcctgcgatcgcggtaatcggggaccagagtagcggcaagagcagcgtgctcgaagctctttcaggcgtggccttacctcgcggctccgcccagaacgtgatggcaggcaacgggcggggtatcagccacgagcttatcagtttggagattacatcgcccgaagtacctgatctcaccatcattgacctccccggcataacaagagtggccgtcgataatcaacccagggacatcggcttacaggtctcctag

SEQ ID NO: 322968 - DNA, 405 bp, Artificial Sequence
  derived and/or modified sequence
atgagcaaggcccacaagccctggccctacagaagaagaagccagttcagcagcaggaagtacctgaagaaggagatgaacagcttccagcagcagcccccacccttcggcaccgtgcccccccagatgatgttcccccccaactggcagggcgctgagaaggatgctgccttcctggccaaggacttcaacttcctgaccctgaacaaccagcccccacctggcaacagaagccagccccgggccatgggccctgagaacaacctgtacagccagtatgagcagaaggtgcggccctgcatcgacctgattgacagcctgcgggccctgggcgtggagcaggacctggccctgcctgccatcgccgtcatcggggaccagagcagcggcaagagctctgtgtag

SEQ ID NO: 322969 - DNA, 378 bp, Artificial Sequence
  derived and/or modified sequence
atgagcaaggcccacaagccctggccctacagaagaagaagccagttcagcagcaggaagtacctgaagaaggagatgaacagcttccagcagcagcccccacccttcggcaccgtgcccccccagatgatgttcccccccaactggcagggcgctgagaaggatgctgccttcctggccaaggacttcaacttcctgaccctgaacaaccagcccccacctggcaacagaagccagccccgggccatgggccctgagaacaacctgtacagccagtatgagcagaaggtgcggccctgcatcgacctgattgacagcctgcgggccctgggcgtggagcaggacctggccctgcctgccatcgccgtcatcggctag

SEQ ID NO: 322970 - DNA, 390 bp, Artificial Sequence
  derived and/or modified sequence
atgagcaaggcccacaagccctggccctacagaagaagaagccagttcagcagcaggaagtacctgaagaaggagatgaacagcttccagcagcagcccccacccttcggcaccgtgcccccccagatgatgttcccccccaactggcagggcgctgagaaggatgctgccttcctggccaaggacttcaacttcctgaccctgaacaaccagcccccacctggcaacagaagccagccccgggccatgggccctgagaacaacctgtacagccagtatgagcagaaggtgcggccctgcatcgacctgattgacagcctgcgggccctgggcgtggagcaggacctggccctgcctgccatcgccgtcatcggggaccagagcagctag

SEQ ID NO: 322971 - DNA, 606 bp, Artificial Sequence
  derived and/or modified sequence
atgagcaaggcccacaagccctggccctacagaagaagaagccagttcagcagcaggaagtacctgaagaaggagatgaacagcttccagcagcagcccccacccttcggcaccgtgcccccccagatgatgttcccccccaactggcagggcgctgagaaggatgctgccttcctggccaaggacttcaacttcctgaccctgaacaaccagcccccacctggcaacagaagccagccccgggccatgggccctgagaacaacctgtacagccagtatgagcagaaggtgcggccctgcatcgacctgattgacagcctgcgggccctgggcgtggagcaggacctggccctgcctgccatcgccgtcatcggggaccagagcagcggcaagagctctgtgctggaggccctgtctggagtggccctgccccggggcagcgcccagaatgtgatggctggaaatggccggggcatcagccatgagctgatcagcctggagatcaccagccctgaggtgcctgacctgaccatcatcgacctgcccggcatcaccagggtggccgtggacaaccagccccgggacatcggcctgcaggtgtcctag

SEQ ID NO: 322972 - DNA, 843 bp, Artificial Sequence
  derived and/or modified sequence
agaccttcaagttaattgttggaacctgcggctctaacacttccagcaaagctacttctgtgaaagctgtgacgagcagaggaaatgggacaggagaggagctgaatcctgagattgtatcgctaggagcccccaaagtacgatgacggtcctcgggccagcatgggggtgcattggcaccatgtaaggaaaggggccctcccgtggcaccgttggagtggggcggtgtggggttgttcggagagaaaagtttcccatgagctctgtttcagcaaacggcgatgaccacttccgtggcaactaaacagtcttgccttcctgcacgtggacatttttcttcatgcatatttctcttgcaaatggttctattgtttgtataacagtatttcatgagcggagaagagttggaagcaaaaatctgttcatgagaaatcctttattaagctcctactgtatgccaggtactttgggctgcaggtacagctgtgaaaaaaaacagcaggcgggaaccagccctgggacaggctccacacactcactgagcaccgcctcctgcacagcgcagtccctgctctcagcctgagcaggcgcagcagccctgccctcccaagaaaggggatggtgagaagcctagtgtcccctccacagagaccagcgccacacatgacagccacacatgacagtgttggtaccagcactcagtctttgagccacaagtgcttataagatagcttgtcaggaagatcggaggtgccaagtagcagagaaagcatcccccagctctgacagggagacagcacatgtctaaggcccacaagccttggccctaccggaggagaagtc

SEQ ID NO: 322973 - DNA, 604 bp, Artificial Sequence
  derived and/or modified sequence
taaacagtcttgccttcctgcacgtggacatttttcttcatgcatatttctcttgcaaatggttctattgtttgtataacagtatttcatgagcggagaagagttggaagcaaaaatctgttcatgagaaatagcttgtcaggaagatcggaggtgccaagtagcagagaaagcatcccccagctctgacagggagacagcacatgtctaaggcccacaagccttggccctaccggaggagaagtcaattttcttctcgaaaatacctgaaaaaagaaatgaattccttccagcaacagccaccgccattcggcacagtgccaccacaaatgatgtttcctccaaactggcagggggcagagaaggacgctgctttcctcgccaaggacttcaactttctcactttgaacaatcagccaccaccaggaaacaggagccaaccaagggcaatggggcccgagaacaacctgtacagccagtacgagcagaaggtgcgcccctgcattgacctcatcgactccctgcgggctctgggtgtggagcaggacctggccctgccagccatcgccgtcatcggggaccagagctcgggcaagagctctgt

SEQ ID NO: 322974 - DNA, 618 bp, Artificial Sequence
  derived and/or modified sequence
gaagtggaggaaagggaagagatgatttctccatcctgaacgtgcagcgggtcttcctgctctgtttcccaggctggagtgcaatggtaccatcatagctcactgcagccttaaacttccgggctcaagtgatcctcctgcctcggcctcccaatgcattgggattacagagcttgtcaggaagatcggaggtgccaagtagcagagaaagcatcccccagctctgacagggagacagcacatgtctaaggcccacaagccttggccctaccggaggagaagtcaattttcttctcgaaaatacctgaaaaaagaaatgaattccttccagcaacagccaccgccattcggcacagtgccaccacaaatgatgtttcctccaaactggcagggggcagagaaggacgctgctttcctcgccaaggacttcaactttctcactttgaacaatcagccaccaccaggaaacaggagccaaccaagggcaatggggcccgagaacaacctgtacagccagtacgagcagaaggtgcgcccctgcattgacctcatcgactccctgcgggctctgggtgtggagcaggacctggccctgccagccatcgccgtcatcgggga

SEQ ID NO: 322975 - DNA, 582 bp, Artificial Sequence
  derived and/or modified sequence
ataaaagtgaagtggaggaaagggaagagatgatttctccatcctgaacgtgcagcgcctttattaagctcctactgtatgccaggtactttgggctgcaggtacagctgtgaaaaaaaacagagcttgtcaggaagatcggaggtgccaagtagcagagaaagcatcccccagctctgacagggagacagcacatgtctaaggcccacaagccttggccctaccggaggagaagtcaattttcttctcgaaaatacctgaaaaaagaaatgaattccttccagcaacagccaccgccattcggcacagtgccaccacaaatgatgtttcctccaaactggcagggggcagagaaggacgctgctttcctcgccaaggacttcaactttctcactttgaacaatcagccaccaccaggaaacaggagccaaccaagggcaatggggcccgagaacaacctgtacagccagtacgagcagaaggtgcgcccctgcattgacctcatcgactccctgcgggctctgggtgtggagcaggacctggccctgccagccatcgccgtcatcggggaccagagctcgg

SEQ ID NO: 322976 - DNA, 1257 bp, Artificial Sequence
  derived and/or modified sequence
aaagctggatggtcgtccgtcccaccatggcgggtgggtaaaggttcttttcctgggctgtgtcattccacccagagcaagggataagcctgtgatagccgtaaatccggaaccactaccaaggtgaaagaccttcaagttaattgttggaacctgcggctctaacacttccagcaaagctacttctgtgaaagctgtgacgagcagaggaaatgggacaggagaggagctgaatcctgagattgtatcgctaggagcccccaaaagcttgtcaggaagatcggaggtgccaagtagcagagaaagcatcccccagctctgacagggagacagcacatgtctaaggcccacaagccttggccctaccggaggagaagtcaattttcttctcgaaaatacctgaaaaaagaaatgaattccttccagcaacagccaccgccattcggcacagtgccaccacaaatgatgtttcctccaaactggcagggggcagagaaggacgctgctttcctcgccaaggacttcaactttctcactttgaacaatcagccaccaccaggaaacaggagccaaccaagggcaatggggcccgagaacaacctgtacagccagtacgagcagaaggtgcgcccctgcattgacctcatcgactccctgcgggctctgggtgtggagcaggacctggccctgccagccatcgccgtcatcggggaccagagctcgggcaagagctctgtgctggaggcactgtcaggagtcgcgcttcccagaggcagcgcccagaacgtcatggccgggaatggccggggcatcagccatgagctcatcagcctggagatcacctcccctgaggttccagacctgaccatcattgaccttcccggcatcaccagggtggctgtggacaaccagccccgagacatcggactgcaggtatcctgaccaaaccagatctaatggacaggggcactgagaaaagcgtcatgaatgtggtgcggaacctcacgtaccccctcaagaagggctacatgattgtgaagtgccggggccagcaggagatcacaaacaggctgagcttggcagaggcaaccaagaaagaaattacattctttcaaacacatccatatttcagagttctcctggaggaggggtcagccacggttccccgactggcagaaagacttaccactgaactcatcatgcatatccaaaaatcgctcccgttgttagaaggacaaataagggagagccaccaga

SEQ ID NO: 322977 - DNA, 405 bp, Artificial Sequence
  derived and/or modified sequence
atgagcaaggcccacaagccctggccctaccggcggcggagccagtttagctcacgtaaatatctgaagaaagagatgaacagttttcagcaacagccgccaccgtttggcacagtgcctccccagatgatgttccccccaaattggcaaggcgcggaaaaggacgccgccttcttagccaaggatttcaatttcctgacacttaataatcagcccccccccggcaatcgatcacagcctcgcgccatgggaccagagaataacctgtactcccaatacgaacaaaaagtacgcccctgtattgatctcattgatagcttacgcgccttgggagtcgagcaggatttggcacttcccgccatcgctgtgataggagaccagtccagcgggaagagcagtgtgtag

SEQ ID NO: 322978 - DNA, 378 bp, Artificial Sequence
  derived and/or modified sequence
atgagcaaggcccacaagccctggccctaccggcggcggagccagttttctagtagaaaatatctgaaaaaggagatgaatagcttccagcaacagcccccaccgtttggtaccgtgcccccacagatgatgtttccacctaactggcagggggccgagaaggacgccgcatttctcgctaaagatttcaactttctgaccctgaacaatcagccacctccggggaatagatcccaaccacgtgcaatgggtccagagaacaatctctattcacaatatgagcagaaagtcaggccgtgcatcgatctcattgattcactgcgggcactcggtgtggagcaggacctcgccttgccagcaattgcagtgattggatag

SEQ ID NO: 322979 - DNA, 390 bp, Artificial Sequence
  derived and/or modified sequence
atgagcaaggcccacaagccctggccctaccggcggcggagccagtttagcagtagaaagtacctgaaaaaagagatgaactctttccagcagcagccacctccatttggcaccgtccctcctcagatgatgtttcctccgaactggcaaggagcagaaaaagatgcagcatttctcgcgaaagatttcaattttctgacccttaacaaccaaccccctccagggaatagaagccaacccagggcaatgggcccagagaacaacctgtacagccagtacgaacaaaaggttaggccatgtattgatctcattgactccttgagggctctgggagtggagcaagatttggctttaccagcgatcgctgtgatcggcgatcagagtagctag

SEQ ID NO: 322980 - DNA, 606 bp, Artificial Sequence
  derived and/or modified sequence
atgagcaaggcccacaagccctggccctaccggcggcggagccagttctctagtagaaagtacctcaagaaggagatgaattcattccagcaacagccacctccctttgggaccgttccaccacaaatgatgtttccaccaaattggcagggcgccgagaaggacgctgcttttctggcgaaggactttaactttctgactctcaacaaccagccaccgccaggcaataggtctcagccccgcgcaatgggcccagaaaataatctttattctcaatacgagcagaaggtgcgcccttgtatcgacctcatcgactctcttagagctctgggagtggaacaagatctcgcactgccggccatcgccgtgatcggggaccaatccagtggtaagagcagcgtcctcgaagccttatctggagttgccctgcctagaggatcggcgcagaacgttatggccggcaatggcagaggcattagccacgagctgatctctctcgagatcacttctcctgaggtccctgatcttaccatcatcgacctaccaggtatcacccgggttgccgtcgataatcagcctcgtgatattggcctgcaggtgagttag

SEQ ID NO: 322981 - DNA, 405 bp, Artificial Sequence
  derived and/or modified sequence
atgagtaaagcccataaaccgtggccctacagaagacggagccagttttcttcccgaaaatatctgaaaaaggagatgaatagctttcagcagcaaccacctccatttgggaccgtgcctccacagatgatgtttccgcctaattggcagggtgctgagaaggatgccgcttttctagctaaagattttaactttttaaccctgaacaaccagccaccccctggtaatcggagtcagccaagagctatgggacccgaaaacaatctttactctcaatatgaacagaaggtgcgaccttgtatagatcttatagactccctgcgggctctcggggtggagcaggatctggctctgccggcaattgctgtcattggcgatcagtcttcaggcaagagtagtgtctag

SEQ ID NO: 322982 - DNA, 378 bp, Artificial Sequence
  derived and/or modified sequence
atgtcaaaggcgcacaagccttggccttatcgaaggcggagccagttcagtagtagaaagtatctgaaaaaggagatgaattcttttcagcagcagcctcccccattcggaacggttcctccacagatgatgtttccacctaattggcagggagccgagaaggacgcagcttttctagcaaaggacttcaatttcctaaccctgaacaaccagcccccaccaggaaatcgatcccagcccagggccatgggacctgaaaacaatttgtactctcagtatgaacagaaggtgagaccgtgtattgatctgattgacagcttgagggctttaggggtggaacaggacctggctttaccggctattgccgtcattggatag

SEQ ID NO: 322983 - DNA, 390 bp, Artificial Sequence
  derived and/or modified sequence
atgtcaaaagcacacaagccatggccttaccggaggcggagtcagttctcttccaggaagtatttgaagaaggagatgaactcatttcagcagcaacctcctccgttcgggacagtgccccctcagatgatgtttccacctaactggcagggggctgaaaaagatgcggctttcttggcaaaggattttaattttctgactttaaacaaccaacctcctcccggtaacaggtctcaacccagagctatgggaccggaaaacaacctgtattcacagtatgaacagaaagtccggccttgtattgacttgatagatagcctgagggccttgggagttgagcaggatcttgctttacccgcaatcgctgtgatcggtgaccagtctagttag

SEQ ID NO: 322984 - DNA, 606 bp, Artificial Sequence
  derived and/or modified sequence
atgagtaaagcccataagccatggccctatcgtcggcgttcacagttctcctccaggaaatacctgaagaaagagatgaactcatttcagcagcaaccacctccattcggcaccgtgccccctcaaatgatgtttccaccaaactggcaaggtgcggaaaaggacgctgcctttttggctaaggacttcaatttcctgactctcaacaatcaaccgccacccggaaaccggtcccagcctagggccatgggccctgagaataacctgtatagtcaatatgaacagaaagtcaggccatgtatcgatttaattgactcactccgtgccttaggcgtggagcaggatctggcactgcccgctattgcggtgatcggtgaccaatcctctggcaaaagttcggttctcgaagcgctgagtggcgtggccctgcctcggggttctgcccagaacgtgatggcaggcaacgggaggggtatctcacatgaactgatctctctcgagattacttcacccgaagtccctgatttgaccatcatcgacctgcctgggatcactagagtggccgttgataatcagcctagggacatcggtttacaggtgagttag

SEQ ID NO: 322985 - DNA, 405 bp, Artificial Sequence
  derived and/or modified sequence
atgagcaaggcccacaagccctggccctacagaagaagaagccagttcagcagcagaaagtacctgaagaaggagatgaacagcttccagcagcagcccccccccttcggcaccgtgcccccccagatgatgttcccccccaactggcagggcgccgagaaggacgccgccttcctggccaaggacttcaacttcctgaccctgaacaaccagcccccccccggcaacagaagccagcccagagccatgggccccgagaacaacctgtacagccagtacgagcagaaggtgagaccctgcatcgacctgatcgacagcctgagagccctgggcgtggagcaggacctggccctgcccgccatcgccgtgatcggcgaccagagcagcggcaagagcagcgtgtag

SEQ ID NO: 322986 - DNA, 378 bp, Artificial Sequence
  derived and/or modified sequence
atgagcaaggcccacaagccctggccctacagaagaagaagccagttcagcagcagaaagtacctgaagaaggagatgaacagcttccagcagcagcccccccccttcggcaccgtgcccccccagatgatgttcccccccaactggcagggcgccgagaaggacgccgccttcctggccaaggacttcaacttcctgaccctgaacaaccagcccccccccggcaacagaagccagcccagagccatgggccccgagaacaacctgtacagccagtacgagcagaaggtgagaccctgcatcgacctgatcgacagcctgagagccctgggcgtggagcaggacctggccctgcccgccatcgccgtgatcggctag

SEQ ID NO: 322987 - DNA, 390 bp, Artificial Sequence
  derived and/or modified sequence
atgagcaaggcccacaagccctggccctacagaagaagaagccagttcagcagcagaaagtacctgaagaaggagatgaacagcttccagcagcagcccccccccttcggcaccgtgcccccccagatgatgttcccccccaactggcagggcgccgagaaggacgccgccttcctggccaaggacttcaacttcctgaccctgaacaaccagcccccccccggcaacagaagccagcccagagccatgggccccgagaacaacctgtacagccagtacgagcagaaggtgagaccctgcatcgacctgatcgacagcctgagagccctgggcgtggagcaggacctggccctgcccgccatcgccgtgatcggcgaccagagcagctag

SEQ ID NO: 322988 - DNA, 606 bp, Artificial Sequence
  derived and/or modified sequence
atgagcaaggcccacaagccctggccctacagaagaagaagccagttcagcagcagaaagtacctgaagaaggagatgaacagcttccagcagcagcccccccccttcggcaccgtgcccccccagatgatgttcccccccaactggcagggcgccgagaaggacgccgccttcctggccaaggacttcaacttcctgaccctgaacaaccagcccccccccggcaacagaagccagcccagagccatgggccccgagaacaacctgtacagccagtacgagcagaaggtgagaccctgcatcgacctgatcgacagcctgagagccctgggcgtggagcaggacctggccctgcccgccatcgccgtgatcggcgaccagagcagcggcaagagcagcgtgctggaggccctgagcggcgtggccctgcccagaggcagcgcccagaacgtgatggccggcaacggcagaggcatcagccacgagctgatcagcctggagatcaccagccccgaggtgcccgacctgaccatcatcgacctgcccggcatcaccagagtggccgtggacaaccagcccagagacatcggcctgcaggtgagctag

SEQ ID NO: 322989 - DNA, 2088 bp, Artificial Sequence
  derived and/or modified sequence
atgagcttacttctgagcttttacttactggggctcctcgtatcctccggccaggaccggttcgctatgttagctaataacaatctccaaatattaaacatcaataagagcgatgaaggcatatatcgctgcgagggccgagtggaggctcgaggagaaatcgatttccgcgacatcatcgtgatcgttaacgttccacccgcgatctctatgcctcagaagtcatttaacgcaactgcagagagaggtgaagaaatgactttcagctgtcgtgcttccggcagcccagagcctgctatatcttggtttcgaaatggtaaactcattgaagaaaatgaaaagtacatcttgaagggctccaatactgaactgacagtgaggaatattattaattccgacggcggcccttacgtgtgccgggccaccaacaaagccggagaagacgaaaagcaggcgtttcttcaggtgttcgtgcagccacacatcatccagctgaagaatgagaccacatatgaaaacggccaggtgacacttgtctgcgacgcagagggggagcctattccagagattacgtggaaaagggcagtcgatggcttcacctttaccgaaggtgataagtcgctcgacggccggatagaggtgaagggccagcatggcagttcctccttacatatcaaggatgtgaagctcagcgattccgggcggtacgattgcgaagccgcatccagaataggcggtcaccagaagagcatgtatttagacatcgaatacgcaccaaagttcatctccaatcaaaccatctattacagctgggagggaaaccctataaatatcagttgcgacgtcaagtctaaccccccagcatctattcattggagaagagacaagttggtcctccccgcaaaaaacaccacaaatctcaaaacatactctaccggcaggaagatgatcctggagatagctcccacatccgacaacgatttcgggcgctacaattgcacagcaaccaaccacattggaactcggtttcaagagtacattctggctctcgctgacgttcctagcagcccttatggagttaaaattatcgagctttcccagaccacagctaaggtgagttttaacaagccagattcacatggtggcgtgcccattcaccattaccaggtcgatgtcaaagaagtggcctctgaaatctggaagatcgttaggagccacggagtgcagactatggttgtgctgaataatttggagccaaatactacttacgaaataagggtcgcagcagtgaatgggaaaggacagggcgattactcgaagattgaaatatttcagaccctgccagttcgggagccctccccccccagtatacacggccagcccagcagcgggaagtcattcaagttatccatcactaaacaagacgatggtggagcacctatcctggagtacatcgtgaaatatcgttctaaagataaggaagaccagtggctggagaagaaggtccaggggaacaaggatcatataattctcgagcacctccagtggactatgggctacgaagtccaaataactgctgcaaatagactcggctactccgagcctacggtatatgagttcagcatgccccctaagcccaatatcattaaagacacgctgttcaacgggcttggcctgggcgctgttattggcctcggcgtagccgctctactgctgattctggtagtgacagacgttagttgtttcttcataaggcagtgcggactgctcatgtgcatcactaggaggatgtgcggcaaaaagtctgggtctagcggcaagtccaaagagctggaagaagggaaagctgcgtatctcaaggacggcagcaaagaacccatcgtggaaatgagaacggaggacgagagggtgaccaaccacgaagatggaagtccagttaacgagcccaacgagaccactcctttgactgaaccagagaagcttcctttgaaagaggaggacgggaaggaagctttgaacccggaaacaatcgaaattaaggtcagcaatgacattatccagagcaaagaggatgatagtaaggcctag

SEQ ID NO: 322990 - DNA, 2088 bp, Artificial Sequence
  derived and/or modified sequence
atgagcctgctgctgtccttctacctgctgggcctgctggtgagcagcggccaggacagatttgccatgctggccaacaacaacctgcagatcctgaacatcaacaagagtgatgagggcatctaccgctgtgagggccgggtggaggcccggggggagattgacttccgggacatcatcgtcatcgtgaatgtgcccccagccatctccatgccccagaagagcttcaatgccacagctgagcggggggaggagatgaccttcagctgccgggccagcggcagccctgagcccgccatctcctggttcagaaatggcaagctgattgaagaaaatgagaagtacatcctgaagggcagcaacacagagctgactgtgaggaacatcatcaacagtgatggcggcccctacgtgtgccgggccaccaacaaggctggagaagatgagaagcaggccttcctgcaggtgtttgtgcagccccacatcatccagctgaagaatgagaccacctatgaaaatggccaggtgaccctggtgtgtgatgctgagggggagcccatccctgagatcacctggaagagagctgtggatggcttcaccttcacagaaggagacaagagcctggatggccgcatcgaggtgaagggccagcacggcagcagcagcctgcacatcaaggatgtgaagctgagtgacagcggccgctatgactgtgaggccgccagccgcatcggcggccaccagaagtccatgtacctggacattgaatatgcccccaagttcatcagcaaccagaccatctactacagctgggagggcaaccccatcaacatcagctgtgatgtgaagagcaaccccccagccagcatccactggaggcgggacaagctggtgctgcctgccaagaacaccaccaacctgaagacctacagcacaggcaggaagatgatcctggagatcgcccccaccagtgacaatgactttggccgctacaactgcacagccaccaaccacatcggcacccgcttccaggagtacatcctggccctggctgatgtgcccagcagcccctacggcgtgaagatcatcgagctgagccagaccacagccaaggtgtccttcaacaagccagacagccacggcggcgtgcccatccaccactaccaggtggatgtgaaggaggtggccagcgagatctggaagatcgtgcgcagccacggcgtgcagaccatggtggtgctgaacaacctggagcccaacaccacctatgagatccgggtggccgctgtgaatggcaagggccagggcgactacagcaagattgagatcttccagaccctgcctgtgcgggagcccagcccccccagcatccacggccagcccagcagcggcaagagcttcaagctgagcatcaccaagcaggatgatggaggagcccccatcctggagtacatcgtgaagtaccgcagcaaggacaaggaggaccagtggctggagaagaaggtgcagggcaacaaggaccacatcatcctggagcacctgcagtggaccatgggctatgaggtgcagatcacagctgccaaccggctgggctacagcgagcccaccgtgtatgagttctccatgccacccaagcccaacatcatcaaggacaccctcttcaacggcctgggcctgggcgctgtgattggcctgggcgtggccgccctgctgctgatcctggtggtgacagatgtgtcctgcttcttcatccggcagtgtggcctgctgatgtgcatcaccaggaggatgtgtgggaagaagagcggcagcagcggcaagagcaaggagctggaggagggcaaggccgcctacctgaaggatggcagcaaggagcccatcgtggagatgaggacagaagatgagcgggtgaccaaccatgaagatggcagccctgtgaatgagcccaatgagaccacccccctgacagagcctgagaagctgcccctgaaggaggaggatggcaaggaggccctgaaccctgagaccatcgagatcaaggtgtccaatgacatcatccagagcaaggaggatgacagcaaggcctag

SEQ ID NO: 322991 - DNA, 2088 bp, Artificial Sequence
  derived and/or modified sequence
atgagcctgctgctgagcttctacctgctgggcctgctggtgagcagtggccaggatcgatttgcaatgctggccaataacaacctgcagattctcaacatcaacaagagtgatgagggaatctaccgatgtgagggccgcgtcgaggcccgtggagaaatcgattttcgggatatcatcgtaatcgtcaatgtgcctcccgcaattagtatgcctcagaaaagctttaatgcaactgcagagcgtggagaagagatgactttttcctgtagagcttccggaagccctgaacctgccatatcatggtttaggaatgggaagctgatcgaggagaatgagaagtacatcctgaaaggtagcaatacagagctgacagtgcgtaatatcataaattccgatggtggtccttatgtgtgtcgcgctacaaacaaggctggtgaggacgaaaagcaggctttcctccaggtgttcgtgcaacctcacattattcagctaaaaaacgagaccacgtacgaaaatgggcaggtcaccttagtctgtgatgcagagggggagcccattccagaaattacatggaaacgggctgtagacggttttacattcactgaaggcgacaagagcttggacgggaggattgaagtgaaaggccagcacgggagttctagtctccatattaaggacgttaaactgagtgattcaggaaggtatgattgtgaagctgcctctaggatcggaggccaccagaagagcatgtacctggacatcgaatatgcacccaagttcattagcaaccagacaatctactattcctgggaaggcaaccctattaacattagttgcgatgtcaaaagtaacccgcccgcctcaatccattggcgtagggataagctcgtgttgccagcgaagaataccacaaacctaaaaacatattcaaccggcaggaaaatgattctcgagatcgcccccacatccgataatgacttcgggcggtataactgcacagccaccaatcatattggcactaggtttcaggagtacatcctggcgctcgccgacgttccaagctccccgtacggggtgaaaatcatagagctgtcgcagacaacggccaaagttagttttaacaaacctgattctcacggtggggtacccatccaccactaccaggtggatgtcaaagaggtcgcctccgaaatctggaagatcgttcgaagccatggcgtgcagacgatggtcgtattgaataacctcgagccgaataccacttacgagattcgtgtagcggcggtcaacggtaaaggccagggggactacagcaaaattgaaatcttccagaccctgccagtccgcgaaccaagccctccttctattcatggccaacccagttctggcaaatctttcaagctgagcatcacaaagcaagacgatggcggcgctcccatactcgaatacatagtgaagtacagaagtaaagataaggaggatcaatggctggagaagaaggtgcagggtaacaaagatcatatcatacttgagcatctgcaatggactatgggatacgaggtgcagatcacagcagcaaatagattgggatactctgagccgaccgtgtacgaatttagtatgcctcctaaacctaacattatcaaggatactttatttaacggattgggcttgggcgcagtgatcggcctcggagtggctgccctgttactgattcttgtagtcactgacgtaagctgcttctttattcgccaatgcggactgttgatgtgtataacccgcagaatgtgtggaaagaagagcggttcctccggaaagtccaaagagctggaagaaggcaaggctgcatacttaaaggacggatctaaagagccaatcgtagagatgcgcaccgaagatgaacgcgtgacaaatcatgaggatggatcaccggtcaacgaacccaacgagacaacacctctcacagagcccgaaaaactgcctctgaaagaagaggatggcaaggaagcactcaaccctgagactatagaaataaaagtgtctaacgacatcattcagagcaaggaagatgactcaaaggcgtag

SEQ ID NO: 322992 - DNA, 2088 bp, Artificial Sequence
  derived and/or modified sequence
atgagcctcctcctctccttctacctgctggggttgcttgtcagtagcgggcaagatcggttcgctatgttagcaaacaataacctgcagattctcaacatcaataaaagtgatgaaggtatatacagatgtgaaggaagagtggaggccaggggagaaattgacttccgtgatatcattgttattgttaatgtgccgccagcaatctcaatgcctcagaaatcttttaatgccacagcagagagaggagaagaaatgacattttcctgcagggcctcaggctctccagaacccgccatctcctggttcaggaatggcaagctcattgaagaaaatgagaagtacatattgaaagggagcaatacagaactcactgtcaggaacataatcaatagtgatggtggtccttatgtctgcagggccacaaataaggcaggagaagatgaaaagcaagctttcctccaagtctttgtacagcctcacataatacagcttaaaaatgaaactacatatgagaatggtcaagtcacactcgtatgtgatgcggaaggggagcctattccagaaatcacttggaaaagagctgtggatggcttcacgttcactgaaggcgataagagcctggacggccgtatcgaagtcaaagggcagcatggaagctcatcactgcatattaaagatgtgaagttgtcagattcagggagatatgactgtgaagctgcaagcagaattggagggcatcaaaagagcatgtaccttgatattgaatatgcccccaagtttatatcaaaccaaacaatttattactcttgggaaggaaatcctatcaatataagttgtgatgtgaaatcgaatccaccagcatcaattcactggagaagagataaattagtcttacctgctaaaaacacgaccaatttaaagacttatagtacaggaagaaagatgatattagagattgcacctacatctgacaatgactttggacgctataattgcacagccactaatcatataggaacaagatttcaagaatatattcttgctttggctgacgtgccatccagtccctatggagtgaagatcatagagctgtcgcagaccacggccaaggtttccttcaacaaaccggactcccatggaggtgtacctattcatcactatcaggtggatgtcaaagaagtagcgtcagaaatctggaaaattgtacgctcccatggagttcaaacaatggttgttttgaacaacctggaaccaaatacaacttatgaaatcagggttgcagctgtaaatggaaagggacaaggagactacagtaaaatagaaatcttccaaacattaccagttcgtgaaccaagtcctccatccatacatggacagccaagcagtggaaagagctttaaactcagcatcaccaaacaggacgatggaggggcccctattttggaatacattgtgaaatatagaagtaaagataaggaagaccaatggctagagaaaaaagtgcaaggaaataaagaccacatcattttggagcatctccagtggaccatggggtatgaagttcagattacagctgccaatagattgggatattctgaaccgacagtttatgaattcagcatgccaccaaagcccaacattattaaagacacgctgtttaatggtcttgggcttggagcagtaattggcctgggagttgctgcactgctgctaattcttgtggtaacagacgtcagctgcttctttattcggcaatgtgggttgctgatgtgcatcactaggagaatgtgtggaaagaaaagtggctccagtggcaaaagtaaagaactcgaagaaggaaaagctgcatacctgaaagatggatcaaaagaaccaatagtggagatgagaacagaggatgaaagagttactaatcacgaagatgggagcccagtaaatgagccaaatgaaaccacaccactgacagaacctgaaaaattgcctttaaaggaagaagatgggaaagaagctctaaatccagaaactatagaaattaaagtttctaacgacatcattcaatcaaaagaagacgacagcaaagcataa

SEQ ID NO: 322993 - DNA, 2088 bp, Artificial Sequence
  derived and/or modified sequence
atgtcactattgttatccttctacttgctcggtttgttagtatcgagtggccaggatcgctttgctatgttggccaataacaacctccagattctgaatataaataagtcagacgagggaatataccggtgtgagggaagagtggaggcaaggggagaaattgactttagagacataattgttattgtgaatgtgccaccagcaatctcaatgcctcagaagagttttaatgctactgctgaacggggtgaagagatgactttttcatgtcgcgcaagcgggtctccagaaccagcaatcagctggttccgcaacgggaagttgattgaagagaacgaaaagtatatactgaaggggagcaatacagagctaacagtgcgaaacattattaactctgatggcggaccctacgtttgtagggccacaaataaagccggtgaagatgagaagcaggcattcttgcaagtctttgtacagccgcacataattcagttgaaaaacgagaccacttacgagaacgggcaagtaaccctggtgtgcgacgctgagggcgaacctatccctgagattacatggaagcgtgccgtggatggattcactttcactgaaggagacaaatcactcgacggcaggatcgaggtgaaggggcagcacggctcctccagcctgcatatcaaggacgtcaagttgtcagacagcggtaggtatgattgtgaggcggcatctcgcatcgggggacaccaaaaaagtatgtatctggatatcgaatacgctccaaagtttatctcaaatcagacaatatattatagctgggaagggaatccaatcaacatttcctgtgacgtgaaaagcaatcctcccgctagtatccactggcgccgagataagctggtgttgcccgcaaaaaacaccaccaatcttaagacttatagcaccgggagaaagatgatccttgaaatcgccccaacaagcgataatgacttcggtaggtataactgtacagctacaaaccacataggaaccagattccaggaatacatccttgcccttgcagacgtccccagcagcccatatggagtcaagattatcgaactttcccagacaaccgcaaaagtgtcctttaacaaacccgactcccatggaggcgtcccaatccatcactatcaagtggacgttaaggaagtagcctcggagatctggaagattgtgcggtctcacggtgtacagaccatggttgtgctgaacaacctagagcccaacactacctacgaaattcgggtcgccgcagtgaatggcaaaggacagggtgactatagtaaaatagaaatctttcagaccctgcctgtgagggagccctccccgcctagtatccatgggcagcctagttccggcaagagcttcaagttgagcattaccaaacaggacgatgggggagcccctattctggaatatatcgtcaagtacaggagtaaggataaggaagaccaatggctcgagaagaaggtccagggaaataaggatcacattatcctcgagcatcttcagtggacaatgggatacgaggtccaaatcactgctgctaatcgcctcggctattcagagccaaccgtctatgaattctcaatgcctcctaagcctaatataattaaagacactctctttaatggcctggggcttggagcagtgataggtcttggtgtggctgctctcctgctgatcctggttgtaacagatgtgtcgtgtttcttcatccgtcaatgcgggctcctaatgtgcattacacgacgtatgtgtggcaaaaaatccggaagcagcgggaagagcaaggagctggaggagggcaaggcagcttatctgaaggatggctccaaagaacccattgttgagatgcggaccgaagacgagcgtgttaccaaccatgaagacggatcccccgtcaatgagcccaatgagactacacccctcacagagcctgagaagctgccactcaaggaagaggatggtaaagaagcccttaatccagagactattgagataaaagtcagcaacgatatcatccagagtaaggaggacgatagcaaagcttag

SEQ ID NO: 322994 - DNA, 2088 bp, Artificial Sequence
  derived and/or modified sequence
atgagcctgctgctgagcttctacctgctgggcctgctggtgagcagcggccaggacagattcgccatgctggccaacaacaacctgcagatcctgaacatcaacaagagcgacgagggcatctacagatgcgagggcagagtggaggccagaggcgagatcgacttcagagacatcatcgtgatcgtgaacgtgccccccgccatcagcatgccccagaagagcttcaacgccaccgccgagagaggcgaggagatgaccttcagctgcagagccagcggcagccccgagcccgccatcagctggttcagaaacggcaagctgatcgaggagaacgagaagtacatcctgaagggcagcaacaccgagctgaccgtgagaaacatcatcaacagcgacggcggcccctacgtgtgcagagccaccaacaaggccggcgaggacgagaagcaggccttcctgcaggtgttcgtgcagccccacatcatccagctgaagaacgagaccacctacgagaacggccaggtgaccctggtgtgcgacgccgagggcgagcccatccccgagatcacctggaagagagccgtggacggcttcaccttcaccgagggcgacaagagcctggacggcagaatcgaggtgaagggccagcacggcagcagcagcctgcacatcaaggacgtgaagctgagcgacagcggcagatacgactgcgaggccgccagcagaatcggcggccaccagaagagcatgtacctggacatcgagtacgcccccaagttcatcagcaaccagaccatctactacagctgggagggcaaccccatcaacatcagctgcgacgtgaagagcaacccccccgccagcatccactggagaagagacaagctggtgctgcccgccaagaacaccaccaacctgaagacctacagcaccggcagaaagatgatcctggagatcgcccccaccagcgacaacgacttcggcagatacaactgcaccgccaccaaccacatcggcaccagattccaggagtacatcctggccctggccgacgtgcccagcagcccctacggcgtgaagatcatcgagctgagccagaccaccgccaaggtgagcttcaacaagcccgacagccacggcggcgtgcccatccaccactaccaggtggacgtgaaggaggtggccagcgagatctggaagatcgtgagaagccacggcgtgcagaccatggtggtgctgaacaacctggagcccaacaccacctacgagatcagagtggccgccgtgaacggcaagggccagggcgactacagcaagatcgagatcttccagaccctgcccgtgagagagcccagcccccccagcatccacggccagcccagcagcggcaagagcttcaagctgagcatcaccaagcaggacgacggcggcgcccccatcctggagtacatcgtgaagtacagaagcaaggacaaggaggaccagtggctggagaagaaggtgcagggcaacaaggaccacatcatcctggagcacctgcagtggaccatgggctacgaggtgcagatcaccgccgccaacagactgggctacagcgagcccaccgtgtacgagttcagcatgccccccaagcccaacatcatcaaggacaccctgttcaacggcctgggcctgggcgccgtgatcggcctgggcgtggccgccctgctgctgatcctggtggtgaccgacgtgagctgcttcttcatcagacagtgcggcctgctgatgtgcatcaccagaagaatgtgcggcaagaagagcggcagcagcggcaagagcaaggagctggaggagggcaaggccgcctacctgaaggacggcagcaaggagcccatcgtggagatgagaaccgaggacgagagagtgaccaaccacgaggacggcagccccgtgaacgagcccaacgagaccacccccctgaccgagcccgagaagctgcccctgaaggaggaggacggcaaggaggccctgaaccccgagaccatcgagatcaaggtgagcaacgacatcatccagagcaaggaggacgacagcaaggcctag

SEQ ID NO: 322995 - protein, 424 aa, Artificial Sequence
  derived and/or modified sequence
MVRSDSGGQVYLDYHNRQGLFVDWKYNEALYLEEGQPETYYRTALLQVTISLSKVELSVGESKFFTCTAIGEPESIDWYNPQGEKIISTQRVVVQKEGVRSRLTIYNANIEDAGIYRCQATDAKGQTQEATVVLEIYQKLTFREVVSPQEFKQGEDAEVVCRVSSSPAPAVSWLYHNEEVTTISDNRFAMLANNNLQILNINKSDEGIYRCEGRVEARGEIDFRDIIVIVNVPPAISMPQKSFNATAERGEEMTFSCRASGSPEPAISWFRNGKLIEENEKYILKGSNTELTVRNIINSDGGPYVCRATNKAGEDEKQAFLQVFVQPHIIQLKNETTYENGQVTLVCDAEGEPIPEITWKRAVDGFTFTEGDKSLDGRIEVKGQHGSSSLHIKDVKLSDSGRYDCEAASRIGGHQKSMYLDIES

SEQ ID NO: 322996 - DNA, 1275 bp, Artificial Sequence
  derived and/or modified sequence
atggtccggagcgacagtggtggacaagtctatctcgattatcacaataggcaggggttgtttgtcgattggaaatacaacgaagctctgtaccttgaagagggacagcctgagacctattacaggacggccctgctgcaggtaactatcagcctctccaaggtcgaactttccgtgggagaatccaagttcttcacatgtaccgcgataggggagccagagagcatcgattggtataacccccaaggtgaaaaaatcatttcaacacagcgagtggtggtgcagaaagagggtgttcgaagtcgactgaccatatataacgcaaatatcgaggacgcaggaatataccgctgtcaggctaccgacgcgaagggccagacccaggaggccaccgtggtactggaaatttaccagaagctaacgtttcgcgaggtagtgagtccccaagagtttaaacagggcgaggatgccgaggttgtctgtagagtctccagctcacctgccccagccgtgtcatggctctaccacaacgaggaagtcactaccatctctgacaatagattcgctatgctcgcgaataacaaccttcagattctaaacattaacaaatcagacgagggcatttaccgctgcgagggacgggtagaagcacgcggcgagattgatttccgggatattattgtgattgtcaacgtccccccagctattagcatgccccaaaaatctttcaacgccacagccgagcggggcgaagagatgacattcagctgccgagccagcggctctcccgagccagcgatctcttggttcaggaatgggaagctcattgaggaaaatgagaagtatatcctgaagggtagcaatactgagctaaccgtacgcaacatcattaactcggatgggggcccgtatgtgtgtcgcgccaccaataaagctggcgaagacgagaaacaggcgttccttcaggttttcgtccagccccatatcattcaactaaagaacgagactacctacgagaatggacaggtgacactggtgtgcgatgctgagggtgaacccatccctgagatcacttggaagcgggccgtggacgggttcacttttacagagggcgataagtcccttgacggtagaatcgaagtgaagggccagcatgggtcttccagcctgcatatcaaagatgtgaagctgagcgacagcggccgctatgattgtgaggcagccagtagaataggaggtcatcagaagtcaatgtacctcgatatagaaagctag

SEQ ID NO: 322997 - DNA, 1275 bp, Artificial Sequence
  derived and/or modified sequence
atggtgcggagtgacagcggcggccaggtgtacctggactaccacaaccggcagggcctgtttgtggactggaagtacaatgaggccctgtacctggaggagggccagcctgagacctactacagaacagccctgctgcaggtgaccatcagcctgagcaaggtggagctgtctgtgggggagagcaagttcttcacctgcacagccatcggggagcctgagagcattgactggtacaacccccagggcgagaagatcatcagcacccagagggtggtggtgcagaaggagggcgtgcgcagccggctgaccatctacaatgccaacattgaagatgctggcatctaccgctgccaggccacagatgccaagggccagacccaggaggccaccgtggtgctggagatctaccagaagctgaccttccgggaggtggtgagcccccaggagttcaagcagggagaagatgctgaggtggtgtgccgggtgagcagcagccctgccccagctgtgtcctggctgtaccacaatgaggaggtgaccaccatcagtgacaacagatttgccatgctggccaacaacaacctgcagatcctgaacatcaacaagagtgatgagggcatctaccgctgtgagggccgggtggaggcccggggggagattgacttccgggacatcatcgtgattgtgaatgtgcccccagccatctccatgccccagaagagcttcaatgccacagctgagcggggggaggagatgaccttcagctgccgggccagcggcagccctgagcccgccatctcctggttcagaaatggcaagctgattgaggagaatgagaagtacatcctgaagggcagcaacacagagctgactgtgaggaacatcatcaacagtgatggcggcccctacgtgtgccgggccaccaacaaggccggggaggatgagaagcaggccttcctgcaggtgtttgtgcagccccacatcatccagctgaagaatgagaccacctatgaaaatggccaggtgaccctggtgtgtgatgctgagggggagcccatccctgagatcacctggaagagagctgtggatggcttcaccttcacagaaggagacaagagcctggatggaagaattgaggtgaagggccagcacggcagcagcagcctgcacatcaaggatgtgaagctgagtgacagcggccgctatgactgtgaggccgccagcagaattggaggccaccagaagtccatgtacctggacatcgagagctag

SEQ ID NO: 322998 - DNA, 1275 bp, Artificial Sequence
  derived and/or modified sequence
atggtgcggagcgacagcggcggccaggtgtacctggactaccacaatagacaaggcttattcgtggattggaagtataatgaagcactgtatcttgaagagggtcagccagagacctactatcgtactgctctgttacaggtgacaatatctctaagtaaggtcgagctgtctgttggagaaagcaagttctttacttgcaccgctataggtgagcccgagtcgatagattggtacaacccccagggggaaaagatcatatcaactcagcgggtggtggtgcagaaggagggggtgcgaagtagactgacaatttataacgccaacattgaggacgccggaatttatagatgtcaagccaccgacgcaaaaggacagacccaggaagctacagtggtgctggaaatctaccagaaacttacgttccgggaagtcgtgtccccacaggagtttaaacagggggaggatgccgaagtcgtatgtcgtgtttcatcatctcctgcgcctgctgtgtcatggctctatcataacgaagaggtgacgactatttcagataatcgtttcgctatgttggccaataataatctgcagatcctgaatatcaataagtcagatgagggaatctaccgttgcgaaggccgcgttgaggctagaggagaaattgacttccgggacattatcgtgatcgtcaacgttccgccagccataagcatgcctcagaagtccttcaacgctaccgccgagcggggcgaagaaatgactttcagttgcagagcctccggctctccagagcctgcgatttcttggtttcggaatggcaaactcatcgaggagaatgagaaatacattctgaagggaagcaacactgaattgactgtcaggaatatcatcaacagtgacggtggcccttatgtgtgccgcgctacaaacaaagccggcgaggacgagaagcaggccttcttgcaagtgtttgttcagccacacatcatacagctaaagaacgagactacatacgagaacgggcaggtcactctggtgtgtgatgctgagggggaacctatccctgagatcacttggaaaagagcggttgacggtttcacattcaccgagggtgataagagtctggatggccgaatagaagttaaaggccaacatggatcatccagtctgcatatcaaagatgttaagctttcagactccgggcgctatgactgcgaggcagcatctcgaatcggcggtcaccaaaagtctatgtatttggatatcgagtcctag

SEQ ID NO: 322999 - DNA, 1494 bp, Artificial Sequence
  derived and/or modified sequence
agccagcactagtggacttcctgaaatctcgcgccctgtcccacaccggagctggtaccgctgccttctacttcagcacatggaactctgcctccgcagttcttagtccgtacccggcatttcaacaaaaatagttatttgaagagtaccacgatggtgagatctgattcaggaggacaagtttaccttgattatcacaacaggcaaggtctctttgttgactggaaatacaacgaagcactttatcttgaagaagggcaaccagagacttattacaggacagctcttcttcaagtgacaatttcacttagcaaagtagagcttagtgttggagaatctaaattcttcacatgtacagcgattggtgaacctgaaagtatagattggtataatcctcaaggagagaagataatttcaacacagagggtagtagtgcaaaaggaaggtgttaggtcacggttaaccatctacaatgcaaatatagaagatgcagggatatatcgttgtcaagcaacagatgccaaaggacaaacacaagaagctacagtagttttggaaatttaccaaaaactcactttcagagaagtggtatctccacaagaattcaaacaaggagaagatgcagaagtggtttgccgagttagcagttcacctgcacctgctgtcagctggttgtatcataatgaggaagtcaccactatttccgacaatcggttcgctatgttagcaaacaataacctgcagattctcaacatcaataaaagtgatgaaggtatatacagatgtgaaggaagagtggaggccaggggagaaattgacttccgtgatatcattgttattgttaatgtgccgccagcaatctcaatgcctcagaaatcttttaatgccacagcagagagaggagaagaaatgacattttcctgcagggcctcaggctctccagaacccgccatctcctggttcaggaatggcaagctcattgaagaaaatgagaagtacatattgaaagggagcaatacagaactcactgtcaggaacataatcaatagtgatggtggtccttatgtctgcagggccacaaataaggcaggagaagatgaaaagcaagctttcctccaagtctttgtacagcctcacataatacagcttaaaaatgaaactacatatgagaatggtcaagtcacactcgtatgtgatgcggaaggggagcctattccagaaatcacttggaaaagagctgtggatggcttcacgttcactgaaggcgataagagcctggacggccgtatcgaagtcaaagggcagcatggaagctcatcactgcatattaaagatgtgaagttgtcagattcagggagatatgactgtgaagctgcaagcagaattggagggcatcaaaagagcatgtaccttgatattgaatcttaaacagatttcttggcattcttccagttcattttcaacatttccgaggcgttactttactaagaagca

SEQ ID NO: 323000 - DNA, 1275 bp, Artificial Sequence
  derived and/or modified sequence
atggttcgctcagattctggcggacaagtctacttggattaccacaatagacagggtttgttcgtggattggaagtacaatgaggcactctacttggaagagggacagccggagacttattacaggaccgccctattgcaagtaacaattagcttgagtaaggtggaattaagtgtaggggagagcaagtttttcacctgtacagcaatcggtgaaccagaatccatcgactggtacaatccgcagggagagaaaattatctccactcaaagagtggttgttcaaaaggaaggagtgagaagcagactgacaatttataatgcaaacatcgaggacgcaggcatctatcggtgccaggctaccgatgcaaaaggacaaacccaggaggctacagtggtcttggagatttatcaaaaactaacatttcgggaagtggtgtctcctcaggaattcaaacagggagaagacgccgaagtggtctgccgagtcagttctagccccgcacccgctgtaagctggttgtaccataatgaagaggtcacaacgatctcggataaccggtttgcgatgctagcaaataacaatctccagatcctcaacattaataagagcgatgagggaatttatagatgtgaagggcgagtggaggccaggggcgagatagactttagggatatcatagttatcgtcaacgttccgcctgctattagtatgcctcagaaatccttcaatgcaactgctgagaggggcgaggaaatgaccttctcatgtcgcgcttccggatcacccgagccagccatctcctggtttcggaatggcaagctcatcgaggagaacgagaagtacattctgaaggggagcaacaccgagctgactgtacgtaatatcattaattctgacgggggtccttacgtgtgtcgagccactaacaaagctggtgaggacgaaaagcaagcattcctccaggtgttcgtgcagccccacattattcagctgaagaatgagaccacatacgaaaacggacaggtgaccctagtctgcgatgctgaaggagagccgatccccgaaatcacttggaaacgcgctgtcgatgggtttaccttcactgaaggtgataagagtctagatggccgtatagaggtgaaaggccagcatggctcttcctccctgcatatcaaagacgtgaaattgtctgacagtgggaggtacgactgtgaggcggcttcacgtataggcggacatcagaagtccatgtacctcgatatcgagtcctag

SEQ ID NO: 323001 - DNA, 1275 bp, Artificial Sequence
  derived and/or modified sequence
atggtgagaagcgacagcggcggccaggtgtacctggactaccacaacagacagggcctgttcgtggactggaagtacaacgaggccctgtacctggaggagggccagcccgagacctactacagaaccgccctgctgcaggtgaccatcagcctgagcaaggtggagctgagcgtgggcgagagcaagttcttcacctgcaccgccatcggcgagcccgagagcatcgactggtacaacccccagggcgagaagatcatcagcacccagagagtggtggtgcagaaggagggcgtgagaagcagactgaccatctacaacgccaacatcgaggacgccggcatctacagatgccaggccaccgacgccaagggccagacccaggaggccaccgtggtgctggagatctaccagaagctgaccttcagagaggtggtgagcccccaggagttcaagcagggcgaggacgccgaggtggtgtgcagagtgagcagcagccccgcccccgccgtgagctggctgtaccacaacgaggaggtgaccaccatcagcgacaacagattcgccatgctggccaacaacaacctgcagatcctgaacatcaacaagagcgacgagggcatctacagatgcgagggcagagtggaggccagaggcgagatcgacttcagagacatcatcgtgatcgtgaacgtgccccccgccatcagcatgccccagaagagcttcaacgccaccgccgagagaggcgaggagatgaccttcagctgcagagccagcggcagccccgagcccgccatcagctggttcagaaacggcaagctgatcgaggagaacgagaagtacatcctgaagggcagcaacaccgagctgaccgtgagaaacatcatcaacagcgacggcggcccctacgtgtgcagagccaccaacaaggccggcgaggacgagaagcaggccttcctgcaggtgttcgtgcagccccacatcatccagctgaagaacgagaccacctacgagaacggccaggtgaccctggtgtgcgacgccgagggcgagcccatccccgagatcacctggaagagagccgtggacggcttcaccttcaccgagggcgacaagagcctggacggcagaatcgaggtgaagggccagcacggcagcagcagcctgcacatcaaggacgtgaagctgagcgacagcggcagatacgactgcgaggccgccagcagaatcggcggccaccagaagagcatgtacctggacatcgagagctag

SEQ ID NO: 323002 - protein, 112 aa, Artificial Sequence
  derived and/or modified sequence
MLQEAQVFRGLASTVSLSAESGKSEKGQPQNSKKQSPPKSVPTPHRRYSPCGDWKDASSLKPAPVPAEPFDNTTYKNLQHHDYSTYTFLDLNLELSKFRMPQPSSGRESPRH

SEQ ID NO: 323003 - protein, 122 aa, Artificial Sequence
  derived and/or modified sequence
MAAGETQLYAKVSNKLKSRSSPSLLEPLLAMGFPVHTALKALAATGRKTAEEALAWLHDHCNDPSLDDPIPQEYALFLCPTGPLLEKLQEFWRESKRQCAKNRAHEVFPHVTLCDFFTGPAV

SEQ ID NO: 323004 - DNA, 369 bp, Artificial Sequence
  derived and/or modified sequence
atggccgccggcgagacccagctgtacgccaaggtgagcaacaagctgaagagcagaagcagccccagcctgctggagcccctgctggccatgggcttccccgtgcacaccgccctgaaggccctggccgccaccggcagaaagaccgccgaggaggccctggcctggctgcacgaccactgcaacgaccccagcctggacgaccccatcccccaggagtacgccctgttcctgtgccccaccggccccctgctggagaagctgcaggagttctggagagagagcaagagacagtgcgccaagaacagagcccacgaggtgttcccccacgtgaccctgtgcgacttcttcaccggccccgccgtgtag

SEQ ID NO: 323005 - DNA, 369 bp, Artificial Sequence
  derived and/or modified sequence
atggctgctggcgagactcagctttacgcgaaggtctctaacaagctgaaatcccggagttccccaagtctgctcgagcctctcctagccatgggattccccgttcatactgctttgaaagccctggcagccacaggacgcaagactgccgaggaggcactcgcctggctgcatgatcactgtaatgacccaagtttagacgaccccattcctcaagagtatgcactctttctgtgcccaactggacctcttttggagaaactgcaggaattctggcgagagtccaaaagacagtgtgccaaaaatcgggcacacgaggtatttcctcacgtgacactgtgtgacttcttcacaggccccgccgtgtag

SEQ ID NO: 323006 - DNA, 369 bp, Artificial Sequence
  derived and/or modified sequence
atggctgctggggagacccagctgtatgccaaggtgagcaacaagctgaagagccgcagcagccccagcctgctggagcccctgctggccatgggcttccctgtgcacacagccctgaaggccctggccgccactggaaggaagacagctgaggaggccctggcctggctgcatgaccactgcaatgaccccagcctggatgaccccatcccccaggagtatgccctcttcctgtgccccaccggccccctgctggagaagctgcaggagttctggagggagagcaagaggcagtgtgccaagaacagagcccacgaggtgttcccccacgtgaccctgtgtgacttcttcaccggccctgctgtgtag

SEQ ID NO: 323007 - DNA, 369 bp, Artificial Sequence
  derived and/or modified sequence
atggccgccggcgagacccagctgtacgccaaggtgagcaacaagctcaaatctaggagtagcccaagtctgctcgagccactcctggcaatgggatttcccgtacatacggcccttaaagctttggcggcaacaggacgcaagactgccgaggaggccctggcctggctacacgaccactgtaacgacccctccctagacgatcccatcccccaggaatacgcactgtttctgtgtcctaccggacctctcctcgaaaagctgcaggaattctggagggagtcaaagagacaatgcgcaaaaaacagggctcacgaagttttcccacacgtgactctctgcgattttttcaccggccctgctgtgtag

SEQ ID NO: 323008 - DNA, 369 bp, Artificial Sequence
  derived and/or modified sequence
atggcagccggagagacgcagctctatgcaaaggtctcaaacaagctgaagtctcggagctccccctctttgttagaacccctgttagccatggggttccccgtgcatactgcgctgaaagccctcgccgcaactggtcggaagacagccgaggaagctctggcctggcttcatgaccactgcaacgacccgagcctggatgaccctatcccacaggagtacgcactcttcctgtgccccactggcccattgctggagaagctgcaagaattttggcgggaatccaagcgccagtgcgccaagaatcgggcacatgaggtctttccccatgtaacattgtgcgactttttcaccggcccagcggtgtag

SEQ ID NO: 323009 - DNA, 871 bp, Artificial Sequence
  derived and/or modified sequence
atttctgtgtgcaggcgagcttcttggcctaagggcaggaagagatggcagcgggggagacgcagctctacgccaaggtctccaacaagctcaagagccgcagcagcccctcgctcctggagcccctcctggccatgggcttcccggtgcacaccgcgctgaaagcgttggcagccacggggaggaagacggcggaggaggccttggcctggctgcatgatcattgcaatgacccttccctagacgaccccatcccccaggagtatgcccttttcctctgtccaacggggcccctgctggaaaaacttcaagagttctggagagagagcaagcgccagtgtgcaaagaacagagctcatgaggtcttcccacacgtgacactctgtgacttcttcacgggaccagccgtctgattcagaaaaaaaatggcccagtgggtagctccacagcaaaacacaatggcccagcaggcagctctacaggggcaccgggaagacaagaagaatgtgggagctgctcaggagaaaagaaggagaagggagagacagacagccactgctctactcagctccgccagaggggcttaaggaagggcacacccacttctgctaccgcggcctggccccaactctgctgttggcaaactgatttgttccacccatttcaaggaattccatcagggcccaaggaaccctccattccaacaccaggcccctcggtgctggatggaaaggaggaatgcaaacctctgaagggaaaagatttctggaagatgtcccaggagaagcagtaccttccaaagcctccaaccaccaccccggattgcccgagacttgcagggatccccagagcacaagactaaacctggaaa

SEQ ID NO: 323010 - protein, 470 aa, Artificial Sequence
  derived and/or modified sequence
MDLRDQELVKIVGIRYEVGPPTLCCLKLAFIDPATGKLMDKSFSIRYHDMPDVIDFLVLRQFYDEARQRNWQSCDRFRSIIDDAWWFGTVLSQEPYQPQYPDSHFQCYIVRWDNTEIEKLSPWDMEPIPDNVDPPEELGASISVTTDELEKLLYKPQAGEWGQKSRDEECDRIISGIDQLLNLDIAAAFAGPVDLCTYPKYCTVVAYPTDLYTIRMRLVNRFYRRLSALVWEVRYIEHNARTFNEPESVIARSAKKITDQLLKFIKNQHCTNISELSNTSENDEQNAEDLDDSDLPKTSSGRRRDYRDIIDTPMDFGTVRETLDAGNYDSPLEFCKDIRLIFSNAKAYTPNKRSKIYSMTLRLSALFEEKMKKISSDFKIGQKFNEKLRRSQRFKQRQNCKGDSQPNKSIRNLKPKRLKSQTKIIPELVGSPTQSTSSRTAYLGTHKTSAGISSGVTSGLFRFSRIIRKE

SEQ ID NO: 323011 - DNA, 1413 bp, Artificial Sequence
  derived and/or modified sequence
atggacctgagagaccaggagctggtgaagatcgtgggcatcagatacgaggtgggcccccccaccctgtgctgcctgaagctggccttcatcgaccccgccaccggcaagctgatggacaagagcttcagcatcagataccacgacatgcccgacgtgatcgacttcctggtgctgagacagttctacgacgaggccagacagagaaactggcagagctgcgacagattcagaagcatcatcgacgacgcctggtggttcggcaccgtgctgagccaggagccctaccagccccagtaccccgacagccacttccagtgctacatcgtgagatgggacaacaccgagatcgagaagctgagcccctgggacatggagcccatccccgacaacgtggacccccccgaggagctgggcgccagcatcagcgtgaccaccgacgagctggagaagctgctgtacaagccccaggccggcgagtggggccagaagagcagagacgaggagtgcgacagaatcatcagcggcatcgaccagctgctgaacctggacatcgccgccgccttcgccggccccgtggacctgtgcacctaccccaagtactgcaccgtggtggcctaccccaccgacctgtacaccatcagaatgagactggtgaacagattctacagaagactgagcgccctggtgtgggaggtgagatacatcgagcacaacgccagaaccttcaacgagcccgagagcgtgatcgccagaagcgccaagaagatcaccgaccagctgctgaagttcatcaagaaccagcactgcaccaacatcagcgagctgagcaacaccagcgagaacgacgagcagaacgccgaggacctggacgacagcgacctgcccaagaccagcagcggcagaagaagagactacagagacatcatcgacacccccatggacttcggcaccgtgagagagaccctggacgccggcaactacgacagccccctggagttctgcaaggacatcagactgatcttcagcaacgccaaggcctacacccccaacaagagaagcaagatctacagcatgaccctgagactgagcgccctgttcgaggagaagatgaagaagatcagcagcgacttcaagatcggccagaagttcaacgagaagctgagaagaagccagagattcaagcagagacagaactgcaagggcgacagccagcccaacaagagcatcagaaacctgaagcccaagagactgaagagccagaccaagatcatccccgagctggtgggcagccccacccagagcaccagcagcagaaccgcctacctgggcacccacaagaccagcgccggcatcagcagcggcgtgaccagcggcctgttcagattcagcagaatcatcagaaaggagtag

SEQ ID NO: 323012 - DNA, 1413 bp, Artificial Sequence
  derived and/or modified sequence
atggatcttcgagatcaggagctagtgaaaatcgtggggatcaggtatgaggtggggcccccaactctctgctgtctaaaactcgcttttatcgaccctgctacggggaagctcatggacaagtccttctccatacgataccacgatatgccggatgtgatcgacttcttggtgctaaggcagttctatgacgaggcccgccagcgaaattggcaaagctgtgaccgcttcaggagcattattgacgacgcctggtggttcggtactgtactgtcacaggagccataccagccccagtatcctgatagtcattttcagtgctacatagttagatgggacaacaccgaaattgagaagctaagcccttgggatatggaacctattccagacaacgtcgatcctcctgaagagctaggagctagcattagcgtcacaacagacgagttggagaagttactttacaaacctcaggccggagaatggggtcagaaatccagggatgaggaatgtgataggatcataagtggcatagatcagctcctgaatctcgatatagccgctgcgtttgccgggcctgtggatttgtgtacatacccaaagtactgcacggtggtggcctacccaacagacctgtacactattcggatgcgcctggtcaaccgcttttacaggaggctgagcgcgctggtatgggaagtgcgctatatagaacataatgctcgtacctttaatgagcctgaatcagtgattgccaggtctgccaaaaagatcactgatcaacttcttaaattcattaaaaaccagcactgtacaaacatctccgagctgtcgaacaccagcgaaaacgacgaacagaacgccgaggacctggatgactctgacctgcctaagacgtcttcaggacgaagacgggactatagggatatcatagacactcccatggacttcggaacagtgagagagaccttggatgcgggtaattatgacagtcccctggagttctgtaaagatattcggctgattttctctaatgctaaggcctacacaccgaataagcgctccaagatttattcaatgacactaagactctccgcacttttcgaggagaagatgaaaaaaatttcttccgacttcaaaattgggcagaaattcaacgagaaactcagacgatcacagcgctttaagcagagacagaattgcaaaggtgactcacagcctaacaagtccatcagaaatcttaagccgaagcgacttaaaagtcaaacgaaaatcatccccgaattggtgggctcacctacccagtctacctcgtcccgcacagcctaccttggcacgcacaaaacaagcgcagggatatccagcggggttacttccggtctgttcagattctcgagaatcatccgcaaagagtag

SEQ ID NO: 323013 - DNA, 1413 bp, Artificial Sequence
  derived and/or modified sequence
atggacctgcgggaccaggagctggtgaagatcgtgggcatccgctatgaggtgggcccccccaccctgtgctgcctgaagctggccttcattgatcctgccaccgggaagctgatggacaagagcttcagcatccgctaccatgacatgccagatgtgattgacttcctggtgctgcggcagttctatgatgaggcccggcagaggaactggcagagctgtgaccgcttccgcagcatcattgatgatgcctggtggtttggaacagtgctgagccaggagccctaccagccccagtacccagacagccacttccagtgctacatcgtgcgctgggacaacacagaaattgagaagctgagcccctgggacatggagcccatcccagacaacgtggaccccccagaggagctgggcgccagcatctctgtgaccacagatgagctggagaagctgctgtacaagccccaggccggggagtggggccagaagagcagagatgaagaatgtgaccgcatcatctctggaattgaccagctgctgaacctggacattgctgctgcctttgctggccctgtggacctgtgcacctaccccaagtactgcaccgtggtggcctaccccacagacctgtacaccatccgcatgaggctggtgaaccgcttctaccgccgcctgagcgccctggtgtgggaggtgcgctacatcgagcacaatgcccggaccttcaatgaacctgagagcgtcatcgcccggagcgccaagaagatcacagaccagctgctgaagttcatcaagaaccagcactgcaccaacatcagcgagctgagcaacaccagtgaaaatgatgagcagaatgctgaggacctggatgacagcgacctgcccaagaccagcagcggcagaagaagagactacagagacatcatcgacacccccatggactttggcaccgtgcgggagaccctggatgctggcaactatgacagccccctggagttctgcaaggacatccgcctcatcttcagcaatgccaaggcctacacccccaacaagaggagcaagatctacagcatgaccctgcggctgagcgccctgtttgaggagaagatgaagaagatcagcagtgacttcaagattggccagaagttcaatgagaagctgcggcgcagccagcgcttcaagcagaggcagaactgcaagggggacagccagcccaacaagagcatccggaacctgaagcccaagaggctgaagagccagaccaagatcatccctgagctggtgggcagccccacccagagcaccagcagcaggacagcctacctgggcacccacaagaccagcgctggcatcagcagcggcgtgaccagcggcctcttccgcttcagccgcatcatcaggaaggagtag

SEQ ID NO: 323014 - DNA, 4537 bp, Artificial Sequence
  derived and/or modified sequence
gcggcgcgcacggtatggcggcggcggcggcggcggcggcgcgcgcctgagaagaggggacgccagcccggtcaggcctcggcgcggcctacacgctccgctcgctcgctcgctcccgcctcccgccccgcgcccggccatggcggagccgtcgtccgcccgacgcccggtgcctctcatcgagtcggagctgtacttccttatcgcccggtacctatcggcgggcccgtgtcggagagcggcccaggtgctggtgcaggagctggagcagtaccagttgttgccgaagagattggactgggagggcaacgagcacaacaggagctacgaggagttggtcttgtccaataagcatgtggctcctgatcatcttttgcaaatctgccagcgcatcggtcctatgttggataaagaaattccacccagtatttcaagagtcacttctttacttggtgcaggaaggcagtctttgctacgtacagcaaaagactgcaggcacacagtttggaagggctctgcctttgctgctcttcatagaggaagacctcctgaaatgccagtgaattatggttccccaccaaatcttgtggagatacatcgaggaaaacaactcacagggtgttccacttttagtacagcatttccaggaactatgtatcagcatataaaaatgcacagaaggattctcggacatctatctgctgtttactgtgtagcatttgataggacaggacatagaatctttacaggttcagatgactgtttggtaaagatttggtcaacacataatggccgcttgttatctacattaagaggtcattctgcagaaatttcagatatggcagtaaactatgagaatacaatgattgctgcggggagctgtgataaaattattagagtgtggtgcttgagaacttgtgccccagttgctgtgctccaaggacacacaggatcaattacatctttacagtttagcccgatggccaaaggctctcaaagatacatggtttccactggtgctgatgggacagtttgcttttggcaatgggatttagaatccttaaaatttagcccacgtcccctgaagttcactgaaaagcctaggccaggcgttcaaatgctttgttcttcttttagtgttggtggtatgtttttagccacaggtagtactgatcatgtaatcagaatgtattttttgggttttgaagcacccgaaaaaatcgcagaacttgaaagccacactgataaagtagatagtatccaattttgtaacaatggtgatcggttcctaagtggtagcagagatggaacagcacggatttggagatttgagcagttagaatggaggagcattttattggatatggctaccagaatctcaggggacttatcttccgaagaggaaaggtttatgaaacctaaagtaacaatgatagcttggaatcaaaatgatagcattgttgtcacagctgtgaatgatcatgtcctcaaagtgtggaattcttacactggacaactgcttcataacttaatgggacatgctgatgaagtatttgttctggagacacatccctttgattccagaattatgttatctgcaggacatgatggcagcatatttatatgggatattacaaaaggtaccaagatgaaacattattttaatatgattgaaggacaaggacatggagctgtgtttgactgtaagttttcacaggatggacagcattttgcctgtacagattctcatgggcaccttctgatatttggttttggatgcagcaaaccatatgaaaagattcctgatcagatgttcttccatactgactatcgaccacttattagagattctaataattatgtcttagatgagcaaactcagcaggctcctcatcttatgcctccaccattcttggtagatgtagatggaaatcctcatccaaccaagtatcagagattagtaccaggccgagaaaattctgcagatgaacatttgattccacagctgggctatgtggcaacaagtgatggagaggtgattgaacaaattataagcctgcaaaccaatgataatgatgaacgcagcccagaatcgagtattcttgatggaatgataagacagttgcagcagcagcaagatcagagaatgggagcagatcaggatactattccaagaggactttcaaatggtgaagaaacaccccggagaggttttagaaggctgagcttagacattcagtcccctccaaatattggtctgcgtcgtagtggacaagttgaaggtgttcgtcagatgcatcaaaacgctccacgcagtcagattgctacagaacgtgacctgcaggcttggaaacgaagagtggttgtaccagaggtaccactaggcatatttaggaagctggaagacttccgattagagaaaggtgaagaggaaagaaatctttatataataggaagaaaaagaaagactcttcagctctcacataagtcggattcagtggttttggtatcacagtctagacaaaggacatgtaggcgtaaatatccaaattatggtagaagaaatcgtagctggcgtgagttatcttctggaaatgagtcttcaagctctgtaagacatgagacttcctgtgatcagagtgaaggttctggttcttcagaagaggatgaatggagaagtgacagaaaaagtgagagttacagcgaaagttcaagtgactcttcatctagatattccgattggacagctgatgcgggcatcaatttgcagcctcctttaagaacatcatgtcgtcgacgaattactcgattttgtagtagttcagaagatgaaatatctactgagaatttatctcctccaaaaagaagacgaaagagaaagaaagaaaataagcctaagaaggagaatttgcggaggatgactccagcagagcttgcaaatatggagcatttatatgaatttcaccctccagtttggattactgacaccacacttagaaaatctccttttgttcctcaaatgggtgatgaggtaatatattttcgacagggtcatgaagcttatattgaggctgtaagaagaaataatatttatgaactgaaccctaataaggagccatggagaaaaatggatcttagggatcaagaattggttaaaatagttggaatacgatatgaagttgggccccctacactctgttgcctaaaactagcatttatagatccagcaactggaaaacttatggacaaatctttctctattagatatcatgatatgccagatgttattgactttcttgtattgcgtcaattttatgatgaagcaagacagaggaattggcagtcttgtgacagattccgctctattattgatgatgcttggtggtttggaacagtgttaagtcaagagccatatcaaccacagtatcctgatagtcatttccagtgttatattgttaggtgggataatactgaaattgaaaaacttagcccatgggacatggaaccaattcctgataatgttgatccacctgaagaattaggagctagtatttctgtcacaacagatgagctagagaaattgctctataaaccacaagctggtgaatggggtcagaaatcaagagatgaagaatgtgatagaattatcagtggtatagatcaacttttgaatcttgatatagcagcagcttttgcaggccctgttgatttgtgtacatacccgaagtactgtactgtagtagcttatccaaccgatctttacacaattcgaatgagacttgttaatcgattttacaggaggctgtctgcgttagtttgggaagtcagatatatagaacataatgccagaacatttaacgaacctgagagtgtaattgcaagatcagctaaaaagataactgaccaacttttaaaatttatcaagaatcaacactgtacaaatatctcagaactttctaacacatctgaaaatgatgagcaaaatgctgaggatttggatgatagtgatcttcctaaaacatcttctggaaggaggagagactacagagatattatagataccccaatggattttggaacagtaagggaaactctagatgcgggaaattatgacagccctttggagttttgcaaagacatccggctgatatttagcaatgcaaaagcgtatacaccaaacaaaagatcaaagatttatagtatgaccttgagattatctgccttatttgaagaaaaaatgaagaaaatctcttctgattttaaaattggtcaaaaattcaatgaaaaacttcgaagaagccagaggttcaagcaacggcaaaattgtaaaggtgacagtcagcctaacaaaagtatcagaaacctcaagccgaagaggttaaaatctcagacaaaaataattcctgagttggtaggttctcctacccagtctacctcaagtaggacagcttatcttggaacccacaagacaagtgctggtatctcttcaggtgttacttctggtctcttcagattcagcagaatcatcagaaaggag

SEQ ID NO: 323015 - DNA, 1413 bp, Artificial Sequence
  derived and/or modified sequence
atggacctgcgggaccaggagctggtgaagatcgtgggcatccggtacgaggtggggccacccactttatgctgcctcaaattggcattcatcgaccccgcgaccgggaagctcatggacaagagtttcagtattagatatcacgacatgcctgacgtcatagacttcctagtgttgcggcaattttatgatgaagctcgccagaggaactggcagtcttgtgatcggtttcggagcattatcgatgacgcctggtggtttggtaccgtgctctcacaagaaccctaccaacctcagtaccctgatagccacttccaatgctacattgtccggtgggacaatacggagatagagaagctttcgccttgggacatggagccgatacccgataatgtggatccgccggaagagctgggagcctcaatcagtgtcacaaccgacgagttagagaaattgctgtataagccgcaggccggggaatgggggcagaagtcgagagatgaggaatgtgatcggatcatcagtggtattgatcagctcctcaatcttgatatagcagccgcatttgcagggcccgtggacctgtgcacttacccaaagtattgtacggtcgtcgcatatcccacagatttgtatacaatcaggatgcgacttgtcaatagattttacaggaggctaagtgcactggtatgggaagttcggtacattgagcataacgcccggacattcaatgaacctgaatccgtgattgcccggtccgccaagaaaattacagatcagttattaaaatttatcaaaaatcaacactgtacaaatatctctgagctctccaacacctcagagaatgatgagcagaacgccgaggacctcgatgacagcgacctgccgaaaacgtcgagcggtcgacgtagggattatcgtgatataatcgatacacctatggactttggcaccgttcgggagacacttgatgctggcaactatgacagccccctggagttctgtaaggacatccgactcatattctccaacgccaaagcatacacccctaataaacgctcaaaaatctactccatgacgctgcggctatctgctctgttcgaggaaaagatgaaaaaaatcagctcagacttcaagattgggcagaaatttaacgaaaagctccggagatcccagcgattcaagcaaaggcagaactgcaaaggcgattcacagcctaacaagtccattagaaaccttaaacccaaaagactgaagtctcaaaccaagatcatacctgaattagtcggaagccctacccagtccacctctagccgtaccgcatatctggggacacacaaaacttcggctggcatttcctctggagtgacctccggtttatttagattctcccgaattattaggaaggaatag

SEQ ID NO: 323016 - DNA, 1413 bp, Artificial Sequence
  derived and/or modified sequence
atggacctgagggaccaggagttagtcaagattgtcggcattcgatacgaggttggacccccaacgctgtgctgtctgaaactcgcattcatcgacccggctactggcaagctaatggataagagtttctccattcggtaccacgatatgccagatgtgatcgatttcctcgtcttgcggcaattctatgacgaggcaaggcagcggaactggcagagttgcgatcgatttcgctccattatagacgacgcttggtggttcggcaccgtgttgagccaggagccgtatcagccacagtaccctgactcccatttccaatgctacatcgtgcgctgggataatactgagatcgaaaaactgtcgccctgggacatggagcctatcccagacaatgttgatccacctgaggaactgggcgcatccatttcagtcacaacagatgagttagagaagctcctctacaagccccaggctggggagtggggccagaagtcccgagatgaggagtgtgaccgtatcatcagtggaatcgaccagttgcttaacctcgatattgctgccgcatttgctggccctgttgacctctgcacttatcctaagtattgtaccgtcgtcgcgtatccaactgacttatataccatcagaatgagactggtgaatcgattctacagaagactaagcgccttagtgtgggaggtgcgttatatcgagcacaacgctcgtacttttaatgaacccgagagtgtcattgctcgctcagccaaaaaaatcaccgaccagctgctgaaatttatcaagaaccaacactgcacgaacatcagcgagctcagtaacaccagcgaaaacgatgaacagaatgccgaggaccttgatgactcagacttgccgaagacttcgagcggcagacgcagagactacagggatattattgacacacccatggactttggtacagtgcgggagacgctggacgcaggcaactatgattctccactcgagttttgtaaagacatccgacttatattttcaaacgccaaggcatatacccctaacaaaagatctaagatttacagcatgacattgcgcctgagtgcgttgtttgaggagaaaatgaagaaaatcagttcggatttcaagattggacagaaattcaatgagaaactgagacgatctcagaggtttaagcagaggcagaattgcaagggggattcccagccaaacaaaagcatcagaaacctaaaaccaaagcgacttaaatcacaaactaagataattccagagttggtcggcagcccaacccagagtaccagcagcaggaccgcatacctggggacacacaagacctctgctgggatctcgagcggggtgacctctggcctgttccggtttagcagaatcattcgaaaggaatag

SEQ ID NO: 323017 - DNA, 479 bp, Artificial Sequence
  derived and/or modified sequence
aggactgggtttggagagctgctggatagctgaacacgtggaggttcctggaaggcggcacacccagagagagcatggtagctccatgctgcttcccccatacctcaccctacacatctcttcatctgtatcctttataataatccactaaatgatctccaacctgagcatatgccagttgacatgggaacactgaggccagcaatttaaggatttcacatttgcttgcagtgaatgcgtaatcctggatctcttgttcgcaaatcgacagcctgaagccctctggaagcccaagactgctggaggtttttgaccagacaagccaacctttttcaaggaacttccaatcctgctttagaacttactccttcaggaaagcaactctcactgaagtgtgggagcggagcagagaaaagactaggtagctcagtggcatttctgagcaggggccaccctgacttcaccttggcccaccatga

SEQ ID NO: 323018 - DNA, 81 bp, Artificial Sequence
  derived and/or modified sequence
ggaatctataatacagctgtttatagccaagcactaaatcatatgatacagaaaacaaatgcagatggtttgaagggtggg

SEQ ID NO: 323019 - DNA, 82 bp, Artificial Sequence
  derived and/or modified sequence
aggaatctataatacagctgtttatagccaagcactaaatcatatgatacagaaaacaaatgcagatggtttgaagggtggg

SEQ ID NO: 323020 - DNA, 117 bp, Artificial Sequence
  derived and/or modified sequence
atgggcctgctggccttcctgaagacccagttcgtgctgcacctgctggtgggcttcgtgttcgtggtgagcggcctggtgatcaacttcgtgcagctgtgcaccctggccctgtag

SEQ ID NO: 323021 - DNA, 117 bp, Artificial Sequence
  derived and/or modified sequence
atgggcctgctggccttcctgaagacccagtttgtgctgcacctgctggtgggctttgtgtttgtggtgtctggcctggtgatcaactttgtgcagctgtgcaccctggccctgtag

SEQ ID NO: 323022 - DNA, 117 bp, Artificial Sequence
  derived and/or modified sequence
atgggcctgctggccttcctgaagacccagttcgtgctgcacctgcttgtaggctttgtgtttgtagtctctggacttgtgataaactttgttcaactctgcacacttgccctttag

SEQ ID NO: 323023 - protein, 128 aa, Artificial Sequence
  derived and/or modified sequence
MGLLAFLKTQFVLHLLVGFVFVVSGLVINFVQLCTLALWPVSKQLYRRLNCRLAYSLWSQLVMLLEWWSCTECTLFTDQATVERFGKEHAVIILNHNFEIDFLCGWTMCERFGVLGSSKVLAKKELLY

SEQ ID NO: 323024 - protein, 79 aa, Artificial Sequence
  derived and/or modified sequence
MGLLAFLKTQFVLHLLVGFVFVVSGLVINFVQLCTLALWPVSKQLYRRLNCRLAYSLWSQLVMLLEWWSCTECTLFTDQ

SEQ ID NO: 323025 - protein, 38 aa, Artificial Sequence
  derived and/or modified sequence
MGLLAFLKTQFVLHLLVGFVFVVSGLVINFVQLCTLAL

SEQ ID NO: 323026 - DNA, 5546 bp, Artificial Sequence
  derived and/or modified sequence
gggcggcgggatgggggccgggggcggcgggcgccgcactcgctgaggccccgacgcagggccgggccgggcccagggccgaggagcgcggcggccagagcggggccgcggaggcgacgccggggacgcccgcgcgacgagcaggtggcggcggctgcaggcttgtccagccggaagccctgagggcagctgttcccactggctctgctgaccttgtgccttggacggctgtcctcagcgaggggccgtgcacccgctcctgagcagcgccatgggcctgctggccttcctgaagacccagttcgtgctgcacctgctggtcggctttgtcttcgtggtgagtggtctggtcatcaacttcgtccagctgtgcacgctggcgctctggccggtcagcaagcagctctaccgccgcctcaactgccgcctcgcctactcactctggagccaactggtcatgctgctggagtggtggtcctgcacggagtgtacactgttcacggaccaggccacggtagagcgctttgggaaggagcacgcagtcatcatcctcaaccacaacttcgagatcgacttcctctgtgggtggaccatgtgtgagcgcttcggagtgctggggagctccaaggtcctcgctaagaaggagctgctctacgtgcccctcatcggctggacgtggtactttctggagattgtgttctgcaagcggaagtgggaggaggaccgggacaccgtggtcgaagggctgaggcgcctgtcggactaccccgagtacatgtggtttctcctgtactgcgaggggacgcgcttcacggagaccaagcaccgcgttagcatggaggtggcggctgctaaggggcttcctgtcctcaagtaccacctgctgccgcggaccaagggcttcaccaccgcagtcaagtgcctccgggggacagtcgcagctgtctatgatgtaaccctgaacttcagaggaaacaagaacccgtccctgctggggatcctctacgggaagaagtacgaggcggacatgtgcgtgaggagatttcctctggaagacatcccgctggatgaaaaggaagcagctcagtggcttcataaactgtaccaggagaaggacgcgctccaggagatatataatcagaagggcatgtttccaggggagcagtttaagcctgcccggaggccgtggaccctcctgaacttcctgtcctgggccaccattctcctgtctcccctcttcagttttgtcttgggcgtctttgccagcggatcacctctcctgatcctgactttcttggggtttgtgggagcagcttcctttggagttcgcagactgataggagtaactgagatagaaaaaggctccagctacggaaaccaagagtttaagaaaaaggaataattaatggctgtgactgaacacacgcggccctgacggtggtatccagttaactcaaaaccaacacacagagtgcaggaaaagacaattagaaactatttttcttattaactggtgactaatattaacaaaacttgagccaagagtaaagaattcagaaggcctgtcaggtgaagtcttcagcctcccacagcgcagggtcccagcatctccacgcgcgcccgtgggaggtgggtccggccggagaggcctcccgcggacgccgtctctccagaactccgcttccaagagggagcctttggctgctttctctccttaaacttagatcaaattttttggtttttaatcagttatcttgggaacttaacctggcccctcacctcttctgcaccccccgcccccgaaactgtctcgtaatgaatttctgctgtcctcctgggagtggacggccgggtcccgtcccccgggagcatcgctcggctcagcaccttggctcccagtgggggccccgtggagggcgcccgtagtgataagcacaccggcacgaacgtcaggtccattcctcgaagtcggagccctcactctgccctgtcctggggctggctgagggcgaacgccccacctcactttctagagccctgtctgtcctagctcctatctgaccttgtgtgtaaatacgtacatctgtttttaaagtggatgggcccctgagaactcagtgaaatgcagagttctccatgcacctaaagctcctttgtcgctctcatggctgtcagatcctggtccctccacactgggtgctggggagggaggaccctcggggctaccgcgcgcccccccatcccacagatcaggagccaaggagggagaacagggcagcctgtgggactctaggatgcttcagaagaagcgacggcaccgtcaaccctctgttttttaaaggtggttggagactgttaacactgagctcattgacttctagagattttatttttactggttgatctcttggtggttttcaacttcctgctggaaactagaggtggggcaccccccaccccccagcctcgcactgtgtccttggggaaggcccgcccccatcctggccggtgtcactgtggcccggccacccctgagcgcccagctccctacctcctggacgtctctgagagtccaggcagagcagagggcagcgctcggccggtcatgctggctcccttggccttgcagcgagcccctggcccacgccgagcgagggatgcttctccctacagcatgtccactcccccggcatggccaggtggggcccctggggcaatggcagtggtagaacgctcaacttggttgcggtaccatcagcccacctgcatttggctttcgacttgcttgttctaagtcacagcgccctcatctttttagcaaggtaaaaaaaccaaaatgggtgttatctctgatatcttgaaaccagcgttctgaatagaggtaggttgagttttctaggggaaaacaaatggagaaaagaggcatgaagaaaagtaaaccgagaacataattaggcatcgggcctaagtgtcctggggagattggaggggacggcagcgttctgcatgatggaggcgctgccgggccccgggtctgtgggggccgtgctctcagggcgtgtgcgggacgccacctgtgcacacctgctcagagcacggctcctcgcaggggtgaaggggcagaccaacgaaaccagatgagaccaacgacaccatgcgagacacgcttgcagacactgttgttttggaaatgtgcttccctccatctgaaatctcatccctccacccgcccactcgggcagctgtgccgtgggcagggcatgcgctcccctggctgagcaccccagagattctcctgcaccttcctcatgccgcacgctgctcatccgtctccatgtgtgtttagatccatgccattcactgactcactaacacctgcaaaatctttaaggaaaaaagctgaagggtacgaccatgcacatatgtgacctggaaaatgcaaatttagatcttttatgatttaattattattgtttcccatagaagttccctccctttgaaattaatatataatgtataaattctgcactgagccatggcggagctgggcagcccctaggttagagtggagacggaggcccaggcgcaggggtcacacctcatctggtttccttcccatctcacagcttagcttgtgcttctcaacaccaagtctttaagagcaataaaaactacaccatgaatgtttgaattttttttttttgggggggggagggtggattttgcttttcatccagaaggaaaaggggaggagagctcctttacattttttaaattaaattcataaatcccagaacagtcttttttttttctttttcctttacaccctacttctgagcttaattcagttgatgttatgtccaaattcaggctgagtgctcaggctgaagcaactctgtagcccacagtccgtgctggccactgtcggggtgaggcacattctaggcctggcatcgctgatgccctctgcacccagtccttgagccaggccgaggacaggaagggcattgctggcctgtagctcctgttacccacccagagccaggcgccacactggaggctcccaggcgggagggcccaggcccacccacgggcgtctggccggtcaagctcccagcctgggccgtggtctcctggggacgccgctggcctcccagcttaggcccaggtgccaggtgtcatggggtctcctgcccatcttcccaaggatgccattgctgtcttcatcgtcttcccccgtgtgagacactggttgtctggtactcggcgacagtgtaccagacgcgcaccctatgtgaggtgctttaaggtccctgtcctcaggaagcgcagtctggtggaagagatgagcgctgaacaaatcactaaataacacaaaacaacaatgtaagcagcactttcttgtgtaaaaaaaaaaaaaaagcacgtcctgtcgatgaattttgagtctctctgccttgcctgtcccgactccctttcgcgcaccgtggcatgagaatctttcctcacgctgttcgttgcggtattgctgagcattgatgttgatttgaaggaaaagccgtggttggacccagctgtgtgtttcactcacgtgcaattgagtagctgttgccaggctgtccatgcctgttgtgactaccggttggggtcagatttggggtgaagaatgagtaagtttctgcatgctttgtctctacctgagacacttctacaacaagccaagtataatctctccagccctgcagattttcacctgacttgttcagccccatgcgtagactcccgctgcaggcctctggcctgtggctcactgcatgcagcccctggcgtgcaatactagtgctccacggcgcgatgtgcttctagcccttgcactgcacctaggctcagggttcaaacggccagcccgaaaagcctgcctgccttctttctggaaacagcacgtccccggccgtgtgcctgcccctttctctactgagctagtccccaaaccaaaggcaagccccctcgggcctcgggggatggggccggccacacccctgactccgccctggctctgccccatacccctgccgtggggccgacctgggggatgcagacatccggctccgtattcctgcctatcggggccaggatgcaaaaacaatttttgcgtaaaagatgtcacactgatctgctggagtggggtggacacatgaattcagttttatcatgaacactcgccactggctgcttgttaattcagggataatggtggcattcttacaaactgctcgggaaatagaatgacgggaacacttttagggagcccaggaagttaccagggacattggtgtcgccggcccaggcaacagcagcgtacgcttttcaaagatcattgagttgtcttagaatttgaagctgtgtaatgacaatgtcacctggagttcgtctccatttcttaactttttgttgcacaagtatttggacagaagtcgaactgtgaatgagatactgaaatgcactaaattgtattacattaaactggagttacttgatacaatgaa

SEQ ID NO: 323027 - DNA, 3589 bp, Artificial Sequence
  derived and/or modified sequence
atttggtcacacggcgtctctccagtcctgcgcaagcacgttgacatgtgtgcctttcactttcaggcttgtccagccggaagccctgagggcagctgttcccactggctctgctgaccttgtgccttggacggctgtcctcagcgaggggccgtgcacccgctcctgagcagcgccatgggcctgctggccttcctgaagacccagttcgtgctgcacctgctggtcggctttgtcttcgtggtgagtggtctggtcatcaacttcgtccagctgtgcacgctggcgctctggccggtcagcaagcagctctaccgccgcctcaactgccgcctcgcctactcactctggagccaactggtcatgctgctggagtggtggtcctgcacggagtgtacactgttcacggaccaggccacggtagagcgctttgggaaggagcacgcagtcatcatcctcaaccacaacttcgagatcgacttcctctgtgggtggaccatgtgtgagcgcttcggagtgctggggagctccaaggtcctcgctaagaaggagctgctctacgtgcccctcatcggctggacgtggtactttctggagattgtgttctgcaagcggaagtgggaggaggaccgggacaccgtggtcgaagggctgaggcgcctgtcggactaccccgagtacatgtggtttctcctgtactgcgaggggacgcgcttcacggagaccaagcaccgcgttagcatggaggtggcggctgctaaggggcttcctgtcctcaagtaccacctgctgccgcggaccaagggcttcaccaccgcagtcaagtgcctccgggggacagtcgcagctgtctatgatgtaaccctgaacttcagaggaaacaagaacccgtccctgctggggatcctctacgggaagaagtacgaggcggacatgtgcgtgaggagatttcctctggaagacatcccgctggatgaaaaggaagcagctcagtggcttcataaactgtaccaggagaaggacgcgctccaggagatatataatcagaagggcatgtttccaggggagcagtttaagcctgcccggaggccgtggaccctcctgaacttcctgtcctgggccaccattctcctgtctcccctcttcagttttgtcttgggcgtctttgccagcggatcacctctcctgatcctgactttcttggggtttgtgggagcagcttcctttggagttcgcagactgataggagtaactgagatagaaaaaggctccagctacggaaaccaagagtttaagaaaaaggaataattaatggctgtgactgaacacacgcggccctgacggtggtatccagttaactcaaaaccaacacacagagtgcaggaaaagacaattagaaactatttttcttattaactggtgactaatattaacaaaacttgagccaagagtaaagaattcagaaggcctgtcaggtgaagtcttcagcctcccacagcgcagggtcccagcatctccacgcgcgcccgtgggaggtgggtccggccggagaggcctcccgcggacgccgtctctccagaactccgcttccaagagggagcctttggctgctttctctccttaaacttagatcaaattttttggtttttaatcagttatcttgggaacttaacctggcccctcacctcttctgcaccccccgcccccgaaactgtctcgtaatgaatttctgctgtcctcctgggagtggacggccgggtcccgtcccccgggagcatcgctcggctcagcaccttggctcccagtgggggccccgtggagggcgcccgtagtgataagcacaccggcacgaacgtcaggtccattcctcgaagtcggagccctcactctgccctgtcctggggctggctgagggcgaacgccccacctcactttctagagccctgtctgtcctagctcctatctgaccttgtgtgtaaatacgtacatctgtttttaaagtggatgggcccctgagaactcagtgaaatgcagagttctccatgcacctaaagctcctttgtcgctctcatggctgtcagatcctggtccctccacactgggtgctggggagggaggaccctcggggctaccgcgcgcccccccatcccacagatcaggagccaaggagggagaacagggcagcctgtgggactctaggatgcttcagaagaagcgacggcaccgtcaaccctctgttttttaaaggtggttggagactgttaacactgagctcattgacttctagagattttatttttactggttgatctcttggtggttttcaacttcctgctggaaactagaggtggggcaccccccaccccccagcctcgcactgtgtccttggggaaggcccgcccccatcctggccggtgtcactgtggcccggccacccctgagcgcccagctccctacctcctggacgtctctgagagtccaggcagagcagagggcagcgctcggccggtcatgctggctcccttggccttgcagcgagcccctggcccacgccgagcgagggatgcttctccctacagcatgtccactcccccggcatggccaggtggggcccctggggcaatggcagtggtagaacgctcaacttggttgcggtaccatcagcccacctgcatttggctttcgacttgcttgttctaagtcacagcgccctcatctttttagcaaggtaaaaaaaccaaaatgggtgttatctctgatatcttgaaaccagcgttctgaatagaggtaggttgagttttctaggggaaaacaaatggagaaaagaggcatgaagaaaagtaaaccgagaacataattaggcatcgggcctaagtgtcctggggagattggaggggacggcagcgttctgcatgatggaggcgctgccgggccccgggtctgtgggggccgtgctctcagggcgtgtgcgggacgccacctgtgcacacctgctcagagcacggctcctcgcaggggtgaaggggcagaccaacgaaaccagatgagaccaacgacaccatgcgagacacgcttgcagacactgttgttttggaaatgtgcttccctccatctgaaatctcatccctccacccgcccactcgggcagctgtgccgtgggcagggcatgcgctcccctggctgagcaccccagagattctcctgcaccttcctcatgccgcacgctgctcatccgtctccatgtgtgtttagatccatgccattcactgactcactaacacctgcaaaatctttaaggaaaaaagctgaagggtacgaccatgcacatatgtgacctggaaaatgcaaatttagatcttttatgatttaattattattgtttcccatagaagttccctccctttgaaattaatatataatgtataaattctgcactgagccatggcggagctgggcagcccctaggttagagtggagacggaggcccaggcgcaggggtcacacctcatctggtttccttcccatctcacagcttagcttgtgcttctcaacaccaagtctttaagagcaataaaaactacaccatgaa

SEQ ID NO: 323028 - DNA, 4338 bp, Artificial Sequence
  derived and/or modified sequence
attgtgcagtcatcaggccctgggagctttccacatccctccacctcccacccaacatcaccactctccggccagtgagaccatcacagcaccccagaggagacaaattctggagctcagagagctgggtggctcctgcaccttcagacactgcctcctcaccgagggagggaagaacgacaaaggacctccaggacgtagaggttgatgatccgggcaggtggccttcagcgagggagcacgtcaaaaggctgtgggccgtgcagacagctgggggacaccgtcccgggtgtgaccttgggccacacggcagggtggtggacttgctcctagaattgggctccagggctgaagccagcccctctgatctggcactggccggctccattcaccctttttggggcttactgccgcagagacttcctttgaggagagctggacccaagacgccagagttccgggggcactgagtgctgtgtggcacccgggccaggagaaacatgtgccagagggcaggcgtgggctctccggggagtctctgcgtagactttctagcccagaggttcaggtgatggaccagagactggccgctttgtgacaccgaggacggttgataaagtggattctcgaggggaagctgcatccacacagaggctgggacgtgaatgtgcatcacggctctatctgtggcccccaaaggctgggtgccagctgcctgtcggcagggagcgtatcaccgtggcacgtccatgccgtgggggtcactcagcagccacggatgcgccctgggtgctgtcccggggccgtctcagaagcaccgcgctggaccggctgggccagatgccatgggattctgtgtttgtgaacctctagaaaaggacggctgtcctcagcgaggggccgtgcacccgctcctgagcagcgccatgggcctgctggccttcctgaagacccagttcgtgctgcacctgctggtcggctttgtcttcgtggtgagtggtctggtcatcaacttcgtccagctgtgcacgctggcgctctggccggtcagcaagcagctctaccgccgcctcaactgccgcctcgcctactcactctggagccaactggtcatgctgctggagtggtggtcctgcacggagtgtacactgttcacggaccaggccacggtagagcgctttgggaaggagcacgcagtcatcatcctcaaccacaacttcgagatcgacttcctctgtgggtggaccatgtgtgagcgcttcggagtgctggggagctccaaggtcctcgctaagaaggagctgctctacgtgcccctcatcggctggacgtggtactttctggagattgtgttctgcaagcggaagtgggaggaggaccgggacaccgtggtcgaagggctgaggcgcctgtcggactaccccgagtacatgtggtttctcctgtactgcgaggggacgcgcttcacggagaccaagcaccgcgttagcatggaggtggcggctgctaaggggcttcctgtcctcaagtaccacctgctgccgcggaccaagggcttcaccaccgcagtcaagtgcctccgggggacagtcgcagctgtctatgatgtaaccctgaacttcagaggaaacaagaacccgtccctgctggggatcctctacgggaagaagtacgaggcggacatgtgcgtgaggagatttcctctggaagacatcccgctggatgaaaaggaagcagctcagtggcttcataaactgtaccaggagaaggacgcgctccaggagatatataatcagaagggcatgtttccaggggagcagtttaagcctgcccggaggccgtggaccctcctgaacttcctgtcctgggccaccattctcctgtctcccctcttcagttttgtcttgggcgtctttgccagcggatcacctctcctgatcctgactttcttggggtttgtgggagcagcttcctttggagttcgcagactgataggagtaactgagatagaaaaaggctccagctacggaaaccaagagtttaagaaaaaggaataattaatggctgtgactgaacacacgcggccctgacggtggtatccagttaactcaaaaccaacacacagagtgcaggaaaagacaattagaaactatttttcttattaactggtgactaatattaacaaaacttgagccaagagtaaagaattcagaaggcctgtcaggtgaagtcttcagcctcccacagcgcagggtcccagcatctccacgcgcgcccgtgggaggtgggtccggccggagaggcctcccgcggacgccgtctctccagaactccgcttccaagagggagcctttggctgctttctctccttaaacttagatcaaattttttggtttttaatcagttatcttgggaacttaacctggcccctcacctcttctgcaccccccgcccccgaaactgtctcgtaatgaatttctgctgtcctcctgggagtggacggccgggtcccgtcccccgggagcatcgctcggctcagcaccttggctcccagtgggggccccgtggagggcgcccgtagtgataagcacaccggcacgaacgtcaggtccattcctcgaagtcggagccctcactctgccctgtcctggggctggctgagggcgaacgccccacctcactttctagagccctgtctgtcctagctcctatctgaccttgtgtgtaaatacgtacatctgtttttaaagtggatgggcccctgagaactcagtgaaatgcagagttctccatgcacctaaagctcctttgtcgctctcatggctgtcagatcctggtccctccacactgggtgctggggagggaggaccctcggggctaccgcgcgcccccccatcccacagatcaggagccaaggagggagaacagggcagcctgtgggactctaggatgcttcagaagaagcgacggcaccgtcaaccctctgttttttaaaggtggttggagactgttaacactgagctcattgacttctagagattttatttttactggttgatctcttggtggttttcaacttcctgctggaaactagaggtggggcaccccccaccccccagcctcgcactgtgtccttggggaaggcccgcccccatcctggccggtgtcactgtggcccggccacccctgagcgcccagctccctacctcctggacgtctctgagagtccaggcagagcagagggcagcgctcggccggtcatgctggctcccttggccttgcagcgagcccctggcccacgccgagcgagggatgcttctccctacagcatgtccactcccccggcatggccaggtggggcccctggggcaatggcagtggtagaacgctcaacttggttgcggtaccatcagcccacctgcatttggctttcgacttgcttgttctaagtcacagcgccctcatctttttagcaaggtaaaaaaaccaaaatgggtgttatctctgatatcttgaaaccagcgttctgaatagaggtaggttgagttttctaggggaaaacaaatggagaaaagaggcatgaagaaaagtaaaccgagaacataattaggcatcgggcctaagtgtcctggggagattggaggggacggcagcgttctgcatgatggaggcgctgccgggccccgggtctgtgggggccgtgctctcagggcgtgtgcgggacgccacctgtgcacacctgctcagagcacggctcctcgcaggggtgaaggggcagaccaacgaaaccagatgagaccaacgacaccatgcgagacacgcttgcagacactgttgttttggaaatgtgcttccctccatctgaaatctcatccctccacccgcccactcgggcagctgtgccgtgggcagggcatgcgctcccctggctgagcaccccagagattctcctgcaccttcctcatgccgcacgctgctcatccgtctccatgtgtgtttagatccatgccattcactgactcactaacacctgcaaaatctttaaggaaaaaagctgaagggtacgaccatgcacatatgtgacctggaaaatgcaaatttagatcttttatgatttaattattattgtttcccatagaagttccctccctttgaaattaatatataatgtataaattctgcactgagccatggcggagctgggcagcccctaggttagagtggagacggaggcccaggcgcaggggtcacacctcatctggtttccttcccatctcacagcttagcttgtgcttctcaacaccaagtctttaagagcaataaaaactacaccatgaa

SEQ ID NO: 323029 - DNA, 3595 bp, Artificial Sequence
  derived and/or modified sequence
tctatgaaaccaacatacatggcgtttgcatcacagttggagtcagatgtgagcccggagggcaggtgtctggcttgtccagccggaagccctgagggcagctgttcccactggctctgctgaccttgtgccttggacggctgtcctcagcgaggggccgtgcacccgctcctgagcagcgccatgggcctgctggccttcctgaagacccagttcgtgctgcacctgctggtcggctttgtcttcgtggtgagtggtctggtcatcaacttcgtccagctgtgcacgctggcgctctggccggtcagcaagcagctctaccgccgcctcaactgccgcctcgcctactcactctggagccaactggtcatgctgctggagtggtggtcctgcacggagtgtacactgttcacggaccaggccacggtagagcgctttgggaaggagcacgcagtcatcatcctcaaccacaacttcgagatcgacttcctctgtgggtggaccatgtgtgagcgcttcggagtgctggggagctccaaggtcctcgctaagaaggagctgctctacgtgcccctcatcggctggacgtggtactttctggagattgtgttctgcaagcggaagtgggaggaggaccgggacaccgtggtcgaagggctgaggcgcctgtcggactaccccgagtacatgtggtttctcctgtactgcgaggggacgcgcttcacggagaccaagcaccgcgttagcatggaggtggcggctgctaaggggcttcctgtcctcaagtaccacctgctgccgcggaccaagggcttcaccaccgcagtcaagtgcctccgggggacagtcgcagctgtctatgatgtaaccctgaacttcagaggaaacaagaacccgtccctgctggggatcctctacgggaagaagtacgaggcggacatgtgcgtgaggagatttcctctggaagacatcccgctggatgaaaaggaagcagctcagtggcttcataaactgtaccaggagaaggacgcgctccaggagatatataatcagaagggcatgtttccaggggagcagtttaagcctgcccggaggccgtggaccctcctgaacttcctgtcctgggccaccattctcctgtctcccctcttcagttttgtcttgggcgtctttgccagcggatcacctctcctgatcctgactttcttggggtttgtgggagcagcttcctttggagttcgcagactgataggagtaactgagatagaaaaaggctccagctacggaaaccaagagtttaagaaaaaggaataattaatggctgtgactgaacacacgcggccctgacggtggtatccagttaactcaaaaccaacacacagagtgcaggaaaagacaattagaaactatttttcttattaactggtgactaatattaacaaaacttgagccaagagtaaagaattcagaaggcctgtcaggtgaagtcttcagcctcccacagcgcagggtcccagcatctccacgcgcgcccgtgggaggtgggtccggccggagaggcctcccgcggacgccgtctctccagaactccgcttccaagagggagcctttggctgctttctctccttaaacttagatcaaattttttggtttttaatcagttatcttgggaacttaacctggcccctcacctcttctgcaccccccgcccccgaaactgtctcgtaatgaatttctgctgtcctcctgggagtggacggccgggtcccgtcccccgggagcatcgctcggctcagcaccttggctcccagtgggggccccgtggagggcgcccgtagtgataagcacaccggcacgaacgtcaggtccattcctcgaagtcggagccctcactctgccctgtcctggggctggctgagggcgaacgccccacctcactttctagagccctgtctgtcctagctcctatctgaccttgtgtgtaaatacgtacatctgtttttaaagtggatgggcccctgagaactcagtgaaatgcagagttctccatgcacctaaagctcctttgtcgctctcatggctgtcagatcctggtccctccacactgggtgctggggagggaggaccctcggggctaccgcgcgcccccccatcccacagatcaggagccaaggagggagaacagggcagcctgtgggactctaggatgcttcagaagaagcgacggcaccgtcaaccctctgttttttaaaggtggttggagactgttaacactgagctcattgacttctagagattttatttttactggttgatctcttggtggttttcaacttcctgctggaaactagaggtggggcaccccccaccccccagcctcgcactgtgtccttggggaaggcccgcccccatcctggccggtgtcactgtggcccggccacccctgagcgcccagctccctacctcctggacgtctctgagagtccaggcagagcagagggcagcgctcggccggtcatgctggctcccttggccttgcagcgagcccctggcccacgccgagcgagggatgcttctccctacagcatgtccactcccccggcatggccaggtggggcccctggggcaatggcagtggtagaacgctcaacttggttgcggtaccatcagcccacctgcatttggctttcgacttgcttgttctaagtcacagcgccctcatctttttagcaaggtaaaaaaaccaaaatgggtgttatctctgatatcttgaaaccagcgttctgaatagaggtaggttgagttttctaggggaaaacaaatggagaaaagaggcatgaagaaaagtaaaccgagaacataattaggcatcgggcctaagtgtcctggggagattggaggggacggcagcgttctgcatgatggaggcgctgccgggccccgggtctgtgggggccgtgctctcagggcgtgtgcgggacgccacctgtgcacacctgctcagagcacggctcctcgcaggggtgaaggggcagaccaacgaaaccagatgagaccaacgacaccatgcgagacacgcttgcagacactgttgttttggaaatgtgcttccctccatctgaaatctcatccctccacccgcccactcgggcagctgtgccgtgggcagggcatgcgctcccctggctgagcaccccagagattctcctgcaccttcctcatgccgcacgctgctcatccgtctccatgtgtgtttagatccatgccattcactgactcactaacacctgcaaaatctttaaggaaaaaagctgaagggtacgaccatgcacatatgtgacctggaaaatgcaaatttagatcttttatgatttaattattattgtttcccatagaagttccctccctttgaaattaatatataatgtataaattctgcactgagccatggcggagctgggcagcccctaggttagagtggagacggaggcccaggcgcaggggtcacacctcatctggtttccttcccatctcacagcttagcttgtgcttctcaacaccaagtctttaagagcaataaaaactacaccatgaa

SEQ ID NO: 323030 - DNA, 5767 bp, Artificial Sequence
  derived and/or modified sequence
cgccgacacatggtcgttcgacttctggcttggcctcttttgtgagtgtggggcctggtcatatcctcttggtcagtgtctctgtgatgatgagaacgggaagacggccacggtgcccaccctggcaggactctctcccctcgctggcgctggctcagctgccgtgagcggccgtaggcactgtcccgggccctcctgtggttgctcccagccatgctgctggctgcttctgccgtcctggcttgcagagactctgggtcatgcggggaagagggcagagtcctcctccctgctcaggcaagagaggatccagcaagatttcttcctccccaccctcctgcccctcccagtctgggcagcagataaaagccagggccccacacttctgccacctcctgctgctcacacactccagccagggacctgcccccggggtccaacaaggacggctgtcctcagcgaggggccgtgcacccgctcctgagcagcgccatgggcctgctggccttcctgaagacccagttcgtgctgcacctgctggtcggctttgtcttcgtggtgagtggtctggtcatcaacttcgtccagctgtgcacgctggcgctctggccggtcagcaagcagctctaccgccgcctcaactgccgcctcgcctactcactctggagccaactggtcatgctgctggagtggtggtcctgcacggagtgtacactgttcacggaccaggccacggtagagcgctttgggaaggagcacgcagtcatcatcctcaaccacaacttcgagatcgacttcctctgtgggtggaccatgtgtgagcgcttcggagtgctggggagctccaaggtcctcgctaagaaggagctgctctacgtgcccctcatcggctggacgtggtactttctggagattgtgttctgcaagcggaagtgggaggaggaccgggacaccgtggtcgaagggctgaggcgcctgtcggactaccccgagtacatgtggtttctcctgtactgcgaggggacgcgcttcacggagaccaagcaccgcgttagcatggaggtggcggctgctaaggggcttcctgtcctcaagtaccacctgctgccgcggaccaagggcttcaccaccgcagtcaagtgcctccgggggacagtcgcagctgtctatgatgtaaccctgaacttcagaggaaacaagaacccgtccctgctggggatcctctacgggaagaagtacgaggcggacatgtgcgtgaggagatttcctctggaagacatcccgctggatgaaaaggaagcagctcagtggcttcataaactgtaccaggagaaggacgcgctccaggagatatataatcagaagggcatgtttccaggggagcagtttaagcctgcccggaggccgtggaccctcctgaacttcctgtcctgggccaccattctcctgtctcccctcttcagttttgtcttgggcgtctttgccagcggatcacctctcctgatcctgactttcttggggtttgtgggagcagcttcctttggagttcgcagactgataggagtaactgagatagaaaaaggctccagctacggaaaccaagagtttaagaaaaaggaataattaatggctgtgactgaacacacgcggccctgacggtggtatccagttaactcaaaaccaacacacagagtgcaggaaaagacaattagaaactatttttcttattaactggtgactaatattaacaaaacttgagccaagagtaaagaattcagaaggcctgtcaggtgaagtcttcagcctcccacagcgcagggtcccagcatctccacgcgcgcccgtgggaggtgggtccggccggagaggcctcccgcggacgccgtctctccagaactccgcttccaagagggagcctttggctgctttctctccttaaacttagatcaaattttttggtttttaatcagttatcttgggaacttaacctggcccctcacctcttctgcaccccccgcccccgaaactgtctcgtaatgaatttctgctgtcctcctgggagtggacggccgggtcccgtcccccgggagcatcgctcggctcagcaccttggctcccagtgggggccccgtggagggcgcccgtagtgataagcacaccggcacgaacgtcaggtccattcctcgaagtcggagccctcactctgccctgtcctggggctggctgagggcgaacgccccacctcactttctagagccctgtctgtcctagctcctatctgaccttgtgtgtaaatacgtacatctgtttttaaagtggatgggcccctgagaactcagtgaaatgcagagttctccatgcacctaaagctcctttgtcgctctcatggctgtcagatcctggtccctccacactgggtgctggggagggaggaccctcggggctaccgcgcgcccccccatcccacagatcaggagccaaggagggagaacagggcagcctgtgggactctaggatgcttcagaagaagcgacggcaccgtcaaccctctgttttttaaaggtggttggagactgttaacactgagctcattgacttctagagattttatttttactggttgatctcttggtggttttcaacttcctgctggaaactagaggtggggcaccccccaccccccagcctcgcactgtgtccttggggaaggcccgcccccatcctggccggtgtcactgtggcccggccacccctgagcgcccagctccctacctcctggacgtctctgagagtccaggcagagcagagggcagcgctcggccggtcatgctggctcccttggccttgcagcgagcccctggcccacgccgagcgagggatgcttctccctacagcatgtccactcccccggcatggccaggtggggcccctggggcaatggcagtggtagaacgctcaacttggttgcggtaccatcagcccacctgcatttggctttcgacttgcttgttctaagtcacagcgccctcatctttttagcaaggtaaaaaaaccaaaatgggtgttatctctgatatcttgaaaccagcgttctgaatagaggtaggttgagttttctaggggaaaacaaatggagaaaagaggcatgaagaaaagtaaaccgagaacataattaggcatcgggcctaagtgtcctggggagattggaggggacggcagcgttctgcatgatggaggcgctgccgggccccgggtctgtgggggccgtgctctcagggcgtgtgcgggacgccacctgtgcacacctgctcagagcacggctcctcgcaggggtgaaggggcagaccaacgaaaccagatgagaccaacgacaccatgcgagacacgcttgcagacactgttgttttggaaatgtgcttccctccatctgaaatctcatccctccacccgcccactcgggcagctgtgccgtgggcagggcatgcgctcccctggctgagcaccccagagattctcctgcaccttcctcatgccgcacgctgctcatccgtctccatgtgtgtttagatccatgccattcactgactcactaacacctgcaaaatctttaaggaaaaaagctgaagggtacgaccatgcacatatgtgacctggaaaatgcaaatttagatcttttatgatttaattattattgtttcccatagaagttccctccctttgaaattaatatataatgtataaattctgcactgagccatggcggagctgggcagcccctaggttagagtggagacggaggcccaggcgcaggggtcacacctcatctggtttccttcccatctcacagcttagcttgtgcttctcaacaccaagtctttaagagcaataaaaactacaccatgaatgtttgaattttttttttttgggggggggagggtggattttgcttttcatccagaaggaaaaggggaggagagctcctttacattttttaaattaaattcataaatcccagaacagtcttttttttttctttttcctttacaccctacttctgagcttaattcagttgatgttatgtccaaattcaggctgagtgctcaggctgaagcaactctgtagcccacagtccgtgctggccactgtcggggtgaggcacattctaggcctggcatcgctgatgccctctgcacccagtccttgagccaggccgaggacaggaagggcattgctggcctgtagctcctgttacccacccagagccaggcgccacactggaggctcccaggcgggagggcccaggcccacccacgggcgtctggccggtcaagctcccagcctgggccgtggtctcctggggacgccgctggcctcccagcttaggcccaggtgccaggtgtcatggggtctcctgcccatcttcccaaggatgccattgctgtcttcatcgtcttcccccgtgtgagacactggttgtctggtactcggcgacagtgtaccagacgcgcaccctatgtgaggtgctttaaggtccctgtcctcaggaagcgcagtctggtggaagagatgagcgctgaacaaatcactaaataacacaaaacaacaatgtaagcagcactttcttgtgtaaaaaaaaaaaaaaagcacgtcctgtcgatgaattttgagtctctctgccttgcctgtcccgactccctttcgcgcaccgtggcatgagaatctttcctcacgctgttcgttgcggtattgctgagcattgatgttgatttgaaggaaaagccgtggttggacccagctgtgtgtttcactcacgtgcaattgagtagctgttgccaggctgtccatgcctgttgtgactaccggttggggtcagatttggggtgaagaatgagtaagtttctgcatgctttgtctctacctgagacacttctacaacaagccaagtataatctctccagccctgcagattttcacctgacttgttcagccccatgcgtagactcccgctgcaggcctctggcctgtggctcactgcatgcagcccctggcgtgcaatactagtgctccacggcgcgatgtgcttctagcccttgcactgcacctaggctcagggttcaaacggccagcccgaaaagcctgcctgccttctttctggaaacagcacgtccccggccgtgtgcctgcccctttctctactgagctagtccccaaaccaaaggcaagccccctcgggcctcgggggatggggccggccacacccctgactccgccctggctctgccccatacccctgccgtggggccgacctgggggatgcagacatccggctccgtattcctgcctatcggggccaggatgcaaaaacaatttttgcgtaaaagatgtcacactgatctgctggagtggggtggacacatgaattcagttttatcatgaacactcgccactggctgcttgttaattcagggataatggtggcattcttacaaactgctcgggaaatagaatgacgggaacacttttagggagcccaggaagttaccagggacattggtgtcgccggcccaggcaacagcagcgtacgcttttcaaagatcattgagttgtcttagaatttgaagctgtgtaatgacaatgtcacctggagttcgtctccatttcttaactttttgttgcacaagtatttggacagaagtcgaactgtgaatgagatactgaaatgcactaaattgtattacattaaactggagttacttgatacaatgaa

SEQ ID NO: 323031 - DNA, 1003 bp, Artificial Sequence
  derived and/or modified sequence
tcctgggctcgtttctgccccaggtagtgctgtcagcggcatgcctgccttctgcaagcccctcttccctgttccccagcccgcacttccaatgagctgtgggccaggaaaccagcccgtcacacttgtccacgctgcgtttaaagcgggaggaaggaggacccaatgcagggcccgaaaggtccactgacggctgtcctcagcgaggggccgtgcacccgctcctgagcagcgccatgggcctgctggccttcctgaagacccagttcgtgctgcacctgctggtcggctttgtcttcgtggtgagtggtctggtcatcaacttcgtccagctgtgcacgctggcgctctggccggtcagcaagcagctctaccgccgcctcaactgccgcctcgcctactcactctggagccaactggtcatgctgctggagtggtggtcctgcacggagtgtacactgttcacggaccaggccacggtagagcgctttgggaaggagcacgcagtcatcatcctcaaccacaacttcgagatcgacttcctctgtgggtggaccatgtgtgagcgcttcggagtgctggggagctccaaggtcctcgctaagaaggagctgctctacgtgcccctcatcggctggacgtggtactttctggagattgtgttctgcaagcggaagtgggaggaggaccgggacaccgtggtcgaagggctgaggcgcctgtcggactaccccgagtacatgtggtttctcctgtactgcgaggggacgcgcttcacggagaccaagcaccgcgttagcatggaggtggcggctgctaaggggcttcctgtcctcaagtaccacctgctgccgcggaccaagggcttcaccaccgcagtcaagtgcctccgggggacagtcgcagctgtctatgatgtaaccctgaacttcagaggaaacaagaacccgtccctgctggggatcctctacgggaagaagtacgaggcggacatgtgcgtgag

SEQ ID NO: 323032 - DNA, 1229 bp, Artificial Sequence
  derived and/or modified sequence
acctcctgctgctcacacactccagccagggacctgcccccggggtccaacaaggacggctgtcctcagcgaggggccgtgcacccgctcctgagcagcgccatgggcctgctggccttcctgaagacccagttcgtgctgcacctgctggtcggctttgtcttcgtggtgagtggtctggtcatcaacttcgtccagctgtgcacgctggcgctctggccggtcagcaagcagctctaccgccgcctcaactgccgcctcgcctactcactctggagccaactggtcatgctgctggagtggtggtcctgcacggagtgtacactgttcacggaccaggccacggtagagcgctttgggaaggagcacgcagtcatcatcctcaaccacaacttcgagatcgacttcctctgtgggtggaccatgtgtgagcgcttcggagtgctggggagctccaaggtcctcgctaagaaggagctgctctacgtgcccctcatcggctggacgtggtactttctggagattgtgttctgcaagcggaagtgggaggaggaccgggacaccgtggtcgaagggctgaggcgcctgtcggactaccccgagtacatgtggtttctcctgtactgcgaggggacgcgcttcacggagaccaagcaccgcgttagcatggaggtggcggctgctaaggggcttcctgtcctcaagtaccacctgctgccgcggaccaagggcttcaccaccgcagtcaagtgcctccgggggacagtcgcagctgtctatgatgtaaccctgaacttcagaggaaacaagaacccgtccctgctggggatcctctacgggaagaagtacgaggcggacatgtgcgtgaggagatttcctctggaagacatcccgctggatgaaaaggaagggcattgctggcctgtagctcctgttacccacccagagccaggcgccacactggaggctcccaggcgggagggcccaggcccacccacgggcgtctggccggtcaagctcccagcctgggccgtggtctcctggggacgccgctggcctcccagcttaggcccaggtgccaggtgtcatggggtctcctgcccatcttcccaaggatgccattgctgtcttcatcgtcttcccccgtgtgagacactggttgtctggtactcggcgacagtgtaccagacgcgcaccctatgtgaggtgctttaaggtccctgtcctca

SEQ ID NO: 323033 - DNA, 582 bp, Artificial Sequence
  derived and/or modified sequence
atatgtctgacagccttgtgtgcttatttcttgcccgcgtgttctgtctcgggttggaagggacacgcacgtctcctgccttcacatgctgagatgggtttctgtagcatccccagaatttctgctgaatgaagtgtgtcgggttatttggacggctgtcctcagcgaggggccgtgcacccgctcctgagcagcgccatgggcctgctggccttcctgaagacccagttcgtgctgcacctgctggtcggctttgtcttcgtggtgagtggtctggtcatcaacttcgtccagctgtgcacgctggcgctctggccggtcagcaagcagctctaccgccgcctcaactgccgcctcgcctactcactctggagccaactggtcatgctgctggagtggtggtcctgcacggagtgtacactgttcacggaccaggccacggtagagcgctttgggaaggagcacgcagtcatcatcctcaaccacaacttcgagatcgacttcctctgtgggtggaccatgtgtgagcgcttcggagtgctggggagctccaaggtcctcgctaagaaggagctgctctac

SEQ ID NO: 323034 - DNA, 454 bp, Artificial Sequence
  derived and/or modified sequence
cggaacggcagggccgcctttaggcttacatccctggaactcccacctccacagacccgtccgggtgctgaaagtccacggatgctatccctggtcaaatcagaggcttgtccagccggaagccctgagggcagctgttcccactggctctgctgaccttgtgccttggacggctgtcctcagcgaggggccgtgcacccgctcctgagcagcgccatgggcctgctggccttcctgaagacccagttcgtgctgcacctgctggtcggctttgtcttcgtggtgagtggtctggtcatcaacttcgtccagctgtgcacgctggcgctctggccggtcagcaagcagctctaccgccgcctcaactgccgcctcgcctactcactctggagccaactggtcatgctgctggagtggtggtcctgcacggagtgtacactgttcacggaccagg

SEQ ID NO: 323035 - DNA, 924 bp, Artificial Sequence
  derived and/or modified sequence
tgggagctttccacatccctccacctcccacccaacatcaccactctccggccagtgagaccatcacagcaccccagaggagacaaattctggagctcagagagctggggacggctgtcctcagcgaggggccgtgcacccgctcctgagcagcgccatgggcctgctggccttcctgaagacccagttcgtgctgcacctgctggtcggctttgtcttcgtggtgagtggtctggtcatcaacttcgtccagctgtgcacgctggcgctctggccggtcagcaagcagctctaccgccgcctcaactgccgcctcgcctactcactctggagccaactggtcatgctgctggagtggtggtcctgcacggagtgtacactgttcacggaccaggccacggtagagcgctttgggaaggagcacgcagtcatcatcctcaaccacaacttcgagatcgacttcctctgtgggtggaccatgtgtgagcgcttcggagtgctggggagctccaaggtcctcgctaagaaggagctgctctacgtgcccctcatcggctggacgtggtactttctggagattgtgttctgcaagcggaagtgggaggaggaccgggacaccgtggtcgaagggctgaggcgcctgtcggactaccccgagtacatgtggtttctcctgtactgcgaggggacgcgcttcacggagaccaagcaccgcgttagcatggaggtggcggctgctaaggggcttcctgtcctcaagtaccacctgctgccgcggaccaagggcttcaccaccgcagtcaagtgcctccgggggacagtcgcagctgtctatgatgtaaccctgaacttcagaggaaacaagaacccgtccctgctggggatcctctacgggaagaagtacgaggcggacatgtgcgtgag

SEQ ID NO: 323036 - DNA, 2199 bp, Artificial Sequence
  derived and/or modified sequence
aggacctccaggacgtagaggttgatgatccgggcaggtggccttcagcgagggagcacgtcaaaaggctgtgggccgtgcagacagctgggggacaccgtcccgggtgtgaccttgggccacacggcagggtggtggacttgctcctagaattgggctccagggctgaagccagcccctctgatctggcactggccggctccattcaccctttttggggcttactgccgcagagacttcctttgaggagagctggacccaagacgccagagttccgggggcactgagtgctgtgtggcacccgggccaggagaaacatgtgccagagggcaggcgtgggctctccggggagtctctgcgtagactttctagcccagaggttcaggtgatggaccagagactggccgctttgtgacaccgaggacggttgataaagtggattctcgaggggaagctgcatccacacagaggctgggacgtgaatgtgcatcacggctctatctgtggcccccaaaggctgggtgccagctgcctgtcggcagggagcgtatcaccgtggcacgtccatgccgtgggggtcactcagcagccacggatgcgccctgggtgctgtcccggggccgtctcagaagcaccgcgctggaccggctgggccagatgccatgggattctgtgtttgtgaacctctagaaaaggacggctgtcctcagcgaggggccgtgcacccgctcctgagcagcgccatgggcctgctggccttcctgaagacccagttcgtgctgcacctgctggtcggctttgtcttcgtggtgagtggtctggtcatcaacttcgtccagctgtgcacgctggcgctctggccggtcagcaagcagctctaccgccgcctcaactgccgcctcgcctactcactctggagccaactggtcatgctgctggagtggtggtcctgcacggagtgtacactgttcacggaccaggccacggtagagcgctttgggaaggagcacgcagtcatcatcctcaaccacaacttcgagatcgacttcctctgtgggtggaccatgtgtgagcgcttcggagtgctggggagctccaaggtcctcgctaagaaggagctgctctacgtgcccctcatcggctggacgtggtactttctggagattgtgttctgcaagcggaagtgggaggaggaccgggacaccgtggtcgaagggctgaggcgcctgtcggactaccccgagtacatgtggtttctcctgtactgcgaggggacgcgcttcacggagaccaagcaccgcgttagcatggaggtggcggctgctaaggggcttcctgtcctcaagtaccacctgctgccgcggaccaagggcttcaccaccgcagtcaagtgcctccgggggacagtcgcagctgtctatgatgtaaccctgaacttcagaggaaacaagaacccgtccctgctggggatcctctacgggaagaagtacgaggcggacatgtgcgtgaggagatttcctctggaagacatcccgctggatgaaaaggaagcagctcagtggcttcataaactgtaccaggagaaggacgcgctccaggagatatataatcagaagggcatgtttccaggggagcagtttaagcctgcccggaggccgtggaccctcctgaacttcctgtcctgggccaccattctcctgtctcccctcttcagttttgtcttgggcgtctttgccagcggatcacctctcctgatcctgactttcttggggtttgtgggagcagcttcctttggagttcgcagactgataggagtaactgagatagaaaaaggctccagctacggaaaccaagagtttaagaaaaaggaataattaatggctgtgactgaacacacgcggccctgacggtggtatccagttaactcaaaaccaacacacagagtgcaggaaaagacaattagaaactatttttcttattaactggtgactaatattaacaaaacttgagccaagagtaaagaattcagaaggcctgtcaggtgaagtcttcagcctcccacagcgcagggtcccagcatctccacgcgcgcccgtgggaggtgggtccggccggagaggcctcccgcggacgccgtctctccagaactccgcttccaagagggagcctttggctgctttctctccttaaacttagatc

SEQ ID NO: 323037 - DNA, 117 bp, Artificial Sequence
  derived and/or modified sequence
atgggcttattggcttttttgaagacccagtttgtgctgcatctcctggtgggatttgtctttgtggtctccgggctggtcatcaactttgtgcagctctgcacacttgccctctag

SEQ ID NO: 323038 - DNA, 117 bp, Artificial Sequence
  derived and/or modified sequence
atggggctgcttgcttttctgaaaacacagtttgttctacacttgctggtcggattcgtttttgtggtgagtggtcttgtgatcaatttcgttcagttatgtacgctggccttatag

SEQ ID NO: 323039 - DNA, 573 bp, Artificial Sequence
  derived and/or modified sequence
ataaatgaatgtgaaaggctatttagacctctgccttttcaccgtcctcccacctgccacaggctgggctcttgtgctagaaatgacttgctagctagacatcatggttcaggatctgagtcagaggaaaccacagtgcaaatttaattgccggggaagataacgggccttggtgccctccaagcgtcagctgagtttccaagaagccgggcagcgggcgcccgcgggttcgtctctggctcctcctccgccacagcagccgggggcccgggtcggaggcggcgggggccgagcgcccggcctcgcaagcccacggcccgctgggggtgccgtcccgcgccggggcggagcaggccccggcagcccagttcctcattctatcagcggtacaaggggctggtggcgccacaggcgctgggaccgcgggcggacaaggatgggtccgcgcggcgcggcgagcttgccccgaggccccggacctcggcggctgctcctccccgtcgtcctcccgctgctgctgctgctgttgttggcgccgccgggctcgggcgccggggccagccggccgcccca

SEQ ID NO: 323040 - DNA, 630 bp, Artificial Sequence
  derived and/or modified sequence
atgctgagcagccagctgtgctgcgtgcacagcctgccccccaccgcaaacccagcagcgctgtgttcgctagcccaacagatgttcactaatatcaggtctccttgcagcggtccacagggaagccctggactccctcgccgaacccacatccacctgtggccacactcagcccacatgtactttctcgttactagctctctgctcccgtttcccttgatccaacctggctgctccagaacacgcttcaaaactctttgcagcctcagacatacttccgccccgaccgaggagggtcacgggcccgtcaggagaccctgcggtatgcattgtctttctcacctaccccatcccaggggcagaccacagggacaccctacccacatgaggcccgctctacaacaggccctgcttagtcacccttcactgctgttgccctggagaagctctcccgatagtgcagttcaggttggaccaagtatgattctacggcggattccaatggcgggtcacctgtgcttcccccactggcctcagctcttggatagtagggattgctgtacttacacatgtatcaacacaccagtactgaattctcacatggtgcaggagggggtgtgtggccagtag

SEQ ID NO: 323041 - DNA, 392 bp, Artificial Sequence
  derived and/or modified sequence
gagaccatcacagcaccccagaggagacaaattctggagctcagagagctgggagggcagctgctggtgtgacctcagctgctccccagaccctaaggggatctgggaccttccaccttctaccaacggtgttggtcttctgtcctcacgcctatggtttcacgctcccacagtggctcctgcaccttcagacactgcctcctcaccgagggagggaagaacgacaaaggacggctgtcctcagcgaggggccgtgcacccgctcctgagcagcgccatgggcctgctggccttcctgaagacccagttcgtgctgcacctgctggtcggctttgtcttcgtggtgagtggtctggtcatcaacttcgtccagctgtgcacgctggcgctct

SEQ ID NO: 323042 - protein, 205 aa, Artificial Sequence
  derived and/or modified sequence
MLKRKPSNVSEKEKHQKPKKGDIIDIICKTPMGMWTGMLNNKVGNFKFIYVDVISEEEAAPKKIKANRRSNSKKSKTLQEFLERIHLQEYTSTLLLNGYETLEDLKDIKESHLIELNIENPDDRRRLLSAAENFLEEEIIQEQENEPEPLSLSSDISLNKSQLDDCPRDSGCYISSGNSDNGKEDLESENLSDMVHKIIITEPSD

SEQ ID NO: 323043 - DNA, 720 bp, Artificial Sequence
  derived and/or modified sequence
atgccgctgcttctgttgggagagacggagcccctgaagctcgaaagggactgcaggtcccccgtggatccttgggcggccgctagtcccgatcttgcccttgcttgcctttgtcattgtcaggacctgtcatctggagcctttcctgacaggggtgttttaggaggcgttctgtttccaacagttgaaatggtgattaaggtgttcgtcgcgactagctcaggcagcatcgctatcaggaagaagcagcaagaagttgtgggcttccttgaggccaacaaaatagatttcaaggagctggatatagctggtgacgaggataaccggcgatggatgagggagaatgttccgggagagaaaaaacctcagaatggaattcctctgccgcctcagatctttaacgaagagcagtattgcggagactttgactcatttttcagcgccaaggaagagaatatcatttactcattccttggattagcacccccacctgacagcaaaggcagcgaaaaagccgaggagggtggtgagacagaagcacagaaggaaggatctgaggatgtggggaacctgcctgaggcacaagagaagaatgaggaagagggtgaaacagccactgaggaaaccgaggaaatcgctatggaaggcgctgagggagaagccgaggaagaggaggagacagctgaaggcgaagagccaggtgaggacgaagatagttag

SEQ ID NO: 323044 - DNA, 720 bp, Artificial Sequence
  derived and/or modified sequence
atgcccctgctgctgctgggggagacagagcccctgaagctggagcgggactgccgcagccctgtggacccctgggccgccgccagcccagacctggccctggcctgcctgtgccactgccaggacctgagcagcggggccttcccagaccggggcgtgctgggcggcgtgctcttccccaccgtggagatggtgatcaaggtgtttgtggccaccagcagcggcagcatcgccatcaggaagaagcagcaggaggtggtgggcttcctggaggccaacaagattgacttcaaggagctggacattgctggagatgaggacaacagacgctggatgagagaaaatgtgcctggagagaagaagccccagaatggcatccccctgcccccccagatcttcaatgaggagcagtactgtggggactttgacagcttcttcagcgccaaggaggagaacatcatctacagcttcctgggcctggcccctcctccagacagcaaaggaagtgagaaggccgaggagggcggggagacagaggcccagaaggagggctctgaagatgtgggcaacctgcctgaggcccaggagaagaatgaggaggagggggagacagccacagaggagacagaggagatcgccatggagggcgctgagggggaggccgaggaggaggaggagacagctgagggggaggagcctggagaagatgaggacagctag

SEQ ID NO: 323045 - DNA, 720 bp, Artificial Sequence
  derived and/or modified sequence
atgcccctgctgctgctgggcgagaccgagcccctgaagctggagagagattgtagaagtcctgtggatccttgggccgccgcttctcccgatctggccttagcctgtctctgtcactgccaggacctgtcttctggggccttccccgaccgcggagttctgggaggtgttctttttccaacggtagagatggtcataaaggtgttcgtggcgacctcaagcggatcaatcgcaataagaaaaaagcaacaagaggtggtgggtttcctggaggcaaataagattgacttcaaagaactggacattgcgggcgacgaggataaccgaagatggatgcgggagaacgtccccggcgagaagaagccacagaacgggatacccctgccaccacagattttcaacgaagagcagtattgcggggactttgactcattctttagcgctaaggaagaaaatattatttattcgtttctcggactggccccacccccagattccaaagggagtgagaaggctgaggaggggggagaaacggaagcccaaaaggaggggtcggaggacgtaggcaacctgccggaagcccaggagaaaaacgaggaagagggggaaaccgctacagaggagactgaggagatagcaatggagggcgcagaaggagaagcagaagaagaggaggagactgctgagggggaggaaccaggggaagacgaagactcctag

SEQ ID NO: 323046 - DNA, 720 bp, Artificial Sequence
  derived and/or modified sequence
atgccactcctccttctcggggagacagagccccttaagttagagagggattgcaggagtcccgtggacccctgggccgcagccagccccgacctggccctggcctgcctctgccattgccaggacctcagctctggggctttccccgataggggcgttttgggtggcgtgctgtttcctaccgtcgagatggtcataaaggtgttcgttgccacgtcctctgggtccattgccatacgcaagaagcaacaggaggtggtgggcttcctggaagcaaacaagatcgattttaaggagcttgacatagcgggtgatgaggataatagaagatggatgcgagagaatgtgcccggagagaagaagccacagaacgggatacccctgccaccccagatctttaatgaggaacagtattgtggcgatttcgatagctttttctcagccaaggaagagaatatcatatattcctttcttgggctggcccctccccctgatagtaagggtagcgagaaggccgaggagggaggtgagacggaagcccagaaagagggctcagaagatgttggtaacctgcctgaggcccaagagaaaaacgaggaggagggagaaaccgctaccgaggagacagaggaaatcgccatggagggggctgaaggcgaggccgaagaggaagaggagacagccgaaggggaggagccgggtgaagatgaagatagttag

SEQ ID NO: 323047 - DNA, 1251 bp, Artificial Sequence
  derived and/or modified sequence
gctgcttttatcgaccaatcaaatattttcctgacagatcccaaaatattcctgggccaatggagggaggagcccaagatgcctctgctgctccttggagagacagagcctcttaagttggagcgggactgccggagcccagtggacccctgggctgctgccagccccgacctggcacttgcttgcctgtgtcactgtcaggatttgtctagcggcgcattccctgacaggggtgtgttggggggagtcctctttccaactgtcgaaatggttatcaaagtgtttgttgctacatcttctgggtccatagcgattaggaagaaacagcaagaagtagtgggttttttggaagcgaataaaatcgactttaaggaattagatattgctggagatgaagacaacaggaggtggatgagagagaatgttcctggagagaaaaaacctcaaaatgggattcctttgcctccccagatcttcaatgaggagcagtactgtggggattttgactctttcttctctgcaaaagaagagaatattatttattccttccttggtttggctcctcctccagactcaaagggatcagagaaggctgaagaaggtggagaaactgaggcacaaaaagagggcagtgaagatgtgggcaacctccctgaagcccaggagaagaatgaagaagaaggagagacagccacagaagagacggaagaaatagccatggagggtgcggaaggggaagccgaggaggaggaagaaactgcagaaggagaagagcctggagaagacgaagattcctaggccttttcatgcttcatttcttccacttctccagaaaatggaagctatgaagcaacatttcaaatgtctctccacaaaccaaactcaacagaatactttggcttgaagccggcacacccagggttactgaggacttatgctgcctgacctggttagatgtacatggaggtatctcccgaatcatacaaaattaaatgtgaagaccgtttatgcataccttcatgtgcctgacagtcttggcttttgaagatttttttttcttttttgctctgcatagctagaccatcttattaataatactctgaaaaaaatgatttcaaggcatggaagttctctgtgatacaacaatagtatttcttcaaatgcgccttatgctacttatctcagaaacaggttttaaaatgaagtgctttccagagaaccatcatataaataaagattaatagaaaaata

SEQ ID NO: 323048 - DNA, 780 bp, Artificial Sequence
  derived and/or modified sequence
tgtagacgtctgtaaacgatcctcctgccgtccctgttcggcgcccgggaccctgccttcccgcgtggccgcaccgagacgagggagcctgtcacgcgctctggcgctctcctgacctcttaaggctctgtcagtcttagattaggaagaaacagcaagaagtagtgggttttttggaagcgaataaaatcgactttaaggaattagatattgctggagatgaagacaacaggaggtggatgagagagaatgttcctggagagaaaaaacctcaaaatgggattcctttgcctccccagatcttcaatgaggagcagtactgtggggattttgactctttcttctctgcaaaagaagagaatattatttattccttccttggtttggctcctcctccagactcaaagggatcagagaaggctgaagaaggtggagaaactgaggcacaaaaagagggcagtgaagatgtgggcaacctccctgaagcccaggagaagaatgaagaagaaggagagacagccacagaagagacggaagaaatagccatggagggtgcggaaggggaagccgaggaggaggaagaaactgcagaaggagaagagcctggagaagacgaagattcctaggccttttcatgcttcatttcttccacttctccagaaaatggaagctatgaagcaacatttcaaatgtctctccacaaaccaaactcaacagaatactttggcttgaagccggcacacccagggttactgaggacttatgctgcctgacctggtt

SEQ ID NO: 323049 - DNA, 1014 bp, Artificial Sequence
  derived and/or modified sequence
caggagccgcggcggggaggggcgtcttgggcctggaggtcagtgtggcctcgcgtttgtcttcggtgacgggaaattaggaagaaacagcaagaagtagtgggttttttggaagcgaataaaatcgactttaaggaattagatattgctggagatgaagacaacaggaggtggatgagagagaatgttcctggagagaaaaaacctcaaaatgggattcctttgcctccccagatcttcaatgaggagcagtactgtggggattttgactctttcttctctgcaaaagaagagaatattatttattccttccttggtttggctcctcctccagactcaaagggatcagagaaggctgaagaaggtggagaaactgaggcacaaaaagagggcagtgaagatgtgggcaacctccctgaagcccaggagaagaatgaagaagaaggagagacagccacagaagagacggaagaaatagccatggagggtgcggaaggggaagccgaggaggaggaagaaactgcagaaggagaagagcctggagaagacgaagattcctaggccttttcatgcttcatttcttccacttctccagaaaatggaagctatgaagcaacatttcaaatgtctctccacaaaccaaactcaacagaatactttggcttgaagccggcacacccagggttactgaggacttatgctgcctgacctggttagatgtacatggaggtatctcccgaatcatacaaaattaaatgtgaagaccgtttatgcataccttcatgtgcctgacagtcttggcttttgaagatttttttttcttttttgctctgcatagctagaccatcttattaataatactctgaaaaaaatgatttcaaggcatggaagttctctgtgatacaacaatagtatttcttcaaatgcgccttatgctacttatctcagaaacaggttttaaaatgaagtgctttccagagaaccatcatataaataaagattaatagaaaaata

SEQ ID NO: 323050 - DNA, 585 bp, Artificial Sequence
  derived and/or modified sequence
tgagtttcttgtgtagacgtctgtaaacgatcctcctgccgtccctgttcggcgcccgggaccctgccttcccgcgtggccgcaccgagacgagggagcctgtcacgcgctctggcgctctcctgacctcttaaggctctgtcagtcttaggtaacttgagtcagtagattaggaagaaacagcaagaagtagtgggttttttggaagcgaataaaatcgactttaaggaattagatattgctggagatgaagacaacaggaggtggatgagagagaatgttcctggagagaaaaaacctcaaaatgggattcctttgcctccccagatcttcaatgaggagcagtactgtggggattttgactctttcttctctgcaaaagaagagaatattatttattccttccttggtttggctcctcctccagactcaaagggatcagagaaggctgaagaaggtggagaaactgaggcacaaaaagagggcagtgaagatgtgggcaacctccctgaagcccaggagaagaatgaagaagaaggagagacagccacagaagagacggaagaaatagccatggagggtgcg

SEQ ID NO: 323051 - DNA, 720 bp, Artificial Sequence
  derived and/or modified sequence
atgcccctgctgctgctgggcgagaccgagcccctgaagctggagagagactgcagaagccccgtggacccctgggccgccgccagccccgacctggccctggcctgcctgtgccactgccaggacctgagcagcggcgccttccccgacagaggcgtgctgggcggcgtgctgttccccaccgtggagatggtgatcaaggtgttcgtggccaccagcagcggcagcatcgccatcagaaagaagcagcaggaggtggtgggcttcctggaggccaacaagatcgacttcaaggagctggacatcgccggcgacgaggacaacagaagatggatgagagagaacgtgcccggcgagaagaagccccagaacggcatccccctgcccccccagatcttcaacgaggagcagtactgcggcgacttcgacagcttcttcagcgccaaggaggagaacatcatctacagcttcctgggcctggcccccccccccgacagcaagggcagcgagaaggccgaggagggcggcgagaccgaggcccagaaggagggcagcgaggacgtgggcaacctgcccgaggcccaggagaagaacgaggaggagggcgagaccgccaccgaggagaccgaggagatcgccatggagggcgccgagggcgaggccgaggaggaggaggagaccgccgagggcgaggagcccggcgaggacgaggacagctag

SEQ ID NO: 323052 - protein, 1178 aa, Artificial Sequence
  derived and/or modified sequence
MAQFPTPFGGSLDIWAITVEERAKHDQQFHSLKPISGFITGDQARNFFFQSGLPQPVLAQIWALADMNNDGRMDQVEFSIAMKLIKLKLQGYQLPSALPPVMKQQPVAISSAPAFAAVPPLANGAPPVIQPLPAFAHPAATLPKSSSFSRSGPGSQLNTKLQKAQSFDVASVPPVAEWAVPQSSRLKYRQLFNSHDKTMSGHLTGPQARTILMQSSLPQAQLASIWNLSDIDQDGKLTAEEFILAMHLIDVAMSGQPLPPVLPPEYIPPSFRRVRSGSGISVISSTSVDQRLPEEPVLEDEQQQLEKKLPVTFEDKKRENFERGNLELEKRRQALLEQQRKEQERLAQLERAEQERKERERQEQERKRQLELEKQLEKQRELERQREEERRKEIERREAAKRELERQRQLEWERNRRQELLNQRNKEQEDIVVLKAKKKTLEFELEALNDKKHQLEGKLQDIRCRLTTQRQEIESTNKSRELRIAEITHLQQQLQESQQMLGRLIPEKQILNDQLKQVQQNSLHRDSLVTLKRALEAKELARQHLRDQLDEVEKETRSKLQEIDIFNNQLKELREIHNKQQLQKQKSMEAERLKQKEQERKIIELEKQKEEAQRRAQERDKQWLEHVQQEDEHQRPRKLHEEEKLKREESVKKKDGEEKGKQEAQDKLGRLFHQHQEPAKPAVQAPWSTAEKGPLTISAQENVKVVYYRALYPFESRSHDEITIQPGDIVMVDESQTGEPGWLGGELKGKTGWFPANYAEKIPENEVPAPVKPVTDSTSAPAPKLALRETPAPLAVTSSEPSTTPNNWADFSSTWPTSTNEKPETDNWDAWAAQPSLTVPSAGQLRQRSAFTPATATGSSPSPVLGQGEKVEGLQAQALYPWRAKKDNHLNFNKNDVITVLEQQDMWWFGEVQGQKGWFPKSYVKLISGPIRKSTSMDSGSSESPASLKRVASPAAKPVVSGEEFIAMYTYESSEQGDLTFQQGDVILVTKKDGDWWTGTVGDKAGVFPSNYVRLKDSEGSGTAGKTGSLGKKPEIAQVIASYTATGPEQLTLAPGQLILIRKKNPGGWWEGELQARGKKRQIGWFPANYVKLLSPGTSKITPTEPPKSTALAAVCQVIGMYDYTAQNDDELAFNKGQIINVLNKEDPDWWKGEVNGQVGLFPSNYVKLTTDMDPSQQ

SEQ ID NO: 323053 - protein, 115 aa, Artificial Sequence
  derived and/or modified sequence
MAQFPTPFGGSLDIWAITVEERAKHDQQFHSLKPISGFITGDQARNFFFQSGLPQPVLAQIWALADMNNDGRMDQVEFSIAMKLIKLKLQGYQLPSALPPVMKQQPVAISSAPAF

SEQ ID NO: 323054 - DNA, 3435 bp, Artificial Sequence
  derived and/or modified sequence
atggcacaatttcccacgcccttcggaggcagtttagatatctgggctatcaccgtggaagagagagccaagcatgaccagcagtttcactcactgaagcccataagtggtttcattacaggggatcaggcccgcaactttttctttcagagtggactgccccagcctgtcctggcacagatttgggccttggctgacatgaacaatgacggtcgaatggatcaagtcgagtttagcatcgctatgaaactgatcaaactgaaactgcaaggatatcagctgcctagcgctctaccccctgtaatgaaacagcagcccgtcgctatctcttctgcccccgccttcggcatgggggggattgccagtatgcccccacttaccgccgttgctcctgtgcccatgggatcaatacccgtggtcggtatgtcacctacacttgtgagctcagtcccaaccgccgcagtcccgccccttgccaatggtgccccacccgtgattcagccattgccagcattcgctcacccagctgcaactctaccaaaatcaagtagcttttctcgctcggggcccggcagccagctgaacactaagttgcagaaagctcagtcttttgacgtcgcgtccgtgcctcccgtggctgaatgggccgtccctcagagctccagacttaagtatcggcaattgtttaacagtcatgacaagacgatgtcaggtcacctgactggtccgcaggctaggacaattctaatgcagagcagtctccctcaagcgcagctggcgtccatctggaatctttccgatatagatcaggatgggaagcttacggccgaggagtttatcctggccatgcacctgatcgacgtcgctatgtccgggcagcctctgccccccgtgctcccacccgagtacatcccaccatcatttcgccgagtcagatctggttccggcattagtgtgattagcagcacctccgttgatcagcggcttcctgaggagcctgttctggaagacgaacagcaacagctggaaaaaaaactgcctgtgacatttgaggataagaaacgagaaaatttcgagcgcggcaacctggagctggaaaagagacgtcaagcgctgctggaacagcagcgtaaggagcaggagcgccttgcgcaattagagagagccgagcaggagagaaaagagagggagcgccaggagcaggaaagaaagaggcagctcgagctggaaaaacagctggaaaagcagagagaactcgagcgccagcgggaggaggagagacgtaaggaaattgagcgccgggaggccgccaaaagggagctggagcggcaaaggcagctggagtgggaaaggaacaggcgacaagagctactaaaccaaagaaataaagaacaggaggacatagtcgtgctgaaagccaaaaaaaagaccctggagtttgagttggaggcccttaatgacaagaagcaccagctggaaggcaaattgcaggacataaggtgtcgcttgacaacacaacgccaggaaatcgagagtacaaataagagccgcgagttgcgtatcgcagaaataacccatcttcagcaacagttacaggaatctcagcagatgctaggtcgactgatccctgaaaaacagatcctgaacgaccaactcaagcaggtccagcaaaattctctccacagggactcattggtcacacttaaaagggccctggaggccaaagagctggctcggcagcacctgcgcgaccaattagacgaggttgaaaaggagacgcggagtaagctacaggagattgacatctttaacaaccaacttaaggagcttcgcgaaatccacaacaaacagcagctgcagaagcagaaaagcatggaggcagagcggctcaaacaaaaagagcaggagcggaagatcatagagctggagaaacaaaaggaagaagcccagcgccgcgcacaggaaagagataaacagtggttagaacacgtgcaacaagaggacgaacatcaaagaccccgcaaactgcacgaggaagaaaagcttaagcgggaggagagcgtcaagaagaaagacggggaagaaaagggcaaacaggaggctcaggacaaacttgggcgcctgtttcatcaacaccaggagccggctaagccagccgttcaggccccctggtccactgcagagaaaggcccattaactatctccgcacaggagaacgtcaaggttgtttactatagggccttgtatccctttgagagtagatcccatgatgaaatcaccatccagccaggcgacatcgtcatggtggatgaaagccaaactggtgaaccaggctggcttggcggcgaattaaaaggaaagaccggatggtttcctgctaactacgctgagaaaatcccagagaatgaggtgccggctcccgtaaaacccgtcaccgatagcacctcagcaccagccccaaaactagcactgagagaaacccctgcgcctcttgcagtgacctccagcgagccttctactacacccaataattgggccgacttctcaagcacatggccaacaagtacaaatgagaagcctgagactgacaactgggatgcatgggccgctcagccgtcacttaccgtgccgtcagccggccagctgagacaacgatcagccttcacaccagccactgccaccggttcgtcaccatcacctgtgcttggccagggcgagaaagtggagggactccaggctcaggccctttacccctggagagccaagaaggataaccacctcaattttaacaagaacgatgttattactgtgctggagcagcaggatatgtggtggtttggagaagtgcagggccagaagggctggtttcccaaaagttacgtgaagctgatctctggaccaattcgtaagagcacatccatggattccgggagttccgagagcccagcatccctgaagcgggtcgcctcccccgctgctaagcctgtcgtcagcggtgaggaaatcgcccaggttattgcttcttataccgcaaccggacctgagcaactcaccttggcccctggccagctcatactgattcggaagaaaaacccggggggttggtgggaaggagagctccaggcacggggtaagaagcggcagattggatggttccccgccaattacgtcaaactgttgtcccccgggacatccaagataacgccgactgagcctcccaaatccaccgccttggccgctgtgtgtcaggtgattggtatgtatgattacacagcacagaacgacgacgaattggcatttaacaaaggtcaaattatcaacgtactgaacaaagaagaccctgattggtggaaaggcgaggtcaatggacaggtgggactgtttccttcaaactatgtcaagcttacaaccgatatggacccgtcacagcagtag

SEQ ID NO: 323055 - DNA, 3450 bp, Artificial Sequence
  derived and/or modified sequence
atggcgcagtttcctaccccgttcggtgggtctctcgatatatgggccattactgttgaagaacgcgcaaaacacgaccagcagttccacagccttaaacccatcagcggctttataacaggtgatcaggctcggaacttcttcttccagagcggcttgccccagcctgtcctcgctcagatctgggctctcgcagacatgaataacgacggacggatggaccaggtcgagttctccattgccatgaagctcataaaattgaaactgcagggttaccaattgccttcagctctgccacccgttatgaagcagcaacctgttgctatttcaagcgcgcccgcattcgggatggggggtatagcatccatgccacccctcactgctgtagccccagtgcctatgggtagtattcctgtggtgggcatgtcaccaacactcgtgagctcggttcccaccgctgccgtcccccccctggcaaacggggccccacccgtcatacagcctctcccagcttttgctcaccctgcagccacgctaccaaagagttcctccttcagtcggtccgggccgggtagtcagctgaatactaagctccagaaggcacagagtttcgatgttgcctcggttccccctgtggccgagtgggccgtaccccagagctcccggctgaaatatcgccagcttttcaattcccacgacaagaccatgtccggtcatctgacaggccctcaagcacggactatccttatgcagtcctcgctgccacaggcacagttggcatctatctggaatctgtctgacatagaccaggacggcaagttaacggctgaggagttcattctggccatgcatctgatagatgtcgcgatgtctggacagccactcccccccgtgttaccaccggaatacatcccaccctccttcagaagggtaagaagcgggtccggaatctcagtcatctcatccacttctgttgaccaacgcctaccagaggagcctgttctggaggatgaacagcagcagctggaaaagaaactgcccgtgacttttgaggataaaaagagagaaaacttcgagcgagggaatctggagctcgaaaagagacgccaggcccttctggagcaacagcgtaaggaacaagagcgtctggcccaactggagcgggccgagcaagagcgaaaagaacgggagagacaggagcaggaaaggaagcggcagctggagttagaaaagcagttggaaaaacagagagagctggaaaggcaacgagaggaagaaaggaggaaagagatcgagaggcgcgaagctgctaaaagagagctggaaagacagagacagctggagtgggagcgcaataggagacaggagcttttgaaccagcggaacaaggagcaggaggacatagttgtgctcaaggccaagaagaagactctggagtttgagctcgaagcactaaatgataagaagcatcagttggagggaaagctacaggacattcgctgcaggttgactactcagaggcaggagatagagtccactaacaagagtagagagctaagaattgcggaaatcactcacctgcagcagcaactccaggagtcgcagcagatgctgggacgattaatcccggagaaacagattttgaacgatcaactcaagcaggttcaacagaatagtctacatagggattccttagtgacactgaagcgcgcactcgaagctaaggaactggcgcggcaacacctgagggaccagctggacgaggtcgagaaggaaacccgatcgaaactccaggagattgatattttcaacaatcaattgaaagaactgagagaaattcacaataagcagcagctccagaagcagaagtccatggaagcggaaaggctgaaacaaaaggagcaggagcgcaaaattatcgagctggagaagcagaaggaggaggcacagcggagagcacaggagcgagacaaacagtggctcgaacacgttcaacaggaggatgagcaccagcgccccagaaagctgcatgaagaagagaaactcaaacgagaggaaagtgtcaaaaaaaaggacggcgaagagaaaggtaaacaggaggcacaagacaaactggggaggttatttcatcagcaccaggaacctgccaagcccgcagttcaggccccttggtcaacagcggagaaaggccctttaaccataagcgcccaagaaaatgtcaaagtagtctattatagggcattgtacccattcgaaagccgtagtcatgacgaaatcacgattcaacccggcgacatcgtgatggtgaaaggggagtgggtggacgagtcgcagactggagaacccggctggctcgggggggaactcaagggcaagactggttggttccccgccaactatgctgaaaagatacccgagaacgaggtgccagcccctgtcaaacccgtgaccgactccacttcggctcctgccccaaagctcgcgcttcgggaaactcccgcccccttggccgttactagtagcgaaccaagcaccacaccaaataactgggctgatttcagctctacctggcccacatctacaaatgaaaagcctgaaaccgacaactgggacgcatgggctgctcagccatccctcaccgtgccctcagctggtcagctgaggcagaggtctgcatttaccccagccaccgccacgggctccagtccttcacccgtcctggggcagggggaaaaggtggaaggccttcaagctcaggccctctatccgtggagagccaagaaggacaaccacctcaactttaacaagaatgatgtgataaccgtcctggaacagcaggacatgtggtggtttggcgaggtacagggccagaaaggttggtttcccaaatcttacgttaaactgattagcggcccaatccgcaagtcgaccagcatggatagtgggagttctgaaagtccagcgtccctcaagagggtagcgagcccagcggccaagcctgtagtttccggagaggagatcgcacaagttatcgcatcttataccgcaaccggcccggaacagctcactctggccccaggtcagctgattctcattcgtaagaagaatccaggggggtggtgggagggcgaactccaagcaaggggcaagaagaggcagatcggatggttccccgccaactacgtgaagctccttagtcctggtacttccaagatcacacccacggagcccccaaagtctacggctctcgctgctgtttgtcaagtgataggaatgtatgattatacggcccagaacgacgacgagctggctttcaacaaagggcagataattaacgtacttaataaggaagatcccgactggtggaaaggagaagtgaatggacaggttggcctctttcctagtaattacgtgaagctcactactgacatggatccctcacagcagtag

SEQ ID NO: 323056 - DNA, 5191 bp, Artificial Sequence
  derived and/or modified sequence
gaggtagagaagagtggaggcgccaggggagggagcgtagcttggttgctccgtagtacggcggctcgcgaggaagaatcccgagcgggctccgggacggacagagaggcgggcggggatggtgtgcggggctgcggctcctgcgtccctcccagcggcgcgtgagcggcactgatttgtccctggggcggcagcgcggacccgcccggagatgaggcgtcgattagcaaggtaaaagtaacagaaccatggctcagtttccaacaccttttggtggcagcctggatatctgggccataactgtagaggaaagagcgaagcatgatcagcagttccatagtttaaagccaatatctggattcattactggtgatcaagctagaaactttttttttcaatctgggttacctcaacctgttttagcacagatatgggcactagctgacatgaataatgatggaagaatggatcaagtggagttttccatagctatgaaacttatcaaactgaagctacaaggatatcagctaccctctgcacttccccctgtcatgaaacagcaaccagttgctatttctagcgcaccagcatttggtatgggaggtatcgccagcatgccaccgcttacagctgttgctccagtgccaatgggatccattccagttgttggaatgtctccaaccctagtatcttctgttcccacagcagctgtgccccccctggctaacggggctccccctgttatacaacctctgcctgcatttgctcatcctgcagccacattgccaaagagttcttcctttagtagatctggtccagggtcacaactaaacactaaattacaaaaggcacagtcatttgatgtggccagtgtcccaccagtggcagagtgggctgttcctcagtcatcaagactgaaatacaggcaattattcaatagtcatgacaaaactatgagtggacacttaacaggtccccaagcaagaactattcttatgcagtcaagtttaccacaggctcagctggcttcaatatggaatctttctgacattgatcaagatggaaaacttacagcagaggaatttatcctggcaatgcacctcattgatgtagctatgtctggccaaccactgccacctgtcctgcctccagaatacattccaccttcttttagaagagttcgatctggcagtggtatatctgtcataagctcaacatctgtagatcagaggctaccagaggaaccagttttagaagatgaacaacaacaattagaaaagaaattacctgtaacgtttgaagataagaagcgggagaactttgaacgtggcaacctggaactggagaaacgaaggcaagctctcctggaacagcagcgcaaggagcaggagcgcctggcccagctggagcgggcggagcaggagaggaaggagcgtgagcgccaggagcaagagcgcaaaagacaactggaactggagaagcaactggaaaagcagcgggagctagaacggcagagagaggaggagaggaggaaagaaattgagaggcgagaggctgcaaaacgggaacttgaaaggcaacgacaacttgagtgggaacggaatcgaaggcaagaactactaaatcaaagaaacaaagaacaagaggacatagttgtactgaaagcaaagaaaaagactttggaatttgaattagaagctctaaatgataaaaagcatcaactagaagggaaacttcaagatatcagatgtcgattgaccacccaaaggcaagaaattgagagcacaaacaaatctagagagttgagaattgccgaaatcacccatctacagcaacaattacaggaatctcagcaaatgcttggaagacttattccagaaaaacagatactcaatgaccaattaaaacaagttcagcagaacagtttgcacagagattcacttgttacacttaaaagagccttagaagcaaaagaactagctcggcagcacctacgagaccaactggatgaagtggagaaagaaactagatcaaaactacaggagattgatattttcaataatcagctgaaggaactaagagaaatacacaataagcaacaactccagaagcaaaagtccatggaggctgaacgactgaaacagaaagaacaagaacgaaagatcatagaattagaaaaacaaaaagaagaagcccaaagacgagctcaggaaagggacaagcagtggctggagcatgtgcagcaggaggacgagcatcagagaccaagaaaactccacgaagaggaaaaactgaaaagggaggagagtgtcaaaaagaaggatggcgaggaaaaaggcaaacaggaagcacaagacaagctgggtcggcttttccatcaacaccaagaaccagctaagccagctgtccaggcaccctggtccactgcagaaaaaggtccacttaccatttctgcacaggaaaatgtaaaagtggtgtattaccgggcactgtacccctttgaatccagaagccatgatgaaatcactatccagccaggagacatagtcatggtggatgaaagccaaactggagaacccggctggcttggaggagaattaaaaggaaagacagggtggttccctgcaaactatgcagagaaaatcccagaaaatgaggttcccgctccagtgaaaccagtgactgattcaacatctgcccctgcccccaaactggccttgcgtgagacccccgcccctttggcagtaacctcttcagagccctccacgacccctaataactgggccgacttcagctccacgtggcccaccagcacgaatgagaaaccagaaacggataactgggatgcatgggcagcccagccctctctcaccgttccaagtgccggccagttaaggcagaggtccgcctttactccagccacggccactggctcctccccgtctcctgtgctaggccagggtgaaaaggtggaggggctacaagctcaagccctatatccttggagagccaaaaaagacaaccacttaaattttaacaaaaatgatgtcatcaccgtcctggaacagcaagacatgtggtggtttggagaagttcaaggtcagaagggttggttccccaagtcttacgtgaaactcatttcagggcccataaggaagtctacaagcatggattctggttcttcagagagtcctgctagtctaaagcgagtagcctctccagcagccaagccggtcgtttcgggagaagaaattgcccaggttattgcctcatacaccgccaccggccccgagcagctcactctcgcccctggtcagctgattttgatccgaaaaaagaacccaggtggatggtgggaaggagagctgcaagcacgtgggaaaaagcgccagataggctggttcccagctaattatgtaaagcttctaagccctgggacgagcaaaatcactccaacagagccacctaagtcaacagcattagcggcagtgtgccaggtgattgggatgtacgactacaccgcgcagaatgacgatgagctggccttcaacaagggccagatcatcaacgtcctcaacaaggaggaccctgactggtggaaaggagaagtcaatggacaagtggggctcttcccatccaattatgtgaagctgaccacagacatggacccaagccagcaatgaatcatatgttgtccatccccccctcaggcttgaaagtcctcaaagagacccactatcccatatcactgcccagagggatgatgggagatgcagccttgatcatgtgacttccagcatgatcacctactgccttctgagtagaagaactcactgcagagcagtttacctcattttaccttagttgcatgtgatcgcaatgtttgagttattacttgcagagataggagcaaaaattacaaaaacacacagggtagtgggtccttttgtggctttcctagttactcaaattgactttcccccacctttgcacaggtgctttcaatagttttaaaattatttttaaatatatattttagctttttaataaacaaaataaataaatgacttctttgctattttggttttgcaaaaagacccactatcaaggaatgctgcatgtgctattaaaaattgttccaaatgtccataaatctgagacttgatgtattttttcattttgtccagtgttaccaactaaattgtgcagtttggggcttttcccccttaccatagaagtgcagaggagttcagtatctctgttttaaagacgtatagaatgagcccaattaaagcgaaggtgtttgtgcttgtttgtgtgtatcagctgtaccttgttgagcatgtaatacatcctgtacataagaaattagttctttccatggcaaagctattaccttgtacgatgctctaatcatattgcatttaattttattttgcacagtgaccttgtagccacatgagaaagcactctgtgtttttgttcggtctcagatttatctggttgagttggtgttttgtttggggtttttaattttgcgtgtttgcatagcataaaatcagtagacaacaccactgaggtcgttacgatcaacgatatccacagtctctttttagtctctgttacatgaagttttattccagttacttttcatggaatgacctattttgaacaagtaattttcttgacaagaaagaatgtatagaagtctccctgcaattaatttccaatgtttacattttttaactagactgtggaatttctacagattaatatgaaatggagctcatggtccgtttgtgtgttagatatgctgtagctgaagccctgtttgtcttttaaacactagttggaagctctcaataaaaatgcctgctgctcacagcacagaaaatggggcagggggagcctcaagcacaatctagctgtcctcctaaagactctgtaatgctcactcccctcgcgttctcccggcgctgtcgggaggctgtgctggtggtcgtgtagaggtccttctcctttcacatggtgcagagagcgaggacctctcctcctcgttcagttgcacttcagtattttcacggatatgaatgtaaaatatataaatatataaacctgcggctttaacaactgtaatacaaccttttgaattagttccgtgtatagataattaaattcttcatacaaaagt

SEQ ID NO: 323057 - DNA, 4003 bp, Artificial Sequence
  derived and/or modified sequence
gaggtagagaagagtggaggcgccaggggagggagcgtagcttggttgctccgtagtacggcggctcgcgaggaagaatcccgagcgggctccgggacggacagagaggcgggcggggatggtgtgcggggctgcggctcctgcgtccctcccagcggcgcgtgagcggcactgatttgtccctggggcggcagcgcggacccgcccggagatgaggcgtcgattagcaaggtaaaagtaacagaaccatggctcagtttccaacaccttttggtggcagcctggatatctgggccataactgtagaggaaagagcgaagcatgatcagcagttccatagtttaaagccaatatctggattcattactggtgatcaagctagaaactttttttttcaatctgggttacctcaacctgttttagcacagatatgggcactagctgacatgaataatgatggaagaatggatcaagtggagttttccatagctatgaaacttatcaaactgaagctacaaggatatcagctaccctctgcacttccccctgtcatgaaacagcaaccagttgctatttctagcgcaccagcatttggtatgggaggtatcgccagcatgccaccgcttacagctgttgctccagtgccaatgggatccattccagttgttggaatgtctccaaccctagtatcttctgttcccacagcagctgtgccccccctggctaacggggctccccctgttatacaacctctgcctgcatttgctcatcctgcagccacattgccaaagagttcttcctttagtagatctggtccagggtcacaactaaacactaaattacaaaaggcacagtcatttgatgtggccagtgtcccaccagtggcagagtgggctgttcctcagtcatcaagactgaaatacaggcaattattcaatagtcatgacaaaactatgagtggacacttaacaggtccccaagcaagaactattcttatgcagtcaagtttaccacaggctcagctggcttcaatatggaatctttctgacattgatcaagatggaaaacttacagcagaggaatttatcctggcaatgcacctcattgatgtagctatgtctggccaaccactgccacctgtcctgcctccagaatacattccaccttcttttagaagagttcgatctggcagtggtatatctgtcataagctcaacatctgtagatcagaggctaccagaggaaccagttttagaagatgaacaacaacaattagaaaagaaattacctgtaacgtttgaagataagaagcgggagaactttgaacgtggcaacctggaactggagaaacgaaggcaagctctcctggaacagcagcgcaaggagcaggagcgcctggcccagctggagcgggcggagcaggagaggaaggagcgtgagcgccaggagcaagagcgcaaaagacaactggaactggagaagcaactggaaaagcagcgggagctagaacggcagagagaggaggagaggaggaaagaaattgagaggcgagaggctgcaaaacgggaacttgaaaggcaacgacaacttgagtgggaacggaatcgaaggcaagaactactaaatcaaagaaacaaagaacaagaggacatagttgtactgaaagcaaagaaaaagactttggaatttgaattagaagctctaaatgataaaaagcatcaactagaagggaaacttcaagatatcagatgtcgattgaccacccaaaggcaagaaattgagagcacaaacaaatctagagagttgagaattgccgaaatcacccatctacagcaacaattacaggaatctcagcaaatgcttggaagacttattccagaaaaacagatactcaatgaccaattaaaacaagttcagcagaacagtttgcacagagattcacttgttacacttaaaagagccttagaagcaaaagaactagctcggcagcacctacgagaccaactggatgaagtggagaaagaaactagatcaaaactacaggagattgatattttcaataatcagctgaaggaactaagagaaatacacaataagcaacaactccagaagcaaaagtccatggaggctgaacgactgaaacagaaagaacaagaacgaaagatcatagaattagaaaaacaaaaagaagaagcccaaagacgagctcaggaaagggacaagcagtggctggagcatgtgcagcaggaggacgagcatcagagaccaagaaaactccacgaagaggaaaaactgaaaagggaggagagtgtcaaaaagaaggatggcgaggaaaaaggcaaacaggaagcacaagacaagctgggtcggcttttccatcaacaccaagaaccagctaagccagctgtccaggcaccctggtccactgcagaaaaaggtccacttaccatttctgcacaggaaaatgtaaaagtggtgtattaccgggcactgtacccctttgaatccagaagccatgatgaaatcactatccagccaggagacatagtcatggttaaaggggaatgggtggatgaaagccaaactggagaacccggctggcttggaggagaattaaaaggaaagacagggtggttccctgcaaactatgcagagaaaatcccagaaaatgaggttcccgctccagtgaaaccagtgactgattcaacatctgcccctgcccccaaactggccttgcgtgagacccccgcccctttggcagtaacctcttcagagccctccacgacccctaataactgggccgacttcagctccacgtggcccaccagcacgaatgagaaaccagaaacggataactgggatgcatgggcagcccagccctctctcaccgttccaagtgccggccagttaaggcagaggtccgcctttactccagccacggccactggctcctccccgtctcctgtgctaggccagggtgaaaaggtggaggggctacaagctcaagccctatatccttggagagccaaaaaagacaaccacttaaattttaacaaaaatgatgtcatcaccgtcctggaacagcaagacatgtggtggtttggagaagttcaaggtcagaagggttggttccccaagtcttacgtgaaactcatttcagggcccataaggaagtctacaagcatggattctggttcttcagagagtcctgctagtctaaagcgagtagcctctccagcagccaagccggtcgtttcgggagaagaaattgcccaggttattgcctcatacaccgccaccggccccgagcagctcactctcgcccctggtcagctgattttgatccgaaaaaagaacccaggtggatggtgggaaggagagctgcaagcacgtgggaaaaagcgccagataggctggttcccagctaattatgtaaagcttctaagccctgggacgagcaaaatcactccaacagagccacctaagtcaacagcattagcggcagtgtgccaggtgattgggatgtacgactacaccgcgcagaatgacgatgagctggccttcaacaagggccagatcatcaacgtcctcaacaaggaggaccctgactggtggaaaggagaagtcaatggacaagtggggctcttcccatccaattatgtgaagctgaccacagacatggacccaagccagcaatgaatcatatgttgtccatccccccctcaggcttgaaagtcctcaaagagacccactatcccatatcactgcccagagggatgatgggagatgcagccttgatcatgtgacttccagcatgatcacctactgccttctgagtagaagaactcactgcagagcagtttacctcattttaccttagttgcatgtgatcgcaatgtttgagttattacttgcagagataggagcaaaaattacaaaaacacacagggtagtgggtccttttgtggctttcctagttactcaaattgactttcccccacctt

SEQ ID NO: 323058 - DNA, 3435 bp, Artificial Sequence
  derived and/or modified sequence
atggcccagttccccaccccatttggaggcagcctggacatctgggccatcaccgtggaggagcgggccaagcatgaccagcagttccacagcctgaagcccatcagcggcttcatcaccggggaccaggccaggaacttcttcttccagagcggcctgccccagcctgtgctggcccagatctgggccctggccgacatgaacaatgatggccgcatggaccaggtggagttcagcatcgccatgaagctgatcaagctgaagctgcagggctaccagctgcccagcgccctgccccctgtgatgaagcagcagcctgtggccatcagcagcgccccagccttcggcatgggcggcatcgcctccatgccacccctgacagctgtggcccctgtgcccatgggcagcatccctgtggtgggcatgagccccaccctggtgtcctctgtgcccacagctgctgtgccccccctggccaacggggcccctcctgtgatccagcccctgcctgcctttgcccaccctgctgccaccctgcccaagagcagcagcttcagccgcagcggccctggcagccagctgaacaccaagctgcagaaggcccagagctttgatgtggcctctgtgccccctgtggccgagtgggccgtgccccagagcagccggctgaagtaccggcagctgttcaacagccatgacaagaccatgagcggccacctgaccggcccccaggcccggaccatcctgatgcagagcagcctgccccaggcccagctggccagcatctggaacctgagtgacatcgaccaggacggcaagctgacagctgaggagttcatcctggccatgcacctgattgatgtggccatgagcggccagcccctgccccctgtgctgcccccagagtacatccccccatccttcagaagagtgcgcagcggcagcggcatcagcgtcatcagcagcacctctgtggaccagaggctgcctgaggagcctgtgctggaggatgagcagcagcagctggagaagaagctgcctgtgacctttgaggacaagaagcgggagaactttgagcggggcaacctggagctggagaagaggcggcaggccctgctggagcagcagaggaaggagcaggagcggctggcccagctggagagagctgagcaggagaggaaggagcgggagcggcaggagcaggagaggaagaggcagctggagctggagaagcagctggagaagcagcgggagctggagcggcagcgggaggaggagaggaggaaggagattgaaagaagagaggccgccaagcgggagctggagcggcagaggcagctggagtgggagaggaacagacggcaggagctgctgaaccagaggaacaaggagcaggaggacatcgtggtgctgaaggccaagaagaagaccctggagtttgagctggaggccctgaatgacaagaagcaccagctggagggcaagctgcaggacatccgctgccgcctgaccacccagaggcaggagattgagagcaccaacaagagccgggagctgagaattgctgagatcacccacctgcagcagcagctgcaggagagccagcagatgctgggccgcctcatccctgagaagcagatcctgaatgaccagctgaagcaggtgcagcagaacagcctgcaccgggacagcctggtgaccctgaagagggccctggaggccaaggagctggcccggcagcacctgcgggaccagctggatgaggtggagaaggagaccaggagcaagctgcaggagattgacatcttcaacaaccagctgaaggagctgcgggagatccacaacaagcagcagctgcagaagcagaagtccatggaggccgagcggctgaagcagaaggagcaggagaggaagatcatcgagctggagaagcagaaggaggaggcccagaggcgggcccaggagcgggacaagcagtggctggagcacgtgcagcaggaggatgagcaccagaggcccaggaagctgcacgaggaggagaagctgaagcgggaggagagcgtgaagaagaaggatggagaggagaagggcaagcaggaggcccaggacaagctgggccgcctcttccaccagcaccaggagcccgccaagccagctgtgcaggccccctggagcacagctgagaagggccccctgaccatcagcgcccaggagaatgtgaaggtggtgtactaccgggccctgtacccctttgagagccgcagccatgatgagatcaccatccagcccggggacatcgtgatggtggatgagagccagacaggagagcccggctggctgggcggggagctgaagggcaagacaggctggttccctgccaactatgcagagaagatcccagaaaatgaggtgcctgcccctgtgaagcctgtgacagacagcaccagcgccccagcccccaagctggccctgcgggagaccccagcccccctggccgtgaccagcagcgagcccagcaccacccccaacaactgggccgacttcagcagcacctggcccaccagcaccaatgagaagccagagacagacaactgggatgcctgggccgcccagcccagcctgactgtgcccagcgctggccagctgcggcagaggtctgccttcaccccagccacagccaccggcagcagccccagccctgtgctgggccagggcgagaaggtggagggcctgcaggcccaggccctgtacccctggagggccaagaaggacaaccacctgaacttcaacaagaatgatgtgatcaccgtgctggagcagcaggacatgtggtggtttggagaggtgcagggccagaagggctggttccccaagagctatgtgaagctgatcagcggccccatcaggaagagcacctccatggacagcggcagcagcgagagccctgccagcctgaagagggtggccagccctgctgccaagcctgtggtgtctggagaggagatcgcccaggtgattgccagctacacagccaccggccctgagcagctgaccctggcccctggccagctgatcctgatcaggaagaagaaccctgggggctggtgggagggggagctgcaggcccggggcaagaagaggcagatcggctggttccctgccaactacgtgaagctgctgagccctggcaccagcaagatcacccccacagagccccccaagagcacagccctggccgctgtgtgccaggtgattggcatgtatgactacacagcccagaatgatgatgagctggccttcaacaagggccagatcatcaacgtgctgaacaaggaggaccctgactggtggaagggggaggtgaatggccaggtgggcctcttccccagcaactacgtgaagctgaccacagacatggaccccagccagcagtag

SEQ ID NO: 323059 - DNA, 3450 bp, Artificial Sequence
  derived and/or modified sequence
atggcccagttccccaccccatttggaggcagcctggacatctgggccatcaccgtggaggagcgggccaagcatgaccagcagttccacagcctgaagcccatcagcggcttcatcaccggggaccaggccaggaacttcttcttccagagcggcctgccccagcctgtgctggcccagatctgggccctggccgacatgaacaatgatggccgcatggaccaggtggagttcagcatcgccatgaagctgatcaagctgaagctgcagggctaccagctgcccagcgccctgccccctgtgatgaagcagcagcctgtggccatcagcagcgccccagccttcggcatgggcggcatcgcctccatgccacccctgacagctgtggcccctgtgcccatgggcagcatccctgtggtgggcatgagccccaccctggtgtcctctgtgcccacagctgctgtgccccccctggccaacggggcccctcctgtgatccagcccctgcctgcctttgcccaccctgctgccaccctgcccaagagcagcagcttcagccgcagcggccctggcagccagctgaacaccaagctgcagaaggcccagagctttgatgtggcctctgtgccccctgtggccgagtgggccgtgccccagagcagccggctgaagtaccggcagctgttcaacagccatgacaagaccatgagcggccacctgaccggcccccaggcccggaccatcctgatgcagagcagcctgccccaggcccagctggccagcatctggaacctgagtgacatcgaccaggacggcaagctgacagctgaggagttcatcctggccatgcacctgattgatgtggccatgagcggccagcccctgccccctgtgctgcccccagagtacatccccccatccttcagaagagtgcgcagcggcagcggcatcagcgtcatcagcagcacctctgtggaccagaggctgcctgaggagcctgtgctggaggatgagcagcagcagctggagaagaagctgcctgtgacctttgaggacaagaagcgggagaactttgagcggggcaacctggagctggagaagaggcggcaggccctgctggagcagcagaggaaggagcaggagcggctggcccagctggagagagctgagcaggagaggaaggagcgggagcggcaggagcaggagaggaagaggcagctggagctggagaagcagctggagaagcagcgggagctggagcggcagcgggaggaggagaggaggaaggagattgaaagaagagaggccgccaagcgggagctggagcggcagaggcagctggagtgggagaggaacagacggcaggagctgctgaaccagaggaacaaggagcaggaggacatcgtggtgctgaaggccaagaagaagaccctggagtttgagctggaggccctgaatgacaagaagcaccagctggagggcaagctgcaggacatccgctgccgcctgaccacccagaggcaggagattgagagcaccaacaagagccgggagctgagaattgctgagatcacccacctgcagcagcagctgcaggagagccagcagatgctgggccgcctcatccctgagaagcagatcctgaatgaccagctgaagcaggtgcagcagaacagcctgcaccgggacagcctggtgaccctgaagagggccctggaggccaaggagctggcccggcagcacctgcgggaccagctggatgaggtggagaaggagaccaggagcaagctgcaggagattgacatcttcaacaaccagctgaaggagctgcgggagatccacaacaagcagcagctgcagaagcagaagtccatggaggccgagcggctgaagcagaaggagcaggagaggaagatcatcgagctggagaagcagaaggaggaggcccagaggcgggcccaggagcgggacaagcagtggctggagcacgtgcagcaggaggatgagcaccagaggcccaggaagctgcacgaggaggagaagctgaagcgggaggagagcgtgaagaagaaggatggagaggagaagggcaagcaggaggcccaggacaagctgggccgcctcttccaccagcaccaggagcccgccaagccagctgtgcaggccccctggagcacagctgagaagggccccctgaccatcagcgcccaggagaatgtgaaggtggtgtactaccgggccctgtacccctttgagagccgcagccatgatgagatcaccatccagcccggggacatcgtgatggtgaagggggagtgggtggatgagagccagacaggagagcccggctggctgggcggggagctgaagggcaagacaggctggttccctgccaactatgcagagaagatcccagaaaatgaggtgcctgcccctgtgaagcctgtgacagacagcaccagcgccccagcccccaagctggccctgcgggagaccccagcccccctggccgtgaccagcagcgagcccagcaccacccccaacaactgggccgacttcagcagcacctggcccaccagcaccaatgagaagccagagacagacaactgggatgcctgggccgcccagcccagcctgactgtgcccagcgctggccagctgcggcagaggtctgccttcaccccagccacagccaccggcagcagccccagccctgtgctgggccagggcgagaaggtggagggcctgcaggcccaggccctgtacccctggagggccaagaaggacaaccacctgaacttcaacaagaatgatgtgatcaccgtgctggagcagcaggacatgtggtggtttggagaggtgcagggccagaagggctggttccccaagagctatgtgaagctgatcagcggccccatcaggaagagcacctccatggattctggcagcagcgagagccctgccagcctgaagagggtggccagccctgctgccaagcctgtggtgtctggagaggagatcgcccaggtgattgccagctacacagccactggacctgagcagctgaccctggcccctggccagctgatcctgatcaggaagaagaaccctgggggctggtgggagggggagctgcaggcccggggcaagaagaggcagatcggctggttccctgccaactacgtgaagctgctgagccctggcaccagcaagatcacccccacagagccccccaagagcacagccctggccgctgtgtgccaggtgattggcatgtatgactacacagcccagaatgatgatgagctggccttcaacaagggccagatcatcaacgtgctgaacaaggaggaccctgactggtggaagggggaggtgaatggccaggtgggcctcttccccagcaactacgtgaagctgaccacagacatggaccccagccagcagtag

SEQ ID NO: 323060 - DNA, 3435 bp, Artificial Sequence
  derived and/or modified sequence
atggcccagttccccacccccttcggcggcagcctggacatctgggccattacagtggaagagcgcgcaaagcacgaccaacagtttcactcactgaagcctattagcgggttcatcacgggggaccaggcccgcaacttcttctttcaaagtggccttccacagcccgtcctggctcagatctgggctcttgctgacatgaacaatgacggtcgaatggatcaggttgagttttctattgctatgaaactcattaagttgaaattgcaaggataccagctcccttcagctctgcccccagtaatgaaacaacaacctgttgccattagctctgcgccagctttcggaatgggtggtatagctagcatgccacccctaaccgcggtggcaccagtgcctatgggcagcattcctgtggtgggtatgagtcccacgcttgtgagctcggttccaactgctgcagtacccccattagccaatggggcccctccagtgatccagcccctgccagccttcgcccaccccgccgctaccctgccaaagtccagctctttttcgagaagcgggccaggcagtcagctgaatactaagctccagaaggctcagtcatttgatgtggcaagtgtaccccctgtcgccgagtgggctgtgccccagtccagtagactgaaataccgacagctgttcaactcgcacgacaaaacgatgagcggccatctcacgggccctcaggcccgaaccatactgatgcagagttccctgccacaggcccagctggccagcatatggaacttaagcgacattgatcaagacggcaagctgacggccgaagagtttatcttagctatgcatcttatcgacgtagccatgagcgggcagcccctcccgccagtactccccccggaatacattccccccagtttcaggagggtgcggagtggatcaggaatctccgtaatcagctcaacctccgtggatcaacggttgcctgaggaaccagttctggaggacgagcagcagcagttggagaaaaagctaccggtcactttcgaggacaagaagagagaaaacttcgagagagggaacttggagctggagaagagaaggcaggcactcctggagcagcaacgcaaggagcaggaaaggttggctcagctggagcgtgctgaacaggagcggaaagagcgcgagcgacaggagcaggagcgcaagcgtcagctggaactggaaaagcagttagaaaagcagagagagcttgaaaggcagcgggaagaagaaagacgtaaggaaatcgaacgccgcgaagcagctaagagggagctggagcgtcagagacagctcgagtgggaaaggaacagacgacaggagttactgaaccagcggaacaaagaacaggaggacattgtagtcttgaaggccaagaaaaagacgctggagtttgaattggaggccctgaatgataaaaagcatcagctcgaaggtaaactgcaggatatcaggtgcaggttaactacccagcgccaggagattgagtctacaaataagagtagagagctacgcattgctgaaataactcatttgcagcagcagctgcaggaaagccagcagatgttaggcaggctgattcccgagaaacagattctcaatgatcagttaaagcaggtgcagcagaactccttacacagggacagcctggtcacgcttaaaagagccttagaggccaaggaactggcccgccagcacctgagggatcagcttgatgaggtggagaaagaaactaggtcaaaactgcaggaaattgacatcttcaataaccagcttaaagaactacgcgagattcataataagcagcagctccaaaaacagaagtccatggaagctgagaggctcaagcagaaggagcaggagagaaagattatagaacttgagaaacagaaggaggaggctcagagaagagcccaggagcgtgacaagcagtggcttgaacatgtgcagcaggaggatgaacatcagcgcccccgcaaactgcacgaagaagaaaagcttaaaagggaggaatctgtcaaaaagaaggatggcgaggagaaagggaaacaagaggcccaagacaagttgggccggctcttccatcagcaccaggagccagcgaaacccgccgtacaggctccctggtctaccgccgagaaaggacctctaacaatctcagcccaagagaatgtgaaagtggtctactaccgggcgctctacccatttgaatcccggagccacgacgaaattacaattcagcctggggatatagtgatggtagacgagtctcaaactggtgagcccgggtggctagggggcgagcttaaaggcaagactggctggttcccagccaactatgcggaaaagatcccggagaacgaggtccctgcacctgtcaaaccagtgacagacagcacgagcgcacccgcacccaagttggccctgcgggagaccccggcacctctggccgtcacttctagcgagccatccactacccctaataattgggcggacttctcctctacctggcccactagcacgaacgaaaagcccgagaccgataactgggatgcttgggccgcacagccttcgttgacagtcccctcagctggccagctgcgacaaagaagcgccttcaccccagccacagccactggctcatccccttctcctgtattgggccaaggggagaaagtggaaggcctgcaagctcaggccctttacccttggcgggcgaaaaaagacaatcacttgaacttcaacaagaacgacgtgataaccgttcttgaacagcaggatatgtggtggttcggggaagtgcagggtcagaaaggctggtttcccaaaagctacgtgaagcttatctctggacctattcgcaaaagtacgtctatggactctggcagctccgagtcccccgcgtcattgaagagagttgcctctccggccgccaaaccggtggtaagcggagaagagatcgcgcaggttatagcctcttatacagccactggacccgagcagctgacgctagcccccggtcaactgatactcattcgaaagaagaatcccggtggctggtgggagggtgaactccaagcccgcggtaagaaaagacagatcggctggtttcccgccaactacgtaaaacttttgtctcccggcaccagtaagattacccccactgagccaccgaagtccactgcactcgcggccgtgtgtcaggttatcggcatgtatgactataccgcccagaacgacgatgagctggcattcaataagggccagataattaacgtgttgaacaaggaagacccagactggtggaagggcgaggtcaacgggcaggttggactgttcccatccaactatgttaagttaacgacagatatggaccccagccaacagtag

SEQ ID NO: 323061 - DNA, 3450 bp, Artificial Sequence
  derived and/or modified sequence
atggcccagttccccacccccttcggcggcagcctggacatctgggctatcacagttgaggaaagggcgaaacatgaccagcagtttcattctttgaagcctatcagtgggttcatcaccggggatcaggctaggaatttcttcttccagagcggtctgccccagcccgtgcttgcacaaatctgggcactagccgatatgaataatgacggcaggatggaccaggtggaattctccatagctatgaagctgatcaaactaaaactgcagggataccagctgccgtctgctttgcccccagtcatgaagcagcagccagtcgctataagttcagctcctgcgttcggaatgggggggattgcctcaatgcctccacttactgcagtggcccccgtaccaatggggtccatcccagttgtcggaatgtcccctactttggtgtcctcagttcccacagcagcagtgccccctctggcgaacggggccccccccgtcatccaaccactgcccgctttcgcccacccagcagccaccttacccaagagctcctccttctctcggagcggtcctgggagccagctaaacaccaagctccagaaggcacaaagctttgacgtggcttcagtgccgccagtggcagagtgggccgtccctcagagcagccgcctgaaataccgacagttgttcaactcccatgataagacaatgtccggccacctgacaggacctcaagcgcgcacaatcctcatgcagtcaagtctgcctcaggcccagctcgctagcatatggaacttatccgacatcgaccaggacggtaagctgactgccgaggaattcattctagccatgcatttgattgacgtcgccatgtccggccaacctcttccacccgtgctccctcccgagtacatccccccaagttttcgtagagtaaggtcgggatccggcataagtgtaataagtagtacaagcgtggatcagaggctcccggaggagcccgttctggaggatgagcagcagcagctggaaaaaaagctgcccgtcaccttcgaagacaaaaagagagagaattttgagcgcgggaacctggaactggaaaaaaggcgacaagctctcctggagcaacagagaaaggagcaagagcgtctggctcagttagagagagccgaacaggagcgtaaggagagggagcggcaggagcaggaacgcaagcggcaactggaactggaaaaacagcttgaaaaacaaagggaattggaacggcagagagaggaagagcgtaggaaagagatcgagcgcagagaagccgctaagcgagagctggagcgtcagcgccagttggagtgggaacgcaatcggcggcaagaactcctcaaccagcgcaacaaagaacaggaagacatagtcgtgctgaaggccaaaaagaagacactagaattcgagcttgaagccctgaacgataaaaagcaccagctcgaaggtaagctacaggacatccgatgcaggctcaccacccaacgtcaggagattgaaagtaccaacaagagcagagaactgcggattgctgaaattacccacctgcagcagcagctgcaagaaagtcagcaaatgcttggcagactaatccccgagaagcagatcctgaatgatcaactgaaacaggtccagcagaacagccttcatagagactcgctggtgacactcaagagagcactggaggcaaaagagttggctcggcagcatctcagggatcagctggacgaagttgaaaaggagactaggtccaagctccaagagatcgacattttcaacaaccagctgaaagaactgagggaaatccataacaaacagcagctgcaaaagcagaagagcatggaggccgagaggctgaagcaaaaggaacaggagaggaaaatcatagagctggagaaacaaaaagaggaagcccaacgacgtgcccaggagagggacaagcagtggcttgagcacgtgcaacaagaggacgaacaccaaagaccccggaaactccatgaagaggagaagctgaaaagggaagaatccgtcaagaagaaagacggagaggaaaaaggtaaacaagaggcccaggataaacttggacggctgtttcatcagcaccaggaacctgccaaacccgccgtacaggctccttggagtaccgctgagaagggacctctcaccatttctgcacaggagaacgtgaaagtagtgtattaccgcgcgctgtatccattcgaatctcgctctcatgatgaaatcaccatccagccaggtgacatcgttatggttaagggtgaatgggttgatgaaagccagactggggagcccggctggctgggaggggagctaaaaggcaagaccggatggtttcccgctaattacgcagagaagatcccagaaaacgaggttccagcaccggtgaaaccagtgaccgactctacatcagctccggccccaaaactcgccctcagagaaacccctgcgccccttgctgtgacttcctcggagcctagcactacacccaataattgggctgacttttccagtacatggcctaccagcaccaacgaaaaaccagagaccgataattgggacgcctgggcagcccagcccagcttaaccgtcccgagcgccggccagctgaggcagaggagtgccttcacacctgcgaccgctacgggctccagccctagtcccgtcctgggtcagggagagaaggtcgagggccttcaggcacaagccctgtacccttggcgggcaaagaaagacaatcacttgaattttaacaaaaatgacgtaatcaccgtgctagagcagcaggacatgtggtggttcggggaagtccagggccagaaggggtggtttcctaaatcgtacgtgaagctgatctccggcccaatcaggaaatcaacttcgatggactcgggatcttcagaaagtcccgcctctcttaaacgagtcgcatcacccgcggcgaaacctgtggtatctggggaagagatagctcaggttatcgccagctataccgctaccgggcccgaacagttaaccttagccccaggacagctgatcctgatccgaaagaagaatccaggtggctggtgggagggcgaacttcaagctcggggcaagaaaaggcaaatcggctggttccccgctaactatgtaaagctgctctctcctggcacttccaagatcactcccaccgagcctcctaagagcactgcattggccgccgtttgtcaggtgatcggcatgtatgactacactgctcagaatgacgacgagctggcatttaacaagggacagataattaatgtgttaaacaaggaagaccccgattggtggaagggggaggtaaacgggcaagtaggtctgtttcccagcaactacgtgaagctgaccactgacatggacccgtctcagcagtag

SEQ ID NO: 323062 - DNA, 3435 bp, Artificial Sequence
  derived and/or modified sequence
atggcccaatttcccaccccctttgggggaagcttggatatctgggccataacagtcgaggaacgggctaagcacgatcaacagtttcacagtctaaaaccaatcagcggctttattacaggcgatcaggcgcgaaattttttctttcagtctgggctgccgcagcccgtgctcgcacagatttgggcgctcgccgatatgaataacgacggccgaatggaccaggtggagttttccatcgcgatgaagctgatcaaacttaaactgcaggggtatcaactcccgtccgccttgccccctgtgatgaagcagcagccagtggcaatcagttccgcacccgcttttggtatgggcggtattgcatcaatgccacccctaactgccgttgcccctgtgcccatgggaagcatccccgtcgtgggcatgtctcccacgctggtgtcgagcgtgcctaccgcggctgtgccaccacttgctaatggtgccccaccagtgatccagcccttgccggcattcgcacaccccgctgcaacgttgccgaagagctccagtttctcaagaagtggcccaggtagccagctcaacacaaaactgcagaaggcacagagttttgacgttgcatcagtgccccctgtcgccgaatgggcggttcctcaatcttcccgactgaagtaccgtcagctgttcaattcccacgacaaaaccatgtccggtcatcttactggaccccaggccagaacaatcttaatgcagtcatcccttccgcaggcccagctcgctagtatttggaatctctctgacattgatcaagacgggaagctgaccgctgaggagttcatactcgctatgcacttgattgacgtggcgatgtccgggcagcctctccccccagtgcttccaccagagtacattccaccttcctttaggcgggtaaggtccgggagtggcatttcggtgatctcctcgacgtccgtcgatcagcggttacctgaagaacccgtgctcgaagacgaacaacagcaacttgaaaagaaattgccggttacctttgaggacaaaaagcgggaaaactttgagaggggcaacctcgaactggagaagaggcgtcaggcactcctcgagcagcagcgcaaggagcaagagagactggcccagctcgagcgagccgagcaggagagaaaagagcgcgaacgtcaggagcaggaaagaaaacgccaactggaactcgaaaagcagcttgagaaacagcgggaactcgagcgacagagagaggaggaacgtcgcaaagaaattgaacggcgagaagccgctaagagagagctggagagacaacggcagctcgagtgggagcgaaaccgaaggcaagaactgctcaaccagaggaataaggagcaggaggacatcgtggtcttgaaagctaaaaaaaagacgctggaatttgagttggaagccctcaatgataagaagcaccagctcgaagggaagctgcaagacatcaggtgccggctgacaacccaacggcaggaaattgaatctactaacaagtcgagggaactccgcattgcagagattacacaccttcaacagcagctgcaggagtctcagcagatgcttggcaggctcatcccagaaaagcaaattcttaatgatcagctaaagcaagttcaacagaacagtttgcacagagactcactggtcaccctcaagcgggcacttgaggccaaagaactggcgagacagcacctgcgggaccaactggacgaggtggaaaaggagacccgcagcaagttacaggaaattgatattttcaataatcaacttaaggagttaagggagatccacaataaacagcagctgcagaagcagaaatcaatggaagctgaacggctgaagcagaaagagcaagaacgcaagatcatcgaactcgaaaagcagaaagaggaggcccagcgacgagctcaagaacgagacaaacagtggttggagcacgtacagcaggaagacgagcatcaacggcctaggaaactccacgaggaggagaagctgaagagagaggaaagtgttaagaaaaaagatggcgaggagaaaggtaagcaagaggcacaggataaattaggtcgattgttccaccaacaccaagaaccagccaaaccggcagtccaagcaccttggagtactgcagaaaaaggccctctgaccatcagcgcccaagaaaacgttaaagtggtttattatagggccctgtaccccttcgagtcacgctcccatgacgaaatcaccatccagccgggagacatcgttatggtcgacgagtcacagaccggagaaccagggtggctgggcggtgagctgaagggaaagaccggatggttccctgctaactacgcagagaagatccccgagaatgaggttccagctcctgtcaaaccggtgacagactctaccagcgccccagcacccaagctggccctgagggagacacctgctcctcttgcagtgactagttcagagccttcgactacaccgaacaattgggccgacttttcttctacgtggcctacctccacaaatgaaaagcctgagacggacaactgggatgcgtgggcagctcaaccttctctcaccgtaccttccgctggtcagctgcgccagaggtctgcgtttaccccagcaactgccaccggatctagcccgagcccggtgcttggtcagggcgaaaaagtagagggcctccaggcccaggcgctctacccgtggagggcaaagaaggataatcacctgaattttaataagaacgacgtgattacagttcttgaacagcaggatatgtggtggtttggcgaagtgcaggggcagaaagggtggtttcctaagtcatatgtcaagctgatttctggacctattcgaaagtccacctctatggactccgggtcaagtgagagccccgcttctttgaagcgagtcgccagccccgctgccaagccagtagtgagtggagaggaaatagcccaggtcatcgccagttacactgctaccgggcctgaacagttaacacttgcacccggacagcttatactcattcgaaagaaaaatccgggtggttggtgggagggggagctgcaagcacgtggaaagaagcgtcagattgggtggtttcccgctaattacgtgaaacttttgtcccctggaacatctaagatcacccccacagaaccacctaagtccacagcgctcgcggcagtctgccaggttatcggcatgtatgactataccgctcagaacgacgacgagctcgccttcaacaaggggcagataatcaacgtcctcaacaaagaggaccctgattggtggaagggagaggttaacggacaggttgggcttttcccatccaactatgtaaaactgaccaccgatatggacccctctcaacagtag

SEQ ID NO: 323063 - DNA, 3450 bp, Artificial Sequence
  derived and/or modified sequence
atggcccaatttcccaccccgtttggtggaagcctggacatatgggccattactgtggaagaaagggccaaacatgatcagcaatttcactctctgaagccaatttctggctttatcaccggcgaccaggcccgaaattttttctttcagagcggcttaccgcaacctgtccttgcccaaatatgggcactggccgacatgaataatgacggaaggatggaccaggttgagtttagcatcgcaatgaaactgatcaagttaaaactccagggatatcagttgccttcagccctcccacccgtgatgaaacaacagcctgtcgccattagctcagctcctgcttttggaatggggggaatcgcttcgatgccacccctcaccgcagtggccccagtcccaatggggtcaattcccgtagttggcatgtccccaacgttagtcagcagtgtcccaaccgcagccgtccccccattagccaatggagcacctcccgtaattcaaccacttcctgcctttgcccaccccgcagcaaccctccctaaatccagttcattctcccggtcaggtccaggctcccagttgaataccaagctgcaaaaggcacaatccttcgacgtggcctctgtgccacctgtagcggagtgggccgtcccccagagtagtaggttgaagtatcggcagctttttaattcccacgataagactatgtctggacacctcacagggccacaggctcggacaatcttgatgcagtctagtctgccccaggcccagctcgcttctatttggaatttatccgacattgaccaggatggcaaacttacagctgaggagttcatactggcgatgcatctcattgatgtagcaatgagtggacaacccttgcccccagtgttgccaccagaatacataccaccttcctttcggagggtgagaagcggcagcggaatctccgttatctcaagtacgtccgttgaccagcgtctcccagaggagcccgttctggaggacgagcagcagcagttggaaaaaaagttgcccgtgactttcgaggacaagaaacgggagaactttgaaaggggaaatctggagctcgagaaaaggcgccaagctttgctcgaacagcagcgcaaagagcaagagaggcttgcccagttagaacgcgcagagcaggagaggaaggagagagaacgccaagagcaagagcggaagcgccagctggaattagagaaacagctcgaaaaacagagagagctggagcggcaacgcgaggaggaacgacgcaaagaaattgagcgacgcgaagccgctaagagggagctggagcgacagagacagctggagtgggagcggaatagaagacaggagctcctcaaccaacgcaataaagagcaagaagacattgtggtccttaaagccaaaaagaagaccttggaatttgagttggaggctcttaacgataaaaagcaccaactggagggaaaactccaggatatccgatgtagacttacgacacagaggcaggagattgagagtacaaacaagagtcgtgagctcagaatcgcagaaatcacacacctgcagcagcaactccaggaatcccaacagatgctgggacggcttattcccgaaaagcaaatccttaacgaccagctaaagcaggtacagcagaattcactccacagggattcactggtgactcttaagcgggctctcgaagccaaggagttggcacgtcagcacctgcgggaccagttggacgaggttgagaaagaaacgagatctaaactgcaggaaatcgatattttcaataaccagcttaaggagctccgcgagattcacaacaagcaacaactacagaaacagaaatcaatggaagcagagcgactcaagcaaaaagaacaggagaggaagattatcgaacttgagaagcaaaaagaggaagcacagcgacgcgcacaggagagggacaagcagtggctagaacacgttcaacaggaggacgaacatcagcgtcctaggaaacttcatgaagaagagaagctcaagagagaggaaagtgtcaagaaaaaagacggcgaagagaaaggaaaacaagaggcgcaggacaagctgggacggctgtttcaccaacaccaggaacccgcaaaaccagcggtccaggcgccttggagcacagccgaaaagggccctctgactatatcagcgcaggaaaacgttaaggttgtgtattaccgggcactctacccctttgagagcagatcacatgatgaaattaccattcagccaggggatatcgtgatggtcaaaggcgagtgggtggacgaatcccagactggcgaacccggttggctgggaggggagctgaaaggaaaaaccggctggtttccggcaaattacgccgagaaaatccccgagaatgaagttcctgctccagtgaagcctgtaaccgattctacctcagctccagcaccaaagttagccttaagagaaactcccgctcctctggccgtgacatcctcagagccgtctacaactccaaacaattgggccgacttttcaagcacatggcctacgtccacaaatgagaaaccggaaacagataactgggatgcctgggctgcccagccttcattaaccgtaccatccgccggacaattgcgtcaacggagcgccttcacccctgccacagccacaggcagctcccctagccccgtattgggacagggggagaaggtggaggggctgcaggcccaagcgctttatccctggcgagccaaaaaagacaaccacctcaatttcaataagaatgacgttataacggttctcgagcagcaggatatgtggtggttcggggaagtgcagggtcaaaagggttggtttcctaagagctacgtaaagctgatttcaggccctatccgcaagagtacaagtatggattccggaagctccgagtcacccgcatccctgaaaagagttgcttctccggctgcaaaacccgtggtcagtggggaagaaattgcccaggtcatagcgtcatacacagctaccggccctgagcagctcacattagctcctggacagctaatcctaatacggaagaaaaaccccggaggttggtgggaaggcgagctgcaagcgagaggcaagaagcgtcagatcgggtggtttcccgcaaattacgtaaaactgctgagccccggaacaagcaaaattacccctacagagcctccaaaaagtaccgcccttgcggctgtgtgccaggtgattggcatgtacgactatacagcccagaacgatgacgagctggcctttaacaagggtcagattataaacgttctgaacaaagaggatccagattggtggaaaggggaggtcaacggacaggttggtctattcccatcaaattacgttaagctgacaaccgacatggacccctcccagcagtag

SEQ ID NO: 323064 - DNA, 3435 bp, Artificial Sequence
  derived and/or modified sequence
atggcccagttccccacccccttcggcggcagcctggacatctgggccatcaccgtggaggagagagccaagcacgaccagcagttccacagcctgaagcccatcagcggcttcatcaccggcgaccaggccagaaacttcttcttccagagcggcctgccccagcccgtgctggcccagatctgggccctggccgacatgaacaacgacggcagaatggaccaggtggagttcagcatcgccatgaagctgatcaagctgaagctgcagggctaccagctgcccagcgccctgccccccgtgatgaagcagcagcccgtggccatcagcagcgcccccgccttcggcatgggcggcatcgccagcatgccccccctgaccgccgtggcccccgtgcccatgggcagcatccccgtggtgggcatgagccccaccctggtgagcagcgtgcccaccgccgccgtgccccccctggccaacggcgccccccccgtgatccagcccctgcccgccttcgcccaccccgccgccaccctgcccaagagcagcagcttcagcagaagcggccccggcagccagctgaacaccaagctgcagaaggcccagagcttcgacgtggccagcgtgccccccgtggccgagtgggccgtgccccagagcagcagactgaagtacagacagctgttcaacagccacgacaagaccatgagcggccacctgaccggcccccaggccagaaccatcctgatgcagagcagcctgccccaggcccagctggccagcatctggaacctgagcgacatcgaccaggacggcaagctgaccgccgaggagttcatcctggccatgcacctgatcgacgtggccatgagcggccagcccctgccccccgtgctgccccccgagtacatcccccccagcttcagaagagtgagaagcggcagcggcatcagcgtgatcagcagcaccagcgtggaccagagactgcccgaggagcccgtgctggaggacgagcagcagcagctggagaagaagctgcccgtgaccttcgaggacaagaagagagagaacttcgagagaggcaacctggagctggagaagagaagacaggccctgctggagcagcagagaaaggagcaggagagactggcccagctggagagagccgagcaggagagaaaggagagagagagacaggagcaggagagaaagagacagctggagctggagaagcagctggagaagcagagagagctggagagacagagagaggaggagagaagaaaggagatcgagagaagagaggccgccaagagagagctggagagacagagacagctggagtgggagagaaacagaagacaggagctgctgaaccagagaaacaaggagcaggaggacatcgtggtgctgaaggccaagaagaagaccctggagttcgagctggaggccctgaacgacaagaagcaccagctggagggcaagctgcaggacatcagatgcagactgaccacccagagacaggagatcgagagcaccaacaagagcagagagctgagaatcgccgagatcacccacctgcagcagcagctgcaggagagccagcagatgctgggcagactgatccccgagaagcagatcctgaacgaccagctgaagcaggtgcagcagaacagcctgcacagagacagcctggtgaccctgaagagagccctggaggccaaggagctggccagacagcacctgagagaccagctggacgaggtggagaaggagaccagaagcaagctgcaggagatcgacatcttcaacaaccagctgaaggagctgagagagatccacaacaagcagcagctgcagaagcagaagagcatggaggccgagagactgaagcagaaggagcaggagagaaagatcatcgagctggagaagcagaaggaggaggcccagagaagagcccaggagagagacaagcagtggctggagcacgtgcagcaggaggacgagcaccagagacccagaaagctgcacgaggaggagaagctgaagagagaggagagcgtgaagaagaaggacggcgaggagaagggcaagcaggaggcccaggacaagctgggcagactgttccaccagcaccaggagcccgccaagcccgccgtgcaggccccctggagcaccgccgagaagggccccctgaccatcagcgcccaggagaacgtgaaggtggtgtactacagagccctgtaccccttcgagagcagaagccacgacgagatcaccatccagcccggcgacatcgtgatggtggacgagagccagaccggcgagcccggctggctgggcggcgagctgaagggcaagaccggctggttccccgccaactacgccgagaagatccccgagaacgaggtgcccgcccccgtgaagcccgtgaccgacagcaccagcgcccccgcccccaagctggccctgagagagacccccgcccccctggccgtgaccagcagcgagcccagcaccacccccaacaactgggccgacttcagcagcacctggcccaccagcaccaacgagaagcccgagaccgacaactgggacgcctgggccgcccagcccagcctgaccgtgcccagcgccggccagctgagacagagaagcgccttcacccccgccaccgccaccggcagcagccccagccccgtgctgggccagggcgagaaggtggagggcctgcaggcccaggccctgtacccctggagagccaagaaggacaaccacctgaacttcaacaagaacgacgtgatcaccgtgctggagcagcaggacatgtggtggttcggcgaggtgcagggccagaagggctggttccccaagagctacgtgaagctgatcagcggccccatcagaaagagcaccagcatggacagcggcagcagcgagagccccgccagcctgaagagagtggccagccccgccgccaagcccgtggtgagcggcgaggagatcgcccaggtgatcgccagctacaccgccaccggccccgagcagctgaccctggcccccggccagctgatcctgatcagaaagaagaaccccggcggctggtgggagggcgagctgcaggccagaggcaagaagagacagatcggctggttccccgccaactacgtgaagctgctgagccccggcaccagcaagatcacccccaccgagccccccaagagcaccgccctggccgccgtgtgccaggtgatcggcatgtacgactacaccgcccagaacgacgacgagctggccttcaacaagggccagatcatcaacgtgctgaacaaggaggaccccgactggtggaagggcgaggtgaacggccaggtgggcctgttccccagcaactacgtgaagctgaccaccgacatggaccccagccagcagtag

SEQ ID NO: 323065 - DNA, 3450 bp, Artificial Sequence
  derived and/or modified sequence
atggcccagttccccacccccttcggcggcagcctggacatctgggccatcaccgtggaggagagagccaagcacgaccagcagttccacagcctgaagcccatcagcggcttcatcaccggcgaccaggccagaaacttcttcttccagagcggcctgccccagcccgtgctggcccagatctgggccctggccgacatgaacaacgacggcagaatggaccaggtggagttcagcatcgccatgaagctgatcaagctgaagctgcagggctaccagctgcccagcgccctgccccccgtgatgaagcagcagcccgtggccatcagcagcgcccccgccttcggcatgggcggcatcgccagcatgccccccctgaccgccgtggcccccgtgcccatgggcagcatccccgtggtgggcatgagccccaccctggtgagcagcgtgcccaccgccgccgtgccccccctggccaacggcgccccccccgtgatccagcccctgcccgccttcgcccaccccgccgccaccctgcccaagagcagcagcttcagcagaagcggccccggcagccagctgaacaccaagctgcagaaggcccagagcttcgacgtggccagcgtgccccccgtggccgagtgggccgtgccccagagcagcagactgaagtacagacagctgttcaacagccacgacaagaccatgagcggccacctgaccggcccccaggccagaaccatcctgatgcagagcagcctgccccaggcccagctggccagcatctggaacctgagcgacatcgaccaggacggcaagctgaccgccgaggagttcatcctggccatgcacctgatcgacgtggccatgagcggccagcccctgccccccgtgctgccccccgagtacatcccccccagcttcagaagagtgagaagcggcagcggcatcagcgtgatcagcagcaccagcgtggaccagagactgcccgaggagcccgtgctggaggacgagcagcagcagctggagaagaagctgcccgtgaccttcgaggacaagaagagagagaacttcgagagaggcaacctggagctggagaagagaagacaggccctgctggagcagcagagaaaggagcaggagagactggcccagctggagagagccgagcaggagagaaaggagagagagagacaggagcaggagagaaagagacagctggagctggagaagcagctggagaagcagagagagctggagagacagagagaggaggagagaagaaaggagatcgagagaagagaggccgccaagagagagctggagagacagagacagctggagtgggagagaaacagaagacaggagctgctgaaccagagaaacaaggagcaggaggacatcgtggtgctgaaggccaagaagaagaccctggagttcgagctggaggccctgaacgacaagaagcaccagctggagggcaagctgcaggacatcagatgcagactgaccacccagagacaggagatcgagagcaccaacaagagcagagagctgagaatcgccgagatcacccacctgcagcagcagctgcaggagagccagcagatgctgggcagactgatccccgagaagcagatcctgaacgaccagctgaagcaggtgcagcagaacagcctgcacagagacagcctggtgaccctgaagagagccctggaggccaaggagctggccagacagcacctgagagaccagctggacgaggtggagaaggagaccagaagcaagctgcaggagatcgacatcttcaacaaccagctgaaggagctgagagagatccacaacaagcagcagctgcagaagcagaagagcatggaggccgagagactgaagcagaaggagcaggagagaaagatcatcgagctggagaagcagaaggaggaggcccagagaagagcccaggagagagacaagcagtggctggagcacgtgcagcaggaggacgagcaccagagacccagaaagctgcacgaggaggagaagctgaagagagaggagagcgtgaagaagaaggacggcgaggagaagggcaagcaggaggcccaggacaagctgggcagactgttccaccagcaccaggagcccgccaagcccgccgtgcaggccccctggagcaccgccgagaagggccccctgaccatcagcgcccaggagaacgtgaaggtggtgtactacagagccctgtaccccttcgagagcagaagccacgacgagatcaccatccagcccggcgacatcgtgatggtgaagggcgagtgggtggacgagagccagaccggcgagcccggctggctgggcggcgagctgaagggcaagaccggctggttccccgccaactacgccgagaagatccccgagaacgaggtgcccgcccccgtgaagcccgtgaccgacagcaccagcgcccccgcccccaagctggccctgagagagacccccgcccccctggccgtgaccagcagcgagcccagcaccacccccaacaactgggccgacttcagcagcacctggcccaccagcaccaacgagaagcccgagaccgacaactgggacgcctgggccgcccagcccagcctgaccgtgcccagcgccggccagctgagacagagaagcgccttcacccccgccaccgccaccggcagcagccccagccccgtgctgggccagggcgagaaggtggagggcctgcaggcccaggccctgtacccctggagagccaagaaggacaaccacctgaacttcaacaagaacgacgtgatcaccgtgctggagcagcaggacatgtggtggttcggcgaggtgcagggccagaagggctggttccccaagagctacgtgaagctgatcagcggccccatcagaaagagcaccagcatggacagcggcagcagcgagagccccgccagcctgaagagagtggccagccccgccgccaagcccgtggtgagcggcgaggagatcgcccaggtgatcgccagctacaccgccaccggccccgagcagctgaccctggcccccggccagctgatcctgatcagaaagaagaaccccggcggctggtgggagggcgagctgcaggccagaggcaagaagagacagatcggctggttccccgccaactacgtgaagctgctgagccccggcaccagcaagatcacccccaccgagccccccaagagcaccgccctggccgccgtgtgccaggtgatcggcatgtacgactacaccgcccagaacgacgacgagctggccttcaacaagggccagatcatcaacgtgctgaacaaggaggaccccgactggtggaagggcgaggtgaacggccaggtgggcctgttccccagcaactacgtgaagctgaccaccgacatggaccccagccagcagtag

SEQ ID NO: 323066 - protein, 914 aa, Artificial Sequence
  derived and/or modified sequence
MAQFPTPFGGSLDIWAITVEERAKHDQQFHSLKPISGFITGDQARNFFFQSGLPQPVLAQIWALADMNNDGRMDQVEFSIAMKLIKLKLQGYQLPSALPPVMKQQPVAISSAPAFGMGGIASMPPLTAVAPVPMGSIPVVGMSPTLVSSVPTAAVPPLANGAPPVIQPLPAFAHPAATLPKSSSFSRSGPGSQLNTKLQKAQSFDVASVPPVAEWAVPQSSRLKYRQLFNSHDKTMSGHLTGPQARTILMQSSLPQAQLASIWNLSDIDQDGKLTAEEFILAMHLIDVAMSGQPLPPVLPPEYIPPSFRRVRSGSGISVISSTSVDQRLPEEPVLEDEQQQLEKKLPVTFEDKKRENFERGNLELEKRRQALLEQQRKEQERLAQLERAEQERKERERQEQERKRQLELEKQLEKQRELERQREEERRKEIERREAAKRELERQRQLEWERNRRQELLNQRNKEQEDIVVLKAKKKTLEFELEALNDKKHQLEGKLQDIRCRLTTQRQEIESTNKSRELRIAEITHLQQQLQESQQMLGRLIPEKQILNDQLKQVQQNSLHRDSLVTLKRALEAKELARQHLRDQLDEVEKETRSKLQEIDIFNNQLKELREIHNKQQLQKQKSMEAERLKQKEQERKIIELEKQKEEAQRRAQERDKQWLEHVQQEDEHQRPRKLHEEEKLKREESVKKKDGEEKGKQEAQDKLGRLFHQHQEPAKPAVQAPWSTAEKGPLTISAQENVKVVYYRALYPFESRSHDEITIQPGDIVMVDESQTGEPGWLGGELKGKTGWFPANYAEKIPENEVPAPVKPVTDSTSAPAPKLALRETPAPLAVTSSEPSTTPNNWADFSSTWPTSTNEKPETDNWDAWAAQPSLTVPSAGQLRQRSAFTPATATGSSPSPVLGQHGFWFFRESC

SEQ ID NO: 323067 - protein, 1020 aa, Artificial Sequence
  derived and/or modified sequence
MAQFPTPFGGSLDIWAITVEERAKHDQQFHSLKPISGFITGDQARNFFFQSGLPQPVLAQIWALADMNNDGRMDQVEFSIAMKLIKLKLQGYQLPSALPPVMKQQPVAISSAPAFGMGGIASMPPLTAVAPVPMGSIPVVGMSPTLVSSVPTAAVPPLANGAPPVIQPLPAFAHPAATLPKSSSFSRSGPGSQLNTKLQKAQSFDVASVPPVAEWAVPQSSRLKYRQLFNSHDKTMSGHLTGPQARTILMQSSLPQAQLASIWNLSDIDQDGKLTAEEFILAMHLIDVAMSGQPLPPVLPPEYIPPSFRRVRSGSGISVISSTSVDQRLPEEPVLEDEQQQLEKKLPVTFEDKKRENFERGNLELEKRRQALLEQQRKEQERLAQLERAEQERKERERQEQERKRQLELEKQLEKQRELERQREEERRKEIERREAAKRELERQRQLEWERNRRQELLNQRNKEQEDIVVLKAKKKTLEFELEALNDKKHQLEGKLQDIRCRLTTQRQEIESTNKSRELRIAEITHLQQQLQESQQMLGRLIPEKQILNDQLKQVQQNSLHRDSLVTLKRALEAKELARQHLRDQLDEVEKETRSKLQEIDIFNNQLKELREIHNKQQLQKQKSMEAERLKQKEQERKIIELEKQKEEAQRRAQERDKQWLEHVQQEDEHQRPRKLHEEEKLKREESVKKKDGEEKGKQEAQDKLGRLFHQHQEPAKPAVQAPWSTAEKGPLTISAQENVKVVYYRALYPFESRSHDEITIQPGDIVMVDESQTGEPGWLGGELKGKTGWFPANYAEKIPENEVPAPVKPVTDSTSAPAPKLALRETPAPLAVTSSEPSTTPNNWADFSSTWPTSTNEKPETDNWDAWAAQPSLTVPSAGQLRQRSAFTPATATGSSPSPVLGQPDFLLHPSMRLGHMQPRIVLLFPDPLQCSTSRLLPMLRPRPGVPFLRSPSCQSPSHPSRPISDAAPSVKFTLMPPGRIHPCFLFIPAVNSRNSFLVYFILPGGTLGCFYLCLPHYL

SEQ ID NO: 323068 - protein, 78 aa, Artificial Sequence
  derived and/or modified sequence
MAQFPTPFGGSLDIWAITVEERAKHDQQFHSLKPISGFITGDQARNFFFQSGLPQPVLAQIWALADMNNDGRMDQVEF

SEQ ID NO: 323069 - DNA, 2745 bp, Artificial Sequence
  derived and/or modified sequence
atggcccaatttcctaccccgttcgggggcagtctggacatctgggctattacagtggaagagagggccaaacatgatcaacaattccactctttgaagccgatatctggatttattaccggagaccaggcccgcaatttcttctttcagtccggcttgccacagccggtgctcgcccagatctgggcactcgctgacatgaacaatgatggaaggatggaccaggtcgagtttagtatagctatgaagctgatcaaattaaaactgcagggataccagctcccctctgcccttccccccgttatgaagcagcaaccagtggctatatctagcgctcccgcattcgggatgggcgggatcgctagtatgccgccactgacagccgtcgccccagtgcccatggggtctatcccagtggtggggatgagccctaccttggtttcctcagtccccacagccgccgtgccccctctcgccaacggagcaccccccgtcatccaacctttgcccgcttttgcccacccagctgcgactctgcctaaatcaagcagcttctcccggtctggcccaggctcccagctgaacaccaagctgcagaaggcccaaagctttgatgtcgcaagcgtgccccctgtggcagaatgggccgtgccccagagcagcaggttgaagtacaggcagctcttcaactcccacgacaagacaatgtctggtcatctcacagggccccaagcaaggacaatcctgatgcaatcttccctgccacaagcccaattggctagtatttggaacttgtcagacatcgatcaggatggtaagctcaccgccgaggaattcatcctcgcaatgcacctgattgacgtggccatgtcaggccaacccctgccgcctgtgctcccacctgagtatattcctccctcctttcgccgcgtaaggagcggatcaggcattagcgtcattagtagcacgagcgtggaccaacgcctcccagaagagcccgtgctggaagatgaacagcagcaactcgaaaagaaactgcctgtgacttttgaggacaaaaaacgagagaatttcgaacgcggaaacctcgagctggaaaagcgccgtcaggctctgctggagcagcaaagaaaggaacaggaacgtttggcccagctcgaacgggccgagcaagagcggaaagaacgagagagacaagagcaggaaaggaaaagacagcttgagctggagaagcagctggagaaacaacgtgagttagaacggcagagggaagaggaacggaggaaggagattgagcggcgagaggcagctaagcgcgaactagagaggcagaggcagctggagtgggagaggaatcggcgccaggagctcctcaaccagagaaacaaagaacaggaagatatcgttgtactgaaggccaagaaaaaaacgctggaattcgagctggaagcactgaacgacaaaaagcatcagctggaggggaaactgcaggatattaggtgtcggctcactacccagcgtcaggaaattgagagcaccaataaaagtagggagttgcggatcgctgagattactcacctccagcaacagctgcaagaaagtcagcagatgctggggagactcatcccagagaagcaaattctgaacgaccagttgaaacaggtacagcagaattcactccatcgagattcgcttgtcacattaaagagggccctcgaagccaaagaactcgcccgtcagcacttgagggatcagctggacgaggtagagaaggagacccgttccaaactccaggagatcgacattttcaacaaccagctcaaggagttacgcgagattcataataaacaacaactccagaaacaaaaatcgatggaggcggagagactcaaacagaaagagcaagaacggaagataatcgagctagagaagcagaaggaggaagcccagagacgagctcaggagagggacaaacagtggctggaacacgtccaacaggaggacgaacaccaacgtccgagaaaactgcatgaagaagaaaaactgaaaagggaggagagtgtcaagaaaaaggacggcgaagagaagggtaagcaagaagctcaggacaagcttggacgattatttcaccaacaccaggaacccgcaaagccggccgtgcaagccccctggagcaccgcagaaaagggacctctcaccatcagcgcccaggagaacgtaaaagtcgtctattaccgagctttgtatcccttcgagtcccgcagtcatgatgagatcaccatccagccaggggatatcgtcatggtcgacgagtcgcagacaggcgagccgggatggctcggtggcgaactgaaaggaaagactgggtggtttccagctaactatgcagagaagatccccgaaaacgaggtgcctgcacctgtcaagcccgtcaccgattcgaccagtgccccagcgccaaagctggcccttagagagacgccagcccctctggcagtgacctccagcgagccgtccaccacacctaataactgggccgattttagcagcacttggcccacttcgaccaacgaaaaaccggaaaccgataattgggacgcgtgggctgcacaaccctccctgacagtcccatcagctggacagctgcgacaaagatccgcatttacccctgccacggctaccgggtcgagcccttcacccgtactgggtcaacacggtttctggttctttagggagagctgctag

SEQ ID NO: 323070 - DNA, 3063 bp, Artificial Sequence
  derived and/or modified sequence
atggctcaatttcccaccccattcggaggatctctagatatctgggcaataaccgtggaagagcgtgccaaacatgatcaacagttccactctctgaagccgataagcggctttattaccggagatcaggcgcggaatttttttttccagtctggcctcccgcagccagtgctggcgcagatatgggccttggccgacatgaataatgatgggcggatggaccaggttgagttttctattgccatgaaactcattaaacttaaacttcaaggttatcagctgccttctgccctccctcccgtgatgaagcagcagccagtcgccataagcagtgcacctgcctttggcatgggaggtattgcatcaatgcccccactgaccgctgttgcacctgttcccatgggtagcattcctgtggtgggaatgtcgccaactctggtaagctccgtgcctacagccgccgtacccccactggctaatggtgcacctcctgtcattcagccccttcctgccttcgcccaccctgccgccaccttgcctaagtctagttcattcagtagaagcggccccggatcccagctgaatacaaaactgcagaaagctcagagcttcgacgtggcctcagtaccgcccgtagcagaatgggcagtcccccagtcatcccgcttgaaatatcggcagttgttcaacagtcatgataagaccatgtcaggtcaccttactggccctcaggcaaggacgatcctgatgcagagtagcctcccccaggcccagctcgcgagtatttggaatctcagtgatattgaccaggacgggaagctcacggctgaggagtttatcctggccatgcatctgattgatgtggccatgtcaggacagccgcttcctcctgtgctccctcctgagtatatacctccatccttccgtcgggtgcggtcaggctctggcatctctgtgatttcttctacctccgtggatcagaggcttcccgaggagcctgtactggaggatgagcaacagcagttggagaaaaagctccccgtgacgtttgaggacaagaaaagggagaactttgagagagggaatctggaactggagaagaggaggcaagcgcttttagaacagcagcgtaaggaacaagagcgcctggctcagttagagagagcagaacaggagcgtaaagaaagagagaggcaggagcaggagcgaaagaggcagctggaattagaaaagcaactcgagaagcagagagagctggaacgccagagagaagaagaacgaaggaaggagatcgagcggagagaagcagcgaagagagagctggaaaggcaaagacagttagaatgggagcggaatcgcagacaggaattgctgaatcagcgcaacaaagaacaagaggatatagtggtgcttaaggctaagaagaagaccctggagtttgaactggaggcccttaatgacaagaagcaccagttagagggaaagcttcaagacatccgttgcaggctcacaactcaacgccaggaaatagaaagtactaacaaatccagagaactgagaatcgctgaaatcacccatttgcagcagcagttacaggagtctcagcagatgctgggtcggctgatccccgagaagcagattctgaatgatcagctgaagcaggtacagcagaacagcctacaccgcgattctctcgtcaccctgaaaagggcccttgaagcaaaagaattggctcgccagcacttgcgcgatcagctggacgaagtcgagaaagagacccggagcaagctgcaggagatcgacatctttaacaaccagctaaaagagttaagagagattcataacaagcagcagctacagaagcagaagtcaatggaagctgagaggttaaagcagaaagagcaggagaggaaaatcatagaattggagaaacagaaagaggaagcacagcgtcgggcccaagaacgcgacaaacagtggctggagcacgtgcagcaagaggacgagcatcagaggccgagaaaactgcatgaagaggagaagctgaaacgtgaagaaagcgtgaagaagaaggatggtgaggagaagggtaagcaggaggcacaggataagttaggtagactttttcatcagcaccaggaacccgcaaagcccgccgtacaggccccatggagcaccgcagaaaaagggcccctcaccattagcgctcaggagaatgttaaagtggtgtactacagagcactataccccttcgaatcaagaagtcatgatgagatcactatccagcccggcgacattgtcatggtagacgaatcccaaacaggagagcctggatggcttggcggggagctcaagggcaagacaggttggtttcctgcaaactatgctgagaaaatccccgagaacgaggtgcccgccccggtgaaaccagtgacggacagtacgagtgcgcccgctccgaaactggctttacgcgaaaccccggcccccttggcagtgacctcaagcgagccaagcactacacctaataactgggcagatttttcttccacctggcctacctcaacaaacgaaaagccagagactgataattgggacgcttgggcagcccaaccaagcctgacggtaccttcggccggacaactgcggcagcggtcagctttcaccccagccactgcaacggggtcgagtccatccccggtgttgggccagcccgatttccttctgcaccctagcatgcgcttaggccatatgcagccacgtattgttctgctcttccctgatccgctacagtgctccacaagtcgtcttctgcccatgctgcggcccaggccaggcgtgcctttcctccggagtccatcttgccaatcaccaagtcacccatcccgtcccatctctgatgcagcccctagcgtgaagtttaccctcatgccaccagggagaatacatccatgtttcttgtttatcccggccgtgaacagccggaactcattccttgtgtacttcatactgccgggcggtaccctagggtgtttttatctttgcctgccccactatctgtag

SEQ ID NO: 323071 - DNA, 348 bp, Artificial Sequence
  derived and/or modified sequence
atggcacagttcccaacgccctttggcgggagtctcgacatctgggccatcaccgtagaggaacgagccaagcacgaccagcaatttcactctcttaaacccatatccggcttcatcaccggtgaccaggctcggaattttttttttcagtccggactcccacaacccgtgctggcccagatttgggccctggcggacatgaacaacgatgggaggatggatcaggttgaatttagtatcgccatgaaattaattaaacttaagttgcagggttatcagctgccttccgctctgccgcccgtgatgaagcaacaacctgtcgctattagctctgcccctgccttttag

SEQ ID NO: 323072 - DNA, 3280 bp, Artificial Sequence
  derived and/or modified sequence
catggctcagtttccaacaccttttggtggcagcctggatatctgggccataactgtagaggaaagagcgaagcatgatcagcagttccatagtttaaagccaatatctggattcattactggtgatcaagctagaaactttttttttcaatctgggttacctcaacctgttttagcacagatatgggcactagctgacatgaataatgatggaagaatggatcaagtggagttttccatagctatgaaacttatcaaactgaagctacaaggatatcagctaccctctgcacttccccctgtcatgaaacagcaaccagttgctatttctagcgcaccagcatttggtatgggaggtatcgccagcatgccaccgcttacagctgttgctccagtgccaatgggatccattccagttgttggaatgtctccaaccctagtatcttctgttcccacagcagctgtgccccccctggctaacggggctccccctgttatacaacctctgcctgcatttgctcatcctgcagccacattgccaaagagttcttcctttagtagatctggtccagggtcacaactaaacactaaattacaaaaggcacagtcatttgatgtggccagtgtcccaccagtggcagagtgggctgttcctcagtcatcaagactgaaatacaggcaattattcaatagtcatgacaaaactatgagtggacacttaacaggtccccaagcaagaactattcttatgcagtcaagtttaccacaggctcagctggcttcaatatggaatctttctgacattgatcaagatggaaaacttacagcagaggaatttatcctggcaatgcacctcattgatgtagctatgtctggccaaccactgccacctgtcctgcctccagaatacattccaccttcttttagaagagttcgatctggcagtggtatatctgtcataagctcaacatctgtagatcagaggctaccagaggaaccagttttagaagatgaacaacaacaattagaaaagaaattacctgtaacgtttgaagataagaagcgggagaactttgaacgtggcaacctggaactggagaaacgaaggcaagctctcctggaacagcagcgcaaggagcaggagcgcctggcccagctggagcgggcggagcaggagaggaaggagcgtgagcgccaggagcaagagcgcaaaagacaactggaactggagaagcaactggaaaagcagcgggagctagaacggcagagagaggaggagaggaggaaagaaattgagaggcgagaggctgcaaaacgggaacttgaaaggcaacgacaacttgagtgggaacggaatcgaaggcaagaactactaaatcaaagaaacaaagaacaagaggacatagttgtactgaaagcaaagaaaaagactttggaatttgaattagaagctctaaatgataaaaagcatcaactagaagggaaacttcaagatatcagatgtcgattgaccacccaaaggcaagaaattgagagcacaaacaaatctagagagttgagaattgccgaaatcacccatctacagcaacaattacaggaatctcagcaaatgcttggaagacttattccagaaaaacagatactcaatgaccaattaaaacaagttcagcagaacagtttgcacagagattcacttgttacacttaaaagagccttagaagcaaaagaactagctcggcagcacctacgagaccaactggatgaagtggagaaagaaactagatcaaaactacaggagattgatattttcaataatcagctgaaggaactaagagaaatacacaataagcaacaactccagaagcaaaagtccatggaggctgaacgactgaaacagaaagaacaagaacgaaagatcatagaattagaaaaacaaaaagaagaagcccaaagacgagctcaggaaagggacaagcagtggctggagcatgtgcagcaggaggacgagcatcagagaccaagaaaactccacgaagaggaaaaactgaaaagggaggagagtgtcaaaaagaaggatggcgaggaaaaaggcaaacaggaagcacaagacaagctgggtcggcttttccatcaacaccaagaaccagctaagccagctgtccaggcaccctggtccactgcagaaaaaggtccacttaccatttctgcacaggaaaatgtaaaagtggtgtattaccgggcactgtacccctttgaatccagaagccatgatgaaatcactatccagccaggagacatagtcatggtggatgaaagccaaactggagaacccggctggcttggaggagaattaaaaggaaagacagggtggttccctgcaaactatgcagagaaaatcccagaaaatgaggttcccgctccagtgaaaccagtgactgattcaacatctgcccctgcccccaaactggccttgcgtgagacccccgcccctttggcagtaacctcttcagagccctccacgacccctaataactgggccgacttcagctccacgtggcccaccagcacgaatgagaaaccagaaacggataactgggatgcatgggcagcccagccctctctcaccgttccaagtgccggccagttaaggcagaggtccgcctttactccagccacggccactggctcctccccgtctcctgtgctaggccagcatggattctggttcttcagagagtcctgctagtctaaagcgagtagcctctccagcagccaagccggtcgtttcgggagaagaaattgcccaggttattgcctcatacaccgccaccggccccgagcagctcactctcgcccctggtcagctgattttgatccgaaaaaagaacccaggtggatggtgggaaggagagctgcaagcacgtgggaaaaagcgccagataggctggttcccagctaattatgtaaagcttctaagccctgggacgagcaaaatcactccaacagagccacctaagtcaacagcattagcggcagtgtgccaggtgattgggatgtacgactacaccgcgcagaatgacgatgagctggccttcaacaagggccagatcatcaacgtcctcaacaaggaggaccctgactggtggaaaggagaagtcaatggacaagtggggctcttcccatccaattatgtgaagctgaccacagacatggacccaagccagcaatgaatcatatgttgtccatccccccctcaggcttgaaagtcctcaaagagacc

SEQ ID NO: 323073 - DNA, 3115 bp, Artificial Sequence
  derived and/or modified sequence
aggtaaaagtaacagaaccatggctcagtttccaacaccttttggtggcagcctggatatctgggccataactgtagaggaaagagcgaagcatgatcagcagttccatagtttaaagccaatatctggattcattactggtgatcaagctagaaactttttttttcaatctgggttacctcaacctgttttagcacagatatgggcactagctgacatgaataatgatggaagaatggatcaagtggagttttccatagctatgaaacttatcaaactgaagctacaaggatatcagctaccctctgcacttccccctgtcatgaaacagcaaccagttgctatttctagcgcaccagcatttggtatgggaggtatcgccagcatgccaccgcttacagctgttgctccagtgccaatgggatccattccagttgttggaatgtctccaaccctagtatcttctgttcccacagcagctgtgccccccctggctaacggggctccccctgttatacaacctctgcctgcatttgctcatcctgcagccacattgccaaagagttcttcctttagtagatctggtccagggtcacaactaaacactaaattacaaaaggcacagtcatttgatgtggccagtgtcccaccagtggcagagtgggctgttcctcagtcatcaagactgaaatacaggcaattattcaatagtcatgacaaaactatgagtggacacttaacaggtccccaagcaagaactattcttatgcagtcaagtttaccacaggctcagctggcttcaatatggaatctttctgacattgatcaagatggaaaacttacagcagaggaatttatcctggcaatgcacctcattgatgtagctatgtctggccaaccactgccacctgtcctgcctccagaatacattccaccttcttttagaagagttcgatctggcagtggtatatctgtcataagctcaacatctgtagatcagaggctaccagaggaaccagttttagaagatgaacaacaacaattagaaaagaaattacctgtaacgtttgaagataagaagcgggagaactttgaacgtggcaacctggaactggagaaacgaaggcaagctctcctggaacagcagcgcaaggagcaggagcgcctggcccagctggagcgggcggagcaggagaggaaggagcgtgagcgccaggagcaagagcgcaaaagacaactggaactggagaagcaactggaaaagcagcgggagctagaacggcagagagaggaggagaggaggaaagaaattgagaggcgagaggctgcaaaacgggaacttgaaaggcaacgacaacttgagtgggaacggaatcgaaggcaagaactactaaatcaaagaaacaaagaacaagaggacatagttgtactgaaagcaaagaaaaagactttggaatttgaattagaagctctaaatgataaaaagcatcaactagaagggaaacttcaagatatcagatgtcgattgaccacccaaaggcaagaaattgagagcacaaacaaatctagagagttgagaattgccgaaatcacccatctacagcaacaattacaggaatctcagcaaatgcttggaagacttattccagaaaaacagatactcaatgaccaattaaaacaagttcagcagaacagtttgcacagagattcacttgttacacttaaaagagccttagaagcaaaagaactagctcggcagcacctacgagaccaactggatgaagtggagaaagaaactagatcaaaactacaggagattgatattttcaataatcagctgaaggaactaagagaaatacacaataagcaacaactccagaagcaaaagtccatggaggctgaacgactgaaacagaaagaacaagaacgaaagatcatagaattagaaaaacaaaaagaagaagcccaaagacgagctcaggaaagggacaagcagtggctggagcatgtgcagcaggaggacgagcatcagagaccaagaaaactccacgaagaggaaaaactgaaaagggaggagagtgtcaaaaagaaggatggcgaggaaaaaggcaaacaggaagcacaagacaagctgggtcggcttttccatcaacaccaagaaccagctaagccagctgtccaggcaccctggtccactgcagaaaaaggtccacttaccatttctgcacaggaaaatgtaaaagtggtgtattaccgggcactgtacccctttgaatccagaagccatgatgaaatcactatccagccaggagacatagtcatggtggatgaaagccaaactggagaacccggctggcttggaggagaattaaaaggaaagacagggtggttccctgcaaactatgcagagaaaatcccagaaaatgaggttcccgctccagtgaaaccagtgactgattcaacatctgcccctgcccccaaactggccttgcgtgagacccccgcccctttggcagtaacctcttcagagccctccacgacccctaataactgggccgacttcagctccacgtggcccaccagcacgaatgagaaaccagaaacggataactgggatgcatgggcagcccagccctctctcaccgttccaagtgccggccagttaaggcagaggtccgcctttactccagccacggccactggctcctccccgtctcctgtgctaggccagcctgacttcctcctccacccctccatgagactaggccacatgcagccccggattgtgcttctcttcccggaccccctgcagtgttccacctcgaggcttttgcccatgctgcgccctcggcctggagtgcccttcctccgaagccctagctgtcaaagtccttctcatccttcaaggcccatctcagatgctgccccctctgtgaaatttacgctgatgcccccaggcagaattcatccctgttttctctttattcctgcagtgaatagtaggaactcctttttagtatatttcattctgccaggtggtacacttggttgtttttatctctgtcttccccattacttgtgaattacctgctagtaatactgcccatctttatag

SEQ ID NO: 323074 - DNA, 827 bp, Artificial Sequence
  derived and/or modified sequence
agatgaggagataggcgggagcgagggagcgagggagggagcgaaggaggtagagaagagtggaggcgccaggggagggagcgtagcttggttgctccgtagtacggcggctcgcgaggaagaatcccgagcgggctccgggacggacagagaggcgggcggggatggtgtgcggggctgcggctcctgcgtccctcccagcggcgcgtgagcggcactgatttgtccctggggcggcagcgcggacccgcccggagatgaggtttaagctgtcaccttcccaaatgcggcatctgtgtagccccagagggagcattctaaaaggcagcacttagatgagttgatcccttcacaccccacccagcagttcgttctacctggcaaaacttaacagcttcggtgaagaaacctccacattactgaacatttggaggtgtcccaatgaaaaggcgtcgattagcaaggtaaaagtaacagaaccatggctcagtttccaacaccttttggtggcagcctggatatctgggccataactgtagaggaaagagcgaagcatgatcagcagttccatagtttaaagccaatatctggattcattactggtgatcaagctagaaactttttttttcaatctgggttacctcaacctgttttagcacagatatgggcactagctgacatgaataatgatggaagaatggatcaagtggagttttccatagctatgaaacttatcaaactgaagctacaaggatatcagctaccctctgcacttccccctgtcatgaaacagcaaccagttgctatttctagcgcaccagcatttg

SEQ ID NO: 323075 - DNA, 501 bp, Artificial Sequence
  derived and/or modified sequence
gttgctccgtagtacggcggctcgcgaggaagaatcccgagcgggctccgggacggacagagaggcgggcggggatggtgtgcggggctgcggctcctgcgtccctcccagcggcgcgtgagcggcactgatttgtccctggggcggcagcgcggacccgcccggagatgaggtttaagctgtcaccttcccaaatgcggcatctgtgtagccccagagggagcattctaaaaggcgtcgattagcaaggtaaaagtaacagaaccatggctcagtttccaacaccttttggtggcagcctggatatctgggccataactgtagaggaaagagcgaagcatgatcagcagttccatagtttaaagccaatatctggattcattactggtgatcaagctagaaactttttttttcaatctgggttacctcaacctgttttagcacagatatgggcactagctgacatgaataatgatggaagaatggatcaagtggagtttt

SEQ ID NO: 323076 - DNA, 2745 bp, Artificial Sequence
  derived and/or modified sequence
atggcccagttccccaccccatttggaggcagcctggacatctgggccatcaccgtggaggagcgggccaagcatgaccagcagttccacagcctgaagcccatcagcggcttcatcaccggggaccaggccaggaacttcttcttccagagcggcctgccccagcctgtgctggcccagatctgggccctggccgacatgaacaatgatggccgcatggaccaggtggagttcagcatcgccatgaagctgatcaagctgaagctgcagggctaccagctgcccagcgccctgccccctgtgatgaagcagcagcctgtggccatcagcagcgccccagccttcggcatgggcggcatcgcctccatgccacccctgacagctgtggcccctgtgcccatgggcagcatccctgtggtgggcatgagccccaccctggtgtcctctgtgcccacagctgctgtgccccccctggccaacggggcccctcctgtgatccagcccctgcctgcctttgcccaccctgctgccaccctgcccaagagcagcagcttcagccgcagcggccctggcagccagctgaacaccaagctgcagaaggcccagagctttgatgtggcctctgtgccccctgtggccgagtgggccgtgccccagagcagccggctgaagtaccggcagctgttcaacagccatgacaagaccatgagcggccacctgaccggcccccaggcccggaccatcctgatgcagagcagcctgccccaggcccagctggccagcatctggaacctgagtgacatcgaccaggacggcaagctgacagctgaggagttcatcctggccatgcacctgattgatgtggccatgagcggccagcccctgccccctgtgctgcccccagagtacatccccccatccttcagaagagtgcgcagcggcagcggcatcagcgtcatcagcagcacctctgtggaccagaggctgcctgaggagcctgtgctggaggatgagcagcagcagctggagaagaagctgcctgtgacctttgaggacaagaagcgggagaactttgagcggggcaacctggagctggagaagaggcggcaggccctgctggagcagcagaggaaggagcaggagcggctggcccagctggagagagctgagcaggagaggaaggagcgggagcggcaggagcaggagaggaagaggcagctggagctggagaagcagctggagaagcagcgggagctggagcggcagcgggaggaggagaggaggaaggagattgaaagaagagaggccgccaagcgggagctggagcggcagaggcagctggagtgggagaggaacagacggcaggagctgctgaaccagaggaacaaggagcaggaggacatcgtggtgctgaaggccaagaagaagaccctggagtttgagctggaggccctgaatgacaagaagcaccagctggagggcaagctgcaggacatccgctgccgcctgaccacccagaggcaggagattgagagcaccaacaagagccgggagctgagaattgctgagatcacccacctgcagcagcagctgcaggagagccagcagatgctgggccgcctcatccctgagaagcagatcctgaatgaccagctgaagcaggtgcagcagaacagcctgcaccgggacagcctggtgaccctgaagagggccctggaggccaaggagctggcccggcagcacctgcgggaccagctggatgaggtggagaaggagaccaggagcaagctgcaggagattgacatcttcaacaaccagctgaaggagctgcgggagatccacaacaagcagcagctgcagaagcagaagtccatggaggccgagcggctgaagcagaaggagcaggagaggaagatcatcgagctggagaagcagaaggaggaggcccagaggcgggcccaggagcgggacaagcagtggctggagcacgtgcagcaggaggatgagcaccagaggcccaggaagctgcacgaggaggagaagctgaagcgggaggagagcgtgaagaagaaggatggagaggagaagggcaagcaggaggcccaggacaagctgggccgcctcttccaccagcaccaggagcccgccaagccagctgtgcaggccccctggagcacagctgagaagggccccctgaccatcagcgcccaggagaatgtgaaggtggtgtactaccgggccctgtacccctttgagagccgcagccatgatgagatcaccatccagcccggggacatcgtgatggtggatgagagccagacaggagagcccggctggctgggcggggagctgaagggcaagacaggctggttccctgccaactatgcagagaagatcccagaaaatgaggtgcctgcccctgtgaagcctgtgacagacagcaccagcgccccagcccccaagctggccctgcgggagaccccagcccccctggccgtgaccagcagcgagcccagcaccacccccaacaactgggccgacttcagcagcacctggcccaccagcaccaatgagaagccagagacagacaactgggatgcctgggccgcccagcccagcctgactgtgcccagcgctggccagctgcggcagaggtctgccttcaccccagccacagccaccggcagcagccccagccctgtgctgggccagcacggcttctggttcttccgggagagctgctag

SEQ ID NO: 323077 - DNA, 3063 bp, Artificial Sequence
  derived and/or modified sequence
atggcccagttccccaccccatttggaggcagcctggacatctgggccatcaccgtggaggagcgggccaagcatgaccagcagttccacagcctgaagcccatcagcggcttcatcaccggggaccaggccaggaacttcttcttccagagcggcctgccccagcctgtgctggcccagatctgggccctggccgacatgaacaatgatggccgcatggaccaggtggagttcagcatcgccatgaagctgatcaagctgaagctgcagggctaccagctgcccagcgccctgccccctgtgatgaagcagcagcctgtggccatcagcagcgccccagccttcggcatgggcggcatcgcctccatgccacccctgacagctgtggcccctgtgcccatgggcagcatccctgtggtgggcatgagccccaccctggtgtcctctgtgcccacagctgctgtgccccccctggccaacggggcccctcctgtgatccagcccctgcctgcctttgcccaccctgctgccaccctgcccaagagcagcagcttcagccgcagcggccctggcagccagctgaacaccaagctgcagaaggcccagagctttgatgtggcctctgtgccccctgtggccgagtgggccgtgccccagagcagccggctgaagtaccggcagctgttcaacagccatgacaagaccatgagcggccacctgaccggcccccaggcccggaccatcctgatgcagagcagcctgccccaggcccagctggccagcatctggaacctgagtgacatcgaccaggacggcaagctgacagctgaggagttcatcctggccatgcacctgattgatgtggccatgagcggccagcccctgccccctgtgctgcccccagagtacatccccccatccttcagaagagtgcgcagcggcagcggcatcagcgtcatcagcagcacctctgtggaccagaggctgcctgaggagcctgtgctggaggatgagcagcagcagctggagaagaagctgcctgtgacctttgaggacaagaagcgggagaactttgagcggggcaacctggagctggagaagaggcggcaggccctgctggagcagcagaggaaggagcaggagcggctggcccagctggagagagctgagcaggagaggaaggagcgggagcggcaggagcaggagaggaagaggcagctggagctggagaagcagctggagaagcagcgggagctggagcggcagcgggaggaggagaggaggaaggagattgaaagaagagaggccgccaagcgggagctggagcggcagaggcagctggagtgggagaggaacagacggcaggagctgctgaaccagaggaacaaggagcaggaggacatcgtggtgctgaaggccaagaagaagaccctggagtttgagctggaggccctgaatgacaagaagcaccagctggagggcaagctgcaggacatccgctgccgcctgaccacccagaggcaggagattgagagcaccaacaagagccgggagctgagaattgctgagatcacccacctgcagcagcagctgcaggagagccagcagatgctgggccgcctcatccctgagaagcagatcctgaatgaccagctgaagcaggtgcagcagaacagcctgcaccgggacagcctggtgaccctgaagagggccctggaggccaaggagctggcccggcagcacctgcgggaccagctggatgaggtggagaaggagaccaggagcaagctgcaggagattgacatcttcaacaaccagctgaaggagctgcgggagatccacaacaagcagcagctgcagaagcagaagtccatggaggccgagcggctgaagcagaaggagcaggagaggaagatcatcgagctggagaagcagaaggaggaggcccagaggcgggcccaggagcgggacaagcagtggctggagcacgtgcagcaggaggatgagcaccagaggcccaggaagctgcacgaggaggagaagctgaagcgggaggagagcgtgaagaagaaggatggagaggagaagggcaagcaggaggcccaggacaagctgggccgcctcttccaccagcaccaggagcccgccaagccagctgtgcaggccccctggagcacagctgagaagggccccctgaccatcagcgcccaggagaatgtgaaggtggtgtactaccgggccctgtacccctttgagagccgcagccatgatgagatcaccatccagcccggggacatcgtgatggtggatgagagccagacaggagagcccggctggctgggcggggagctgaagggcaagacaggctggttccctgccaactatgcagagaagatcccagaaaatgaggtgcctgcccctgtgaagcctgtgacagacagcaccagcgccccagcccccaagctggccctgcgggagaccccagcccccctggccgtgaccagcagcgagcccagcaccacccccaacaactgggccgacttcagcagcacctggcccaccagcaccaatgagaagccagagacagacaactgggatgcctgggccgcccagcccagcctgactgtgcccagcgctggccagctgcggcagaggtctgccttcaccccagccacagccaccggcagcagccccagccctgtgctgggccagcctgacttcctgctgcaccccagcatgaggctgggccacatgcagccccgcatcgtgctgctcttcccagaccccctgcagtgcagcaccagccggctgctgcccatgctgcggcccaggcctggggtgcccttcctgcggagccccagctgccagagccccagccaccccagccggcccatcagtgatgctgcccccagcgtgaagttcaccctgatgcctcctggccgcatccacccctgcttcctgttcatcccagctgtgaacagcagaaattccttcctggtgtacttcatcctgcccggcggcaccctgggctgcttctacctgtgcctgccccactacctgtag

SEQ ID NO: 323078 - DNA, 348 bp, Artificial Sequence
  derived and/or modified sequence
atggcccagttccccaccccatttggaggcagcctggacatctgggccatcaccgtggaggagcgggccaagcatgaccagcagttccacagcctgaagcccatcagcggcttcatcaccggggaccaggccaggaacttcttcttccagagcggcctgccccagcctgtgctggcccagatctgggccctggccgacatgaacaatgatggccgcatggaccaggtggagttcagcatcgccatgaagctgatcaagctgaagctgcagggctaccagctgcccagcgccctgccccctgtgatgaagcagcagcctgtggccatcagcagcgccccagccttctag

SEQ ID NO: 323079 - DNA, 2745 bp, Artificial Sequence
  derived and/or modified sequence
atggcccagttccccacccccttcggcggcagcctggacatctgggcgatcacagttgaggagcgtgctaaacacgaccagcagttccactctctgaaacctatctccggattcataactggggaccaggccagaaatttctttttccagagcggcctcccacagcctgtgttggcgcagatatgggctctggctgatatgaacaatgatgggaggatggatcaggtcgaattctcgatagcaatgaagctgataaaactgaagctccagggttatcagttaccttctgccctccctcctgtgatgaaacagcagcccgtggcaatctcaagcgctcccgcctttggtatgggagggatcgcctcaatgcccccgctgacagccgttgctcctgtccccatgggctcaattcccgtggtcggcatgagtcctacattggtgtcatccgttccaacagccgcagtgcccccgctggccaatggggctccaccagtgattcagcccctaccagcattcgcccatcccgctgccaccttacccaaaagttcttcattctctcggtccgggcccggctcccagctgaatactaaactccagaaggcccagtccttcgacgtggcctctgtgccccccgtggccgagtgggccgtacctcaatcatctagacttaaatacagacaattgtttaactcacatgacaagaccatgagcggtcacttgactggaccacaggcgcgcactatcttaatgcagagcagtcttccccaggcacaattggcttcaatctggaatctgtccgatattgatcaggacggaaagctgacagcggaggaattcatccttgcaatgcatttaattgatgttgccatgtccggacaaccacttccaccggtgctgccccccgagtacattcccccaagctttcggcgggttagatctggatcggggatcagtgtgatctcgtcgacatcagtggatcaacgattacccgaggagcctgtgcttgaggacgagcagcagcaactggagaagaagttgcccgtgacgttcgaagacaagaagcgggaaaacttcgaaaggggcaatctggagctagaaaagagacgccaggccctgctggagcaacaacgcaaagaacaggagaggctggcgcagctggagagggctgagcaagaaaggaaagagagagagaggcaagaacaggaacgcaaacgccagctggagctggaaaaacagcttgaaaaacagcgcgagcttgagaggcagagggaagaggagcgccggaaggagatcgagagacgggaagcggctaagcgcgagttggaacggcagcgacagctggagtgggaacgtaataggcgccaagagttactcaatcagaggaacaaggagcaggaagacatagtcgtgcttaaggctaagaagaagacactggagtttgagcttgaggccctcaatgataaaaaacatcagctggagggaaagcttcaggacattcgctgcagattaaccacccaaagacaggagatcgagtccaccaataaatctagagagttgagaatcgcggagatcactcacttacagcagcagttgcaggaaagccagcagatgcttggccgcctgattccggagaaacagatattaaacgatcaactcaaacaggtccagcagaacagcctgcacagggattcattagtaactctcaagcgcgccctcgaggccaaagagctggcgagacaacaccttcgggatcagttagacgaggtagagaaggaaactagatccaaactccaggagattgacatcttcaacaatcaacttaaggaactgagagagattcacaataaacagcaactgcaaaagcagaagtccatggaagccgaacgtctgaagcagaaagaacaggagcggaagatcatagagctcgaaaagcagaaagaagaggctcagagacgtgctcaggagagggacaagcagtggctggagcacgtgcaacaagaggatgaacaccaacgtccacgcaagctgcacgaggaagaaaagctgaaacgggaagagtcagtgaaaaagaaggatggtgaagagaagggcaagcaggaggcccaggacaagctgggtagactctttcatcagcatcaggagcctgcgaagcctgccgtgcaggctccttggagcacagccgagaaagggccgctgaccatctcagctcaagagaacgtgaaggtggtctactatagggcactgtacccctttgaaagcaggtctcacgatgaaataactattcaacctggcgacatcgtaatggtcgacgagagtcagactggagaaccaggatggcttggtggtgaattgaaggggaagaccggctggttccccgccaactatgctgagaagatacccgagaatgaggtccccgcacctgtcaagcctgtgacagattctacctccgccccggctcctaaattggctttacgggaaactcccgctcccctggcagttaccagctctgagccctccacgacgcccaataactgggccgacttctcctctacctggcctacgagcacaaatgagaagcctgagacagataattgggatgcgtgggcagcccagccatcactgaccgtgccctctgccggccagctgagacagcgatcggctttcacccctgccaccgctacaggctcatcaccgagccctgtgctgggacaacacggattctggttctttcgggagagctgttag

SEQ ID NO: 323080 - DNA, 3063 bp, Artificial Sequence
  derived and/or modified sequence
atggcccagttccccacccccttcggcggcagcctggacatctgggctattaccgtagaggaaagagccaagcacgaccagcaattccattccctcaagcctatcagcgggttcataacaggtgaccaggcccgaaattttttcttccagagcgggttgcctcagcccgtactggctcagatttgggcacttgccgacatgaataatgacgggaggatggatcaggtggaatttagtatcgctatgaaactgatcaaactgaagctgcaaggataccaacttcctagcgccctgccacctgtaatgaaacagcagcccgtggccatctccagtgctcctgcattcggcatgggaggcattgcctcgatgcccccgctcaccgcggtagctcctgtgccaatggggtccatccctgtcgtcggcatgtcacccacactggtatcgagcgtccctactgcagcggtcccaccactcgctaatggggccccccctgtcattcagccccttcccgcctttgcccacccagccgccaccctgcccaagtcctcatcctttagccgcagcggccctggatcccaattgaataccaagctacagaaggcccagtcattcgacgtagctagcgtgccccccgtggctgaatgggccgtgcctcagagcagtcgtcttaagtacagacagctctttaactcacatgacaaaacaatgagcggtcatctgactgggcctcaggcacgaaccatcctcatgcagtcttccctgcctcaggcccagctagcctcgatatggaatctgtccgatattgatcaggatggcaaactgacggcggaggaattcatcctggcaatgcatctgatagatgtggcaatgtctgggcagcccctcccgcccgtgctccctcctgaatatattcctccgagtttcaggagggtccgctctggaagcgggatttcggtcataagctcgacctctgtggatcaaagactcccagaggaacctgtgctcgaggatgagcagcagcaactggaaaagaagcttcccgtgacctttgaggacaagaagcgcgaaaactttgaaagagggaacctggagctggagaagaggcgccaggccctgctggagcagcagaggaaggagcaggagcgcttagctcagctggagagagccgaacaagaaaggaaggaacgagaaagacaggagcaagaaaggaaacgccagctggaattagagaaacaactggagaagcagcgagaattggagcgacagcgggaagaggagcgccgaaaagagatagaacgacgcgaagccgcgaaaagagagctggagagacaaaggcagctggagtgggagcggaaccgacgacaggagctcctcaatcaaaggaacaaggagcaggaagacattgtggtgctcaaggctaagaagaaaaccttggaattcgagctcgaagctcttaatgataaaaaacatcagttagaagggaagttacaagatatccggtgcagactcactactcaacggcaagagattgagtcaaccaacaaatcaagggagctccgcatagcagagattacccacttgcagcagcagttgcaggaatctcaacagatgctggggcgcctgattcctgaaaaacagatcctgaatgaccaactgaagcaggtacaacaaaacagcctccatagagatagcctggttaccctgaaaagggccctggaggcgaaagagctcgcccgccagcacttgagggatcagttggacgaggtcgagaaagagaccagatctaagctacaggagatcgacattttcaataaccagttgaaagaactgagagaaattcacaataagcagcagctacaaaagcagaaaagcatggaggccgaaagactgaagcagaaggaacaggagcggaaaatcatcgagcttgagaagcagaaggaggaggcccagcggagagctcaggagagggacaaacagtggctggagcacgttcaacaggaggacgagcaccagcgtccccggaagctgcacgaggaggagaaactgaagcgggaggaatctgtgaagaagaaggatggagaggagaaaggcaagcaggaggcccaagacaagctcggacgcctgttccaccaacaccaggagcctgcgaagccagcagtccaagcaccatggagtacggcggagaaaggtcccctcacaatcagcgctcaggagaatgtcaaggttgtatactacagggcactctacccattcgagtcccgcagccacgatgagataactatccagccaggcgatatcgtaatggtggatgagagccagactggtgagccaggatggcttggcggcgagttaaaggggaaaaccggctggttcccagctaactatgccgaaaagatcccagaaaatgaggtgcccgcccctgtgaagcccgtcacggacagcacctctgcgcccgctccaaagcttgcacttagagagacccccgcgcccctagctgtgacaagctcggagcctagcactacccccaataattgggccgacttcagctcaacctggcccacatcaaccaacgagaaacccgagaccgacaattgggatgcgtgggccgcacaaccctccctgacagttccatctgcgggccagctgaggcaaaggtccgccttcacccctgcgaccgctaccggatctagtccctctcctgttttgggtcagccagattttctcttgcatccctcgatgcgccttggccacatgcagccgcgcatcgtactgctgtttcccgacccactgcagtgttctacaagcagactcttacctatgctgcgcccacgcccaggcgtgccattccttcgctctccctcttgtcagagtccctcccacccttcccggcccatctccgacgccgcccctagcgttaaatttacgctgatgcccccaggcaggattcacccatgtttcctgttcataccggcagtcaacagccggaattcgttccttgtatatttcatactaccaggagggacactgggatgtttctacctgtgtctcccacactatttgtag

SEQ ID NO: 323081 - DNA, 348 bp, Artificial Sequence
  derived and/or modified sequence
atggcccagttccccacccccttcggcggcagcctggacatctgggcaataacagtggaggagagggctaagcatgatcaacaatttcactctttgaagcccatttccggcttcatcacgggggatcaagccaggaattttttcttccagagcggcctgccccagcctgtgctggcccaaatttgggctctggcagacatgaacaatgacgggcggatggatcaggtcgagttctccattgccatgaagctaattaagctcaagctgcaaggttaccaacttcccagcgctctgcctcctgtgatgaaacagcagccagtggccatcagctctgcacccgctttttag

SEQ ID NO: 323082 - DNA, 2745 bp, Artificial Sequence
  derived and/or modified sequence
atggcgcagttccctactcctttcggagggtcactggacatctgggcaataacggtggaggagcgagctaagcatgatcagcagtttcactcgctgaagccgatttccggtttcattactggcgatcaggcgaggaactttttcttccagtctggcttgcctcagccagtcctggcacaaatctgggcactggccgatatgaacaatgatgggagaatggatcaagtggagtttagtatagccatgaagctgatcaaactcaagctgcaggggtaccagctaccctctgccctgccgcctgtcatgaaacagcagcctgtcgccatttcctccgcccctgcctttggaatgggcggaatcgcatctatgcccccactgaccgctgtagcgcctgttcccatggggagcatccctgtggtaggaatgtcccccactctggtcagcagtgtgcccacagcagctgtacctcctctggctaacggcgcacctccagtgattcagcctctaccagcctttgcccatcccgcagccaccctccccaagtcatccagctttagtaggagcggccctggctctcagctgaacacaaagctgcagaaagcacaatcctttgacgtagcctcagtgccacctgtggccgaatgggctgtgccacagtcctcaaggttgaaatatcgtcaactcttcaactcccacgataagacgatgtcaggacacctgactggtcctcaagcaagaactatcctgatgcaaagctctctgcctcaagcgcaactggccagcatttggaacctttctgatatcgaccaagacggaaaactcactgccgaggagtttatactcgcaatgcatcttattgatgtcgctatgtcaggccagcctctgccccctgtattgcctcctgaatatataccacctagctttcggcgagtccggagcgggtccggaatctctgttatcagttccacatcagtcgaccaaaggctgcctgaggagccggtgttggaggacgaacagcaacagctggagaagaagttacctgtgacctttgaagacaagaaacgggagaacttcgagcggggaaatttggaactggagaagagaagacaggccctactagagcagcagagaaaagagcaggagcgactcgctcagcttgaacgtgcagagcaggagagaaaggaaagagagagacaggaacaagagagaaagcggcaattggagctcgagaagcaacttgagaagcagagagagttggagcgtcagagggaagaggagcgccgaaaggaaattgaaagaagggaggccgcaaagagggaactggagcggcagcgacagctggaatgggagagaaacagaaggcaggagttactcaatcagcggaataaggagcaggaggatatcgtcgtattgaaagcgaagaaaaagacactggaattcgagttagaggctctcaacgacaaaaagcaccagctggaaggtaagctgcaggatattcgctgtcgcctgacaacacagaggcaggagattgagtctaccaacaagagtcgtgagttgcggatagcagaaatcacgcatctgcaacagcagctacaggagagccagcagatgttaggacgccttattcctgagaagcagattttgaacgatcagctgaagcaggtccaacagaattcactgcatcgagatagcctcgtgacactcaaaagagcactcgaagccaaggaactggctcgccagcacttgcgcgatcagttagatgaggtagagaaggaaactagatctaagttgcaggaaattgacatatttaacaaccaactgaaggagttgcgtgaaatccataacaaacagcagcttcagaaacaaaagtccatggaagccgagagactgaagcagaaagagcaggagaggaagattattgaactagaaaagcaaaaggaagaagcccagaggagggcccaggagcgggataaacagtggctcgagcatgtgcagcaggaagacgagcaccagcgtcctcggaagctacacgaagaagagaaactgaaaagggaagagagcgtcaagaagaaggacggagaggagaaaggcaaacaagaggcccaagacaaattagggagactcttccaccagcaccaggaacccgcaaagcctgcagtgcaggccccttggtctacggccgaaaagggaccactgaccatcagcgctcaggagaatgttaaggttgtttactacagagctctatacccctttgaatcccgctcccacgatgaaattactattcaacctggagacatcgtgatggtcgatgaatcccagactggcgaacccggatggctgggaggggaattgaagggcaaaacaggatggttcccagccaactacgcagaaaaaatccccgaaaacgaagtgccagcacccgtgaaaccagtgaccgattccacctcagccccagcccctaaacttgcactgcgagaaacccctgctccgttggctgtcacatcatccgaaccttccacgactccaaataattgggccgacttttcctccacctggccaacttccaccaatgaaaaaccagagactgacaattgggacgcatgggccgcacagcctagcctgactgtaccaagcgccggacagctgcggcagcgctctgcttttacacccgctactgcaacagggagttcgccttcccctgtattggggcagcacggcttctggttttttcgcgagtcctgttag

SEQ ID NO: 323083 - DNA, 3063 bp, Artificial Sequence
  derived and/or modified sequence
atggcccagttcccgaccccatttgggggttccttggacatctgggctatcaccgtggaggaacgggcaaaacacgatcagcagtttcactcactaaaaccaatttccggtttcatcaccggagaccaagctcggaactttttttttcaatcaggcctgccacagcccgtccttgcacagatctgggccttggccgatatgaacaatgatggccgaatggatcaggtggaattctcgattgccatgaagctgatcaaactgaaattacagggctatcagctacccagcgccctgccacctgtaatgaaacagcaaccagtggctatctcatccgcccctgccttcgggatgggcggtatcgccagtatgccgccactaaccgcggtggctccagttcctatgggcagtatcccagtggtcggaatgagcccgacactcgtgtcctccgtcccaactgccgctgtgccacccttagccaatggcgcacccccagtgatccagcctctgcccgcttttgcgcaccctgccgctacactgcctaaaagctctagcttttctcgctctggacctggatcacagctgaacaccaaacttcagaaggcccaatctttcgacgtcgcgtctgttccccctgttgcggagtgggcagtgcctcaatcttcccgcctgaagtatagacagttatttaattcacacgacaagaccatgagtggacacctcaccggaccccaggcaagaacaatacttatgcagtcatcgctcccacaagcacagctggcttctatttggaatctgagcgatattgaccaagacggaaaacttaccgcagaggagtttattctcgctatgcatctcatcgacgtggcaatgtctggtcaacctctcccccctgtgcttcctccggaatatatacctcccagcttcagaagggtgagaagtggcagtggaatttcagtgatctcatctacttccgttgaccagcgcttacccgaggagcccgtactagaggacgagcagcaacagttggagaaaaaattacctgtgactttcgaggacaaaaagcgcgagaatttcgaaaggggaaacctcgagctggaaaaacgtcgtcaggcattattggaacagcagcgaaaggagcaggaacgcctggcacagctcgagcgcgctgaacaggagaggaaagagagggaaagacaggagcaggagcggaagcggcaactagaactggagaaacagttagaaaaacagagggagcttgagcgccagcgcgaagaggagaggcggaaggagattgagagacgcgaggcagcaaagagggagctagagagacagaggcaacttgaatgggagaggaataggaggcaggagttgttgaatcagcgaaacaaagagcaggaggacattgtggtgttgaaggctaagaagaagactcttgaattcgaattggaagcactgaatgataagaaacatcagcttgaagggaagttgcaggatatacgctgtagactgactacacagcgccaagagattgaatccacaaataagtccagggaattgaggattgcagaaatcacccacctgcaacaacagctccaagaatcccaacaaatgctggggaggctgattcctgaaaaacagatccttaatgaccagctgaagcaggtacagcaaaatagtctacatagggatagcctcgtgactctgaagcgagcactggaggctaaggagctggcacgccagcacttacgtgatcaattggacgaggtggagaaggaaacgcgaagcaaactacaggagatcgatatatttaacaaccaattgaaggagctgcgcgaaattcacaacaaacagcagctgcagaagcagaagagtatggaggccgaacgcctaaagcagaaagaacaggagagaaagataatcgagcttgaaaagcaaaaggaggaggctcagcggagagctcaggagagagacaaacaatggctggagcacgttcagcaagaggatgagcatcagcggccacggaagctgcacgaagaggagaagctcaaacgcgaagaaagtgtgaaaaaaaaagatggcgaggaaaagggcaagcaggaggctcaggacaagcttggccgtcttttccaccagcatcaggagccagcaaaacccgcagtacaggctccctggtccacagcggagaaagggccactgaccatctctgcccaggagaacgtcaaagttgtatactaccgtgccttgtatccatttgagagtcgctcccacgacgagatcaccattcagccgggtgacattgtaatggttgatgaatcccagacaggcgaaccaggctggctaggcggtgaattgaaagggaaaaccgggtggtttcctgctaattacgcagaaaagattcctgagaatgaagttcccgctcccgtaaagccggtgactgactccactagcgcgcctgccccaaaactggctcttagagagaccccagcccctctggccgtgactagtagtgagcctagcaccactccaaacaattgggccgattttagttcgacttggcctacctccacaaatgaaaaacccgaaaccgataactgggacgcctgggctgcccagcccagtttgacggtgccgtccgcagggcagcttagacagcgcagcgctttcacacccgcaaccgccacgggcagctccccatcgcccgtgctcgggcagcctgatttcctgctgcacccctccatgagactcggacacatgcagcccaggatcgtgctgctgtttccagatcccctgcaatgctcaacgtctcgcttgctacctatgctgcgtcctcgtcctggggttccatttcttaggtctccctcctgccagtcaccaagccacccatctcgaccaatttccgatgccgctcctagcgtcaagttcacccttatgcccccagggagaatacacccatgctttctctttattcctgccgttaacagtcgtaactcctttttggtctacttcatcctccctggtggtaccctaggctgtttctacctctgtttgccccattatttgtag

SEQ ID NO: 323084 - DNA, 348 bp, Artificial Sequence
  derived and/or modified sequence
atggcccagttccctacacctttcggtggaagtctagatatctgggcaataaccgttgaagaacgggctaagcatgaccagcagttccacagccttaaacctatctcagggttcataaccggggatcaagcgcgaaacttcttttttcagtccggattgccacagcccgtgttagcacagatctgggcactagccgacatgaataatgacggccgaatggatcaggttgagttttctatcgcgatgaagctgattaagctcaagttgcaaggttatcagttaccttctgcgctgcctccagtcatgaaacagcagccggtcgcaatctcatcggctccagccttctag

SEQ ID NO: 323085 - DNA, 2745 bp, Artificial Sequence
  derived and/or modified sequence
atggcccagttccccacccccttcggcggcagcctggacatctgggccatcaccgtggaggagagagccaagcacgaccagcagttccacagcctgaagcccatcagcggcttcatcaccggcgaccaggccagaaacttcttcttccagagcggcctgccccagcccgtgctggcccagatctgggccctggccgacatgaacaacgacggcagaatggaccaggtggagttcagcatcgccatgaagctgatcaagctgaagctgcagggctaccagctgcccagcgccctgccccccgtgatgaagcagcagcccgtggccatcagcagcgcccccgccttcggcatgggcggcatcgccagcatgccccccctgaccgccgtggcccccgtgcccatgggcagcatccccgtggtgggcatgagccccaccctggtgagcagcgtgcccaccgccgccgtgccccccctggccaacggcgccccccccgtgatccagcccctgcccgccttcgcccaccccgccgccaccctgcccaagagcagcagcttcagcagaagcggccccggcagccagctgaacaccaagctgcagaaggcccagagcttcgacgtggccagcgtgccccccgtggccgagtgggccgtgccccagagcagcagactgaagtacagacagctgttcaacagccacgacaagaccatgagcggccacctgaccggcccccaggccagaaccatcctgatgcagagcagcctgccccaggcccagctggccagcatctggaacctgagcgacatcgaccaggacggcaagctgaccgccgaggagttcatcctggccatgcacctgatcgacgtggccatgagcggccagcccctgccccccgtgctgccccccgagtacatcccccccagcttcagaagagtgagaagcggcagcggcatcagcgtgatcagcagcaccagcgtggaccagagactgcccgaggagcccgtgctggaggacgagcagcagcagctggagaagaagctgcccgtgaccttcgaggacaagaagagagagaacttcgagagaggcaacctggagctggagaagagaagacaggccctgctggagcagcagagaaaggagcaggagagactggcccagctggagagagccgagcaggagagaaaggagagagagagacaggagcaggagagaaagagacagctggagctggagaagcagctggagaagcagagagagctggagagacagagagaggaggagagaagaaaggagatcgagagaagagaggccgccaagagagagctggagagacagagacagctggagtgggagagaaacagaagacaggagctgctgaaccagagaaacaaggagcaggaggacatcgtggtgctgaaggccaagaagaagaccctggagttcgagctggaggccctgaacgacaagaagcaccagctggagggcaagctgcaggacatcagatgcagactgaccacccagagacaggagatcgagagcaccaacaagagcagagagctgagaatcgccgagatcacccacctgcagcagcagctgcaggagagccagcagatgctgggcagactgatccccgagaagcagatcctgaacgaccagctgaagcaggtgcagcagaacagcctgcacagagacagcctggtgaccctgaagagagccctggaggccaaggagctggccagacagcacctgagagaccagctggacgaggtggagaaggagaccagaagcaagctgcaggagatcgacatcttcaacaaccagctgaaggagctgagagagatccacaacaagcagcagctgcagaagcagaagagcatggaggccgagagactgaagcagaaggagcaggagagaaagatcatcgagctggagaagcagaaggaggaggcccagagaagagcccaggagagagacaagcagtggctggagcacgtgcagcaggaggacgagcaccagagacccagaaagctgcacgaggaggagaagctgaagagagaggagagcgtgaagaagaaggacggcgaggagaagggcaagcaggaggcccaggacaagctgggcagactgttccaccagcaccaggagcccgccaagcccgccgtgcaggccccctggagcaccgccgagaagggccccctgaccatcagcgcccaggagaacgtgaaggtggtgtactacagagccctgtaccccttcgagagcagaagccacgacgagatcaccatccagcccggcgacatcgtgatggtggacgagagccagaccggcgagcccggctggctgggcggcgagctgaagggcaagaccggctggttccccgccaactacgccgagaagatccccgagaacgaggtgcccgcccccgtgaagcccgtgaccgacagcaccagcgcccccgcccccaagctggccctgagagagacccccgcccccctggccgtgaccagcagcgagcccagcaccacccccaacaactgggccgacttcagcagcacctggcccaccagcaccaacgagaagcccgagaccgacaactgggacgcctgggccgcccagcccagcctgaccgtgcccagcgccggccagctgagacagagaagcgccttcacccccgccaccgccaccggcagcagccccagccccgtgctgggccagcacggcttctggttcttcagagagagctgctag

SEQ ID NO: 323086 - DNA, 3063 bp, Artificial Sequence
  derived and/or modified sequence
atggcccagttccccacccccttcggcggcagcctggacatctgggccatcaccgtggaggagagagccaagcacgaccagcagttccacagcctgaagcccatcagcggcttcatcaccggcgaccaggccagaaacttcttcttccagagcggcctgccccagcccgtgctggcccagatctgggccctggccgacatgaacaacgacggcagaatggaccaggtggagttcagcatcgccatgaagctgatcaagctgaagctgcagggctaccagctgcccagcgccctgccccccgtgatgaagcagcagcccgtggccatcagcagcgcccccgccttcggcatgggcggcatcgccagcatgccccccctgaccgccgtggcccccgtgcccatgggcagcatccccgtggtgggcatgagccccaccctggtgagcagcgtgcccaccgccgccgtgccccccctggccaacggcgccccccccgtgatccagcccctgcccgccttcgcccaccccgccgccaccctgcccaagagcagcagcttcagcagaagcggccccggcagccagctgaacaccaagctgcagaaggcccagagcttcgacgtggccagcgtgccccccgtggccgagtgggccgtgccccagagcagcagactgaagtacagacagctgttcaacagccacgacaagaccatgagcggccacctgaccggcccccaggccagaaccatcctgatgcagagcagcctgccccaggcccagctggccagcatctggaacctgagcgacatcgaccaggacggcaagctgaccgccgaggagttcatcctggccatgcacctgatcgacgtggccatgagcggccagcccctgccccccgtgctgccccccgagtacatcccccccagcttcagaagagtgagaagcggcagcggcatcagcgtgatcagcagcaccagcgtggaccagagactgcccgaggagcccgtgctggaggacgagcagcagcagctggagaagaagctgcccgtgaccttcgaggacaagaagagagagaacttcgagagaggcaacctggagctggagaagagaagacaggccctgctggagcagcagagaaaggagcaggagagactggcccagctggagagagccgagcaggagagaaaggagagagagagacaggagcaggagagaaagagacagctggagctggagaagcagctggagaagcagagagagctggagagacagagagaggaggagagaagaaaggagatcgagagaagagaggccgccaagagagagctggagagacagagacagctggagtgggagagaaacagaagacaggagctgctgaaccagagaaacaaggagcaggaggacatcgtggtgctgaaggccaagaagaagaccctggagttcgagctggaggccctgaacgacaagaagcaccagctggagggcaagctgcaggacatcagatgcagactgaccacccagagacaggagatcgagagcaccaacaagagcagagagctgagaatcgccgagatcacccacctgcagcagcagctgcaggagagccagcagatgctgggcagactgatccccgagaagcagatcctgaacgaccagctgaagcaggtgcagcagaacagcctgcacagagacagcctggtgaccctgaagagagccctggaggccaaggagctggccagacagcacctgagagaccagctggacgaggtggagaaggagaccagaagcaagctgcaggagatcgacatcttcaacaaccagctgaaggagctgagagagatccacaacaagcagcagctgcagaagcagaagagcatggaggccgagagactgaagcagaaggagcaggagagaaagatcatcgagctggagaagcagaaggaggaggcccagagaagagcccaggagagagacaagcagtggctggagcacgtgcagcaggaggacgagcaccagagacccagaaagctgcacgaggaggagaagctgaagagagaggagagcgtgaagaagaaggacggcgaggagaagggcaagcaggaggcccaggacaagctgggcagactgttccaccagcaccaggagcccgccaagcccgccgtgcaggccccctggagcaccgccgagaagggccccctgaccatcagcgcccaggagaacgtgaaggtggtgtactacagagccctgtaccccttcgagagcagaagccacgacgagatcaccatccagcccggcgacatcgtgatggtggacgagagccagaccggcgagcccggctggctgggcggcgagctgaagggcaagaccggctggttccccgccaactacgccgagaagatccccgagaacgaggtgcccgcccccgtgaagcccgtgaccgacagcaccagcgcccccgcccccaagctggccctgagagagacccccgcccccctggccgtgaccagcagcgagcccagcaccacccccaacaactgggccgacttcagcagcacctggcccaccagcaccaacgagaagcccgagaccgacaactgggacgcctgggccgcccagcccagcctgaccgtgcccagcgccggccagctgagacagagaagcgccttcacccccgccaccgccaccggcagcagccccagccccgtgctgggccagcccgacttcctgctgcaccccagcatgagactgggccacatgcagcccagaatcgtgctgctgttccccgaccccctgcagtgcagcaccagcagactgctgcccatgctgagacccagacccggcgtgcccttcctgagaagccccagctgccagagccccagccaccccagcagacccatcagcgacgccgcccccagcgtgaagttcaccctgatgccccccggcagaatccacccctgcttcctgttcatccccgccgtgaacagcagaaacagcttcctggtgtacttcatcctgcccggcggcaccctgggctgcttctacctgtgcctgccccactacctgtag

SEQ ID NO: 323087 - DNA, 348 bp, Artificial Sequence
  derived and/or modified sequence
atggcccagttccccacccccttcggcggcagcctggacatctgggccatcaccgtggaggagagagccaagcacgaccagcagttccacagcctgaagcccatcagcggcttcatcaccggcgaccaggccagaaacttcttcttccagagcggcctgccccagcccgtgctggcccagatctgggccctggccgacatgaacaacgacggcagaatggaccaggtggagttcagcatcgccatgaagctgatcaagctgaagctgcagggctaccagctgcccagcgccctgccccccgtgatgaagcagcagcccgtggccatcagcagcgcccccgccttctag

SEQ ID NO: 323088 - DNA, 3811 bp, Artificial Sequence
  derived and/or modified sequence
agccgcgcgcccgccgcgccgccttgtgggcgctgtagtcccggagtccgcgtgcgcggggccgggtccgggagccccagggcagccgccccgccgagtcgcaggcacagcgtcaccttcgtcccctccggagctgcacgtggcctgagcaggatggtgccctccagcccagcggtggagaagcaggtgcccgtggaacctgggcctgaccccgagctccggtcctggcggcacctcgtgtgctacctttgcttctacggcttcatggcgcagatacggccaggggagagcttcatcaccccctacctcctggggcccgacaagaacttcacgcgggagcaggtcacgaacgagatcacgccggtgctgtcgtactcctacctggccgtgctggtgcccgtgttcctgctcaccgactacctgcgctacacgccggtgctgctgctgcaggggctcagcttcgtgtcggtgtggctgctgctgctgctgggccactcggtggcgcacatgcagctcatggagctcttctacagcgtcaccatggccgcgcgcatcgcctattcctcctacatcttctctctcgtgcggcccgcgcgctaccagcgtgtggccggctactcgcgcgctgcggtgctgctgggcgtgttcaccagctccgtgctgggccagctgctggtcactgtgggccgagtctccttctccacgctcaactacatctcgctggccttcctcaccttcagcgtggtcctcgccctcttcctgaagcgccccaagcgcagcctcttcttcaaccgcgacgaccgggggcggtgcgaaacctcggcttcggagctggagcgcatgaatcctggcccaggcgggaagctgggacacgccctgcgggtggcctgtggggactcagtgctggcgcggatgctgcgggagctgggggacagcctgcggcggccgcagctgcgcctgtggtccctctggtgggtcttcaactcggccggctactacctggtggtctactacgtgcacatcctgtggaacgaggtggaccccaccaccaacagtgcgcgggtctacaacggcgcggcagatgctgcctccacgctgctgggcgccatcacgtccttcgccgcgggcttcgtgaagatccgctgggcgcgctggtccaagctgctcatcgcgggcgtcacggccacgcaggcggggctggtcttccttctggcgcacacgcgccacccgagcagcatctggctgtgctatgcggccttcgtgctgttccgcggctcctaccagttcctcgtgcccatcgccacctttcagattgcatcttctctgtctaaagagctctgtgccctggtcttcggggtcaacacgttctttgccaccatcgtcaagaccatcatcactttcattgtctcggacgtgcggggcctgggcctcccggtccgcaagcagttccagttatactccgtgtacttcctgatcctgtccatcatctacttcttgggggccatgctggatggcctgcggcactgccagcggggccaccacccgcggcagcccccggcccagggcctgaggagtgccgcggaggagaaggcagcacaggcactgagcgtgcaggacaagggcctcggaggcctgcagccagcccagagcccgccgctttccccagaagacagcctgggggctgtggggccagcctccctggagcagagacagagcgacccatacctggcccaggccccggccccgcaggcagctgaattcctgagcccagtgacaaccccttccccctgcactctgtgctccgcccaagcctcaggccctgaggctgcagatgagacttgtccccagctggctgtccatcctcctggtgtcagcaagctgggtttgcagtgtcttccaagcgacggtgttcagaatgtgaaccagtgactctcgggcgcccctgtggtaactttgcaggcggccctcagtgcatccccacgacccctgcctcgagggccgcctgccttagcaatgggggcctccgcttatcctgctagcaggccccctaggattccccctgccctgtgccgcactctggcggtggccacagcgtgctggcgacactcagggcagctgcctggccatgctgtccctgcactgtgccccgcgggctttgttgctggaagaggtgggtggtgggcttctgcgtccaccaggcctcactggctcatgccccttggggggcttgagacaaatcctttctgccccccagggctagtgaagtggcctcttggataccagctcaggggacactggccccacaggagttgtgagccctctagggcagggtgggagccgggaccctcaggtgtagctgagctgtgacattgctggtcatccttggtgctcttgcttttttgaaagatgctttttttttttttaactgacgtagaatgaagaactgcatgtggcttctctgtctctgtggaaaagccatctcaggttggcggcagacacattgtcatcagaggggagcagcggctctggtcctcggagctggttcctctctcccaccctaagggcagccctccatggtcctgtctgtccttctgaagtgtgtccatcctgacctgcgggtcctcagctgctcccacacttgtgccagcccggaggggactggtcccggtcaccgcggacgtgctggccttggtatgtgccaggcttgcctgggctgggcagccttgggggggctgcctttgtggtgggcgctggggaagtacgtcccagcggcctcagggtctaaggagcgctagtgccttgcccacaggtgcgggaccatctgatgtgatgtgaatactcttcccacatacattaaacacacttaagtgagtgtgcgcagggcttctgattcagggccggcctggcctgggggttgagggtcagcagtcagtgaggaggccaggagaggcgtcccagccttctcccgcctccagcccacgcagggccttggtgcccatgagctgagcacccccacaaccctagtcaacggccctatcctgtggggcctctgccacatctcagcggccccaggtgaatggctggctgctcagcacggagagctggggagagaatctctggctggggaggggctgctggagctgctggacccaggggtctcccgaggtggctcaggggagcaggcatcttggggtaccctgggttgaggcagaggctgcacgtggaagatggcccgagtcagtggatggtgccagtcagacagggccatggtcccaggtgcatccaggggctctgtcatggccaccctggggaccctgcttgggggggggtctgcaccagccatttcctgggctcgtagatctagcaggatgtgatgggtggaggtgggctgggcctgtgccatgggctagagcgtcactggggaggcccacaccgccatcagaatcctcctcccagcgcctccccaacctgagggcctgctccctccgcagcctgctcactgcacccactgcctgcctgcctctgagtcctgcactcacccgtccaccaggacagggatggctgtcaggatgtagtgttgctgggagcaagtcaggtcctgctgtgaggagagacctaagagtgttggtgtgtgtccacacacccgtgcatgcctgtgtacctgtgcacactatggatgctcctgcacacctgtgtacaactgcacgcctgtgtatggccatgcatgcataccccatgtaaccgtgcgtgcctgtgcacactcgggatctgccagtggggcagtccagggataaaagactcctgagaactc

SEQ ID NO: 323089 - DNA, 1470 bp, Artificial Sequence
  derived and/or modified sequence
atggtgcccagcagccccgccgtggagaagcaggtgcccgtggagcccggccccgaccccgagctgagaagctggagacacctggtgtgctacctgtgcttctacggcttcatggcccagatcagacccggcgagagcttcatcaccccctacctgctgggccccgacaagaacttcaccagagagcaggtgaccaacgagatcacccccgtgctgagctacagctacctggccgtgctggtgcccgtgttcctgctgaccgactacctgagatacacccccgtgctgctgctgcagggcctgagcttcgtgagcgtgtggctgctgctgctgctgggccacagcgtggcccacatgcagctgatggagctgttctacagcgtgaccatggccgccagaatcgcctacagcagctacatcttcagcctggtgagacccgccagataccagagagtggccggctacagcagagccgccgtgctgctgggcgtgttcaccagcagcgtgctgggccagctgctggtgaccgtgggcagagtgagcttcagcaccctgaactacatcagcctggccttcctgaccttcagcgtggtgctggccctgttcctgaagagacccaagagaagcctgttcttcaacagagacgacagaggcagatgcgagaccagcgccagcgagctggagagaatgaaccccggccccggcggcaagctgggccacgccctgagagtggcctgcggcgacagcgtgctggccagaatgctgagagagctgggcgacagcctgagaagaccccagctgagactgtggagcctgtggtgggtgttcaacagcgccggctactacctggtggtgtactacgtgcacatcctgtggaacgaggtggaccccaccaccaacagcgccagagtgtacaacggcgccgccgacgccgccagcaccctgctgggcgccatcaccagcttcgccgccggcttcgtgaagatcagatgggccagatggagcaagctgctgatcgccggcgtgaccgccacccaggccggcctggtgttcctgctggcccacaccagacaccccagcagcatctggctgtgctacgccgccttcgtgctgttcagaggcagctaccagttcctggtgcccatcgccaccttccagatcgccagcagcctgagcaaggagctgtgcgccctggtgttcggcgtgaacaccttcttcgccaccatcgtgaagaccatcatcaccttcatcgtgagcgacgtgagaggcctgggcctgcccgtgagaaagcagaacgaggagctgcacgtggccagcctgagcctgtggaagagccacctgagactggccgccgacaccctgagcagcgagggcagcagcggcagcggccccagaagctggttcctgagccccaccctgagagccgccctgcacggccccgtgtgccccagcgaggtgtgccccagctag

SEQ ID NO: 323090 - DNA, 1470 bp, Artificial Sequence
  derived and/or modified sequence
atggtgccttcttcgccagcggtggagaagcaggtgcctgtggaaccaggtccagatcctgagttgcgatcctggaggcatctagtgtgttacctgtgtttttacggctttatggctcagattcgccctggggagagcttcataaccccataccttttgggcccggataagaactttactcgcgaacaggtgaccaatgagatcacccccgtcctgtcatattcctacctggccgtccttgtccctgtttttcttcttacagactacctgcgttacaccccagtgttgctactccagggcctgtccttcgtgtcggtgtggctccttctgctcttaggacactccgtagcacacatgcagttgatggagctgttctacagcgttacaatggccgcgagaattgcttactctagctacatcttctctttagtgaggcctgctcgctaccagcgggtagccggctactctagggccgccgttctcctcggggttttcacctcttctgtcctgggacagctcctggtgactgtcgggcgcgtgtccttcagtactctgaactacataagcctcgcctttctaacattctctgtggtactggccctttttcttaagcggcccaaacggtcactcttcttcaaccgagacgatcgggggcggtgcgagacatccgccagcgaacttgaaaggatgaatcccggacctgggggcaagctaggccatgcactgagagtcgcatgtggcgactccgtcctcgccagaatgttgcgcgagctgggcgactccctgcggcgcccccaactgagactgtggagcctgtggtgggtgttcaatagcgccggatattatcttgtggtgtattacgtacacatcctgtggaatgaagtggatccaaccaccaattcagccagggtatacaatggcgccgcagatgctgccagcacgctgctcggtgctattacctccttcgctgccggattcgtcaagattaggtgggctcgttggtctaaactgctgatcgcgggggttactgccacacaagcaggactagtatttctgctggcccacacaaggcacccgagcagcatatggctgtgctatgctgccttcgtgctattcaggggctcatatcaatttctcgtgcccattgcgacatttcagatagccagcagcctgtccaaggagctttgtgcgctggtatttggtgttaataccttcttcgccacaattgtgaaaactattattaccttcatcgtctcagatgtccgcggcctgggactccccgtgaggaaacagaacgaggagctgcatgtcgcctctctctcactgtggaaaagccacctgcgactcgccgcggacacgctgtctagtgaggggtcatcaggatccggccccagaagctggtttctgtcccccaccctccgagcagccctccacggacccgtgtgcccctcagaggtatgtccttcctag

SEQ ID NO: 323091 - DNA, 1470 bp, Artificial Sequence
  derived and/or modified sequence
atggtgcccagcagccctgctgtggagaagcaggtgcctgtggagcccggccctgaccctgagctgcgctcctggaggcacctggtgtgctacctgtgcttctacggcttcatggcccagatccggcctggagagagcttcatcaccccctacctgctgggccctgacaagaacttcacccgggagcaggtgaccaatgagatcacccctgtgctgagctacagctacctggccgtgctggtgcctgtgttcctgctgacagactacctgcgctacacccctgtgctgctgctgcagggcctgagctttgtgtctgtgtggctgctgctgctgctgggccacagcgtggcccacatgcagctgatggagctgttctacagcgtgaccatggccgcccgcatcgcctacagcagctacatcttcagcctggtgcggcctgcccgctaccagagggtggccggctacagcagagctgctgtgctgctgggcgtcttcaccagctctgtgctgggccagctgctggtgacagtgggccgggtgtccttcagcaccctgaactacatcagcctggccttcctgaccttctctgtggtgctggccctcttcctgaagaggcccaagaggagcctcttcttcaacagagatgaccggggccgctgtgagaccagcgccagcgagctggagaggatgaaccctggccctgggggcaagctgggccacgccctgcgggtggcctgtggggacagcgtgctggccaggatgctgcgggagctgggggacagcctgcggcggccccagctgcggctgtggagcctgtggtgggtgttcaacagcgctggctactacctggtggtgtactacgtgcacatcctgtggaatgaggtggaccccaccaccaacagcgcccgggtgtacaacggggctgctgatgctgccagcaccctgctgggcgccatcaccagctttgctgctggctttgtgaagatccgctgggcccgctggagcaagctgctgattgctggggtgacagccacccaggccggcctggtgttcctgctggcccacaccaggcaccccagcagcatctggctgtgctatgctgcctttgtgctcttccggggcagctaccagttcctggtgcccatcgccaccttccagatcgccagcagcctgagcaaggagctgtgtgccctggtgtttggagtgaacaccttctttgccaccatcgtgaagaccatcatcaccttcatcgtgtctgatgtgcggggcctgggcctgcctgtgaggaagcagaatgaggagctgcacgtggccagcctgagcctgtggaagagccacctgcggctggccgctgacaccctgagcagcgagggcagcagcggcagcggccccaggtcctggttcctgagccccaccctgcgggccgccctgcacggccctgtgtgccccagcgaggtgtgccccagctag

SEQ ID NO: 323092 - DNA, 1470 bp, Artificial Sequence
  derived and/or modified sequence
atggtgcccagcagccccgccgtggagaagcaggtgcccgtggagcctggaccagaccccgagctccgctcctggcgacatctagtttgttacctctgcttttatggattcatggcccagatccgtcctggcgagagttttattactccgtacttactgggtccagataaaaatttcacaagggagcaggtaactaatgagatcactcccgttttaagctattcttatcttgccgtgctcgtccctgtcttcttgctgactgactacttacgatatacgccggttctcttgctgcaggggctgagtttcgtgtccgtctggcttctgttgctgctgggacactccgtggcccatatgcagctgatggaattgttctactctgtgaccatggctgccaggattgcctattctagctacatattttcccttgtgaggcctgctagatatcagagagtcgcagggtattctagggcggccgtgcttctcggtgtattcacctctagcgtccttggccagctactggtgactgtgggcagggtgagtttttccactctcaattatatctccctggcattcctgactttttccgtcgtgctggcacttttcctgaagaggccaaaacgctcactgttcttcaatcgcgacgatagggggcgctgcgagacatccgccagtgaactggagcggatgaacccaggacctggaggcaagcttggccacgccctgcgtgtggcctgcggggattctgtgcttgcccgaatgctgagagagctgggggactcactgaggagaccccagctaaggctttggagtctctggtgggtgtttaattcggctggttactatttggtcgtatattatgtacacattctgtggaatgaggttgatccaaccacaaattctgcccgcgtgtataatggagctgctgacgccgcatcaaccctgttgggagccatcacaagctttgccgccggctttgttaagatcagatgggcccggtggagcaagctgctgattgctggcgtaaccgccacacaagccggtctggtgtttcttctcgcccacacacgacatccaagctcgatatggctctgctacgccgcatttgtgctctttcggggctcatatcagtttcttgtgcccatcgctacatttcagattgcttctagtctgtcaaaggagctgtgcgcattagtgtttggcgttaacacattcttcgctactattgtgaagactatcattacgttcattgtgagtgacgtgagaggccttggattgcctgtaagaaagcagaacgaagagctgcatgtcgcttctctgagtttgtggaaaagtcatttacgtctcgccgctgacaccctgtcttcagaaggatccagtggttcaggccctcgttcttggttcctcagccccaccctccgcgcagccctccatggccctgtgtgtcctagcgaggtttgcccttcctag

SEQ ID NO: 323093 - DNA, 1470 bp, Artificial Sequence
  derived and/or modified sequence
atggtcccttcttctcctgctgtcgagaaacaggtccctgtggaacctggaccagaccctgagctgcgcagttggcggcacctagtctgctacttgtgcttttatggctttatggcgcagatacgcccaggagagtcgttcatcaccccgtatctgttaggccctgacaaaaactttactagagaacaggtaactaatgaaattacccccgttctgtcctacagctatttggcagttctggttcccgtcttccttttaacagattacctgaggtatactcccgtgctcctgctgcaggggctttcttttgtgagcgtttggctgctcctgttacttggccatagtgtcgctcacatgcagctgatggaactgttctacagcgtgacaatggcggctcgcatcgcctactcaagctacatcttcagtttagtgaggcccgcaaggtatcagcgggtcgccggatactccagagctgccgtgctcttgggagtgtttacttccagtgtgctgggccagctccttgttaccgtgggaagggtgagtttttccaccctgaactacatttctcttgccttcctcacttttagcgtggtccttgccctcttcctgaagcggcctaagagatcactgttcttcaaccgcgacgacaggggtcgctgcgaaacttccgccagcgagctggaacggatgaatccaggacctgggggtaagcttggacacgccctgagagtcgcttgtggggacagcgtcctcgcaaggatgctgcgcgagctaggcgattccctgcggagaccccaacttcgtctgtggtcgctatggtgggtcttcaacagtgctggatattacttagtggtgtactacgtgcatatcctttggaatgaggtcgatcccacaacaaacagcgcaagagtgtacaatggagccgctgatgctgcctccacacttcttggggctattacctccttcgccgctggatttgtgaagataagatgggccagatggagcaagttattgatcgccggtgtcaccgctacccaggccggtcttgtgttcctgttggcacatacgaggcacccctcctctatctggctgtgctacgccgctttcgttctgtttcgcggatcctaccagttcctggttcccattgctaccttccagatcgcgtccagtctgtccaaggagttgtgtgctctggtctttggagttaatacatttttcgccactatcgtgaagaccatcatcactttcattgtgtctgatgtaagaggactggggttaccggtgcggaagcagaacgaggagcttcacgtagcctccctgtctttatggaagtcacacttgcgactggcagccgatacgctgagctccgagggctcctcaggatccggccctaggtcatggttcctaagtccaactctgagagccgctctacacggccctgtttgtccttccgaggtctgcccgtcctag

SEQ ID NO: 323094 - DNA, 1884 bp, Artificial Sequence
  derived and/or modified sequence
agccgcgcgcccgccgcgccgccttgtgggcgctgtagtcccggagtccgcgtgcgcggggccgggtccgggagccccagggcagccgccccgccgagtcgcaggcacagcgtcaccttcgtcccctccggagctgcacgtggcctgagcaggatggtgccctccagcccagcggtggagaagcaggtgcccgtggaacctgggcctgaccccgagctccggtcctggcggcacctcgtgtgctacctttgcttctacggcttcatggcgcagatacggccaggggagagcttcatcaccccctacctcctggggcccgacaagaacttcacgcgggagcaggtcacgaacgagatcacgccggtgctgtcgtactcctacctggccgtgctggtgcccgtgttcctgctcaccgactacctgcgctacacgccggtgctgctgctgcaggggctcagcttcgtgtcggtgtggctgctgctgctgctgggccactcggtggcgcacatgcagctcatggagctcttctacagcgtcaccatggccgcgcgcatcgcctattcctcctacatcttctctctcgtgcggcccgcgcgctaccagcgtgtggccggctactcgcgcgctgcggtgctgctgggcgtgttcaccagctccgtgctgggccagctgctggtcactgtgggccgagtctccttctccacgctcaactacatctcgctggccttcctcaccttcagcgtggtcctcgccctcttcctgaagcgccccaagcgcagcctcttcttcaaccgcgacgaccgggggcggtgcgaaacctcggcttcggagctggagcgcatgaatcctggcccaggcgggaagctgggacacgccctgcgggtggcctgtggggactcagtgctggcgcggatgctgcgggagctgggggacagcctgcggcggccgcagctgcgcctgtggtccctctggtgggtcttcaactcggccggctactacctggtggtctactacgtgcacatcctgtggaacgaggtggaccccaccaccaacagtgcgcgggtctacaacggcgcggcagatgctgcctccacgctgctgggcgccatcacgtccttcgccgcgggcttcgtgaagatccgctgggcgcgctggtccaagctgctcatcgcgggcgtcacggccacgcaggcggggctggtcttccttctggcgcacacgcgccacccgagcagcatctggctgtgctatgcggccttcgtgctgttccgcggctcctaccagttcctcgtgcccatcgccacctttcagattgcatcttctctgtctaaagagctctgtgccctggtcttcggggtcaacacgttctttgccaccatcgtcaagaccatcatcactttcattgtctcggacgtgcggggcctgggcctcccggtccgcaagcagaatgaagaactgcatgtggcttctctgtctctgtggaaaagccatctcaggttggcggcagacacattgtcatcagaggggagcagcggctctggtcctcggagctggttcctctctcccaccctaagggcagccctccatggtcctgtctgtccttctgaagtgtgtccatcctgacctgcgggtcctcagctgctcccacacttgtgccagcccggaggggactggtcccggtcaccgcggacgtgctggccttggtatgtgccaggcttgcctgggctgggcagccttgggggggctgcctttgtggtgggcgctggggaagtacgtcccagcggcctcagggtctaaggagcgctagtgccttgcccacaggtgcgggaccatctgatgtgatgtgaatactcttcccacatacattaaacacacttaagtgag

SEQ ID NO: 323095 - DNA, 1724 bp, Artificial Sequence
  derived and/or modified sequence
gtagtcccggagtccgcgtgcgcggggccgggtccgggagccccagggcagccgccccgccgagtcgcaggcacagcgtcaccttcgtcccctccggagctgcacgtggcctgagcaggatggtgccctccagcccagcggtggagaagcaggtgcccgtggaacctgggcctgaccccgagctccggtcctggcggcacctcgtgtgctacctttgcttctacggcttcatggcgcagatacggccaggggagagcttcatcaccccctacctcctggggcccgacaagaacttcacgcgggagcaggtcacgaacgagatcacgccggtgctgtcgtactcctacctggccgtgctggtgcccgtgttcctgctcaccgactacctgcgctacacgccggtgctgctgctgcaggggctcagcttcgtgtcggtgtggctgctgctgctgctgggccactcggtggcgcacatgcagctcatggagctcttctacagcgtcaccatggccgcgcgcatcgcctattcctcctacatcttctctctcgtgcggcccgcgcgctaccagcgtgtggccggctactcgcgcgctgcggtgctgctgggcgtgttcaccagctccgtgctgggccagctgctggtcactgtgggccgagtctccttctccacgctcaactacatctcgctggccttcctcaccttcagcgtggtcctcgccctcttcctgaagcgccccaagcgcagcctcttcttcaaccgcgacgaccgggggcggtgcgaaacctcggcttcggagctggagcgcatgaatcctggcccaggcgggaagctgggacacgccctgcgggtggcctgtggggactcagtgctggcgcggatgctgcgggagctgggggacagcctgcggcggccgcagctgcgcctgtggtccctctggtgggtcttcaactcggccggctactacctggtggtctactacgtgcacatcctgtggaacgaggtggaccccaccaccaacagtgcgcgggtctacaacggcgcggcagatgctgcctccacgctgctgggcgccatcacgtccttcgccgcgggcttcgtgaagatccgctgggcgcgctggtccaagctgctcatcgcgggcgtcacggccacgcaggcggggctggtcttccttctggcgcacacgcgccacccgagcagcatctggctgtgctatgcggccttcgtgctgttccgcggctcctaccagttcctcgtgcccatcgccacctttcagattgcatcttctctgtctaaagagctctgtgccctggtcttcggggtcaacacgttctttgccaccatcgtcaagaccatcatcactttcattgtctcggacgtgcggggcctgggcctcccggtccgcaagcaggccttaaggatgtcccggcccagactcggcctctgcctgcctggtcccttcccaccccagagtgcagccccagcaagagcaggtatggcggcctcctctgcagaggaccctggcagcgagaggggaccctggcggcgagcggggaccgtggcggcgagaggggaccctggcggcgagaggggaccgtggcggcgagaggggaccctggcggcgagaggggaccctggcggcgagaggggaccgtggtggcgagagggaaccctggcggcaaaaccgagaatgcagtgggtcactcgggccacggctccctga

SEQ ID NO: 323096 - DNA, 648 bp, Artificial Sequence
  derived and/or modified sequence
gtggatccggcgttcgcgcccaggcacgtgttgcttcgggacgggccagccggcacagcgtcaccttcgtcccctccggagctgcacgtggcctgagcaggatggtgccctccagcccagcggtggagaagcaggtgcccgtggaacctgggcctgaccccgagctccggtcctggcggcacctcgtgtgctacctttgcttctacggcttcatggcgcagatacggccaggggagagcttcatcaccccctacctcctggggcccgacaagaacttcacgcgggagcaggtcacgaacgagatcacgccggtgctgtcgtactcctacctggccgtgctggtgcccgtgttcctgctcaccgactacctgcgctacacgccggtgctgctgctgcaggggctcagcttcgtgtcggtgtggctgctgctgctgctgggccactcggtggcgcacatgcagctcatggagctcttctacagcgtcaccatggccgcgcgcatcgcctattcctcctacatcttctctctcgtgcggcccgcgcgctaccagcgtgtggccggctactcgcgcgctgcggtgctgctgggcgtgttcaccagctccgtgctgggccagctgctggtcactgtgggccgagtctccttct

SEQ ID NO: 323097 - DNA, 777 bp, Artificial Sequence
  derived and/or modified sequence
tcctcaatggaggtttctgtaagttcttcacgagtctcctggctcttccctcagagcagctgcctctagattacaactgccaagtgctgttggtggcagaagccctacctccccactccgaagcagctcctgcaggaaacctgggccttgtgtggctggggaactcccaggactcctgccacgcagggggacccgagggcagcttgggcaggcccctcgcggccgggggcggattcgctcggctacacctgaccggagagacaggcacagcgtcaccttcgtcccctccggagctgcacgtggcctgagcaggatggtgccctccagcccagcggtggagaagcaggtgcccgtggaacctgggcctgaccccgagctccggtcctggcggcacctcgtgtgctacctttgcttctacggcttcatggcgcagatacggccaggggagagcttcatcaccccctacctcctggggcccgacaagaacttcacgcgggagcaggtcacgaacgagatcacgccggtgctgtcgtactcctacctggccgtgctggtgcccgtgttcctgctcaccgactacctgcgctacacgccggtgctgctgctgcaggggctcagcttcgtgtcggtgtggctgctgctgctgctgggccactcggtggcgcacatgcagctcatggagctcttctacagcgtcaccatggccgcgcgcatcgcctattcctcctacatcttctctctcgtgcggcccgcgcgctaccagcgtgtggccggcta

SEQ ID NO: 323098 - DNA, 580 bp, Artificial Sequence
  derived and/or modified sequence
agtcctcaatggaggtttctgtaagttcttcacgagtctcctggctcttccctcagagcagctgcctctagattacaactgccaagtgctgttggtggcagaagccctacctccccactccgaagcagctcctgcaggaaacctgggccttgtgtggctggggaactcccaggactcctgccacgcagggggacccgagggcagcttgggcaggcccctcgcggccgggggcggattcgctcggctacacctgaccggagagacagcagggccaggttctgcccacccgtggagaaggccagtacaggggagagagccagggctcccacaaagcagggggtccctccaggcacagcgtcaccttcgtcccctccggagctgcacgtggcctgagcaggatggtgccctccagcccagcggtggagaagcaggtgcccgtggaacctgggcctgaccccgagctccggtcctggcggcacctcgtgtgctacctttgcttctacggcttcatggcgcagatacggccaggggagagcttcatcaccccctacctcctggggcccgacaagaacttcacgcg

SEQ ID NO: 323099 - protein, 591 aa, Artificial Sequence
  derived and/or modified sequence
MVPSSPAVEKQVPVEPGPDPELRSWRHLVCYLCFYGFMAQIRPGESFITPYLLGPDKNFTREQVTNEITPVLSYSYLAVLVPVFLLTDYLRYTPVLLLQGLSFVSVWLLLLLGHSVAHMQLMELFYSVTMAARIAYSSYIFSLVRPARYQRVAGYSRAAVLLGVFTSSVLGQLLVTVGRVSFSTLNYISLAFLTFSVVLALFLKRPKRSLFFNRDDRGRCETSASELERMNPGPGGKLGHALRVACGDSVLARMLRELGDSLRRPQLRLWSLWWVFNSAGYYLVVYYVHILWNEVDPTTNSARVYNGAADAASTLLGAITSFAAGFVKIRWARWSKLLIAGVTATQAGLVFLLAHTRHPSSIWLCYAAFVLFRGSYQFLVPIATFQIASSLSKELCALVFGVNTFFATIVKTIITFIVSDVRGLGLPVRKQFQLYSVYFLILSIIYFLGAMLDGLRHCQRGHHPRQPPAQGLRSAAEEKAAQALSVQDKGLGGLQPAQSPPLSPEDSLGAVGPASLEQRQSDPYLAQAPAPQAAEFLSPVTTPSPCTLCSAQASGPEAADETCPQLAVHPPGVSKLGLQCLPSDGVQNVNQ

SEQ ID NO: 323100 - DNA, 1776 bp, Artificial Sequence
  derived and/or modified sequence
atggtgcccagcagccccgccgtggagaagcaggtgcccgtggagcccggccccgaccccgagctgagaagctggagacacctggtgtgctacctgtgcttctacggcttcatggcccagatcagacccggcgagagcttcatcaccccctacctgctgggccccgacaagaacttcaccagagagcaggtgaccaacgagatcacccccgtgctgagctacagctacctggccgtgctggtgcccgtgttcctgctgaccgactacctgagatacacccccgtgctgctgctgcagggcctgagcttcgtgagcgtgtggctgctgctgctgctgggccacagcgtggcccacatgcagctgatggagctgttctacagcgtgaccatggccgccagaatcgcctacagcagctacatcttcagcctggtgagacccgccagataccagagagtggccggctacagcagagccgccgtgctgctgggcgtgttcaccagcagcgtgctgggccagctgctggtgaccgtgggcagagtgagcttcagcaccctgaactacatcagcctggccttcctgaccttcagcgtggtgctggccctgttcctgaagagacccaagagaagcctgttcttcaacagagacgacagaggcagatgcgagaccagcgccagcgagctggagagaatgaaccccggccccggcggcaagctgggccacgccctgagagtggcctgcggcgacagcgtgctggccagaatgctgagagagctgggcgacagcctgagaagaccccagctgagactgtggagcctgtggtgggtgttcaacagcgccggctactacctggtggtgtactacgtgcacatcctgtggaacgaggtggaccccaccaccaacagcgccagagtgtacaacggcgccgccgacgccgccagcaccctgctgggcgccatcaccagcttcgccgccggcttcgtgaagatcagatgggccagatggagcaagctgctgatcgccggcgtgaccgccacccaggccggcctggtgttcctgctggcccacaccagacaccccagcagcatctggctgtgctacgccgccttcgtgctgttcagaggcagctaccagttcctggtgcccatcgccaccttccagatcgccagcagcctgagcaaggagctgtgcgccctggtgttcggcgtgaacaccttcttcgccaccatcgtgaagaccatcatcaccttcatcgtgagcgacgtgagaggcctgggcctgcccgtgagaaagcagttccagctgtacagcgtgtacttcctgatcctgagcatcatctacttcctgggcgccatgctggacggcctgagacactgccagagaggccaccaccccagacagccccccgcccagggcctgagaagcgccgccgaggagaaggccgcccaggccctgagcgtgcaggacaagggcctgggcggcctgcagcccgcccagagcccccccctgagccccgaggacagcctgggcgccgtgggccccgccagcctggagcagagacagagcgacccctacctggcccaggcccccgccccccaggccgccgagttcctgagccccgtgaccacccccagcccctgcaccctgtgcagcgcccaggccagcggccccgaggccgccgacgagacctgcccccagctggccgtgcacccccccggcgtgagcaagctgggcctgcagtgcctgcccagcgacggcgtgcagaacgtgaaccagtag

SEQ ID NO: 323101 - DNA, 1776 bp, Artificial Sequence
  derived and/or modified sequence
atggttccctcaagcccagcagtcgagaaacaagtgccagtggagcctggccccgaccccgaactccgtagctggagacatttggtgtgttacctctgcttctacggcttcatggcacaaataaggcccggcgagtctttcattacgccatatcttttgggcccagacaaaaattttacacgagaacaagtcaccaatgaaatcacccctgtcctcagctacagttacttggcagtgctggttccggtgttcctgctgacagactacctccgatatacaccagtgctccttctccagggcttgagcttcgtaagcgtctggttgttgcttttattgggccatagtgtggcccatatgcagctaatggagctgttttacagcgtgactatggccgctcgcatagcctatagtagctacatattctcactggttcggcccgctagatatcagagagtagcaggctactcccgggctgccgtgctcttgggggtgttcacctcatccgtactggggcagctgcttgttacagtaggccgcgtgtccttcagcaccctgaattatatctctctggcctttcttactttctcagtcgtcttggctctgttcctcaagaggcccaaaagaagcctgttcttcaatagagatgatcgggggcggtgcgaaactagcgcctctgaattagagcgaatgaaccccggacccggggggaagctgggacatgcccttagagtcgcatgtggcgacagtgtgcttgctagaatgctcagggagttaggagatagcctcagacggccccaattgcgactctggtcgctgtggtgggtgtttaatagcgccggctactatttagtggtctactatgtgcacatcctgtggaatgaagtggaccccacaaccaactctgcccgcgtgtacaacggcgccgctgatgccgcaagtaccctactcggtgccattacttcattcgccgccggattcgtcaagatccggtgggcacggtggtccaaactcctcattgcgggcgtgaccgccacacaagccggactggtattcctgctggcacacaccaggcatccctccagcatatggctgtgctacgcagcatttgtcctgtttcgcggaagctaccagttcctcgtgccaattgcaacctttcaaattgcgagcagtctatccaaggagctgtgtgctcttgtcttcggagtgaatacattcttcgccacaatcgtcaaaactattataaccttcatcgtgtccgacgtgagaggccttggtctcccagtccggaaacagttccagctttacagcgtctattttctgatccttagtatcatatattttctaggagctatgctggatggcctgagacactgtcagcgcggtcatcatccaaggcagccacctgcccaggggcttcggtccgcggccgaggaaaaagctgcccaggccctatctgtccaggataagggtctcggcgggcttcagcctgcccaaagtcctcctctaagtccagaggatagcctcggtgccgtcggccctgcctccctggagcagcggcagagcgacccctatctagctcaggctcccgcaccgcaggcggccgagttcctgtcgcctgtcacaacgccgagcccttgtacattatgctccgctcaggcatctgggcctgaagcggcggatgaaacatgccctcaactcgccgtgcatccaccgggggtctctaagctgggcctgcagtgtctgccatctgatggcgtccagaatgtgaaccagtag

SEQ ID NO: 323102 - DNA, 1776 bp, Artificial Sequence
  derived and/or modified sequence
atggtgcccagcagccctgctgtggagaagcaggtgcctgtggagcccggccctgaccctgagctgcgctcctggaggcacctggtgtgctacctgtgcttctacggcttcatggcccagatccggcctggagagagcttcatcaccccctacctgctgggccctgacaagaacttcacccgggagcaggtgaccaatgagatcacccctgtgctgagctacagctacctggccgtgctggtgcctgtgttcctgctgacagactacctgcgctacacccctgtgctgctgctgcagggcctgagctttgtgtctgtgtggctgctgctgctgctgggccacagcgtggcccacatgcagctgatggagctgttctacagcgtgaccatggccgcccgcatcgcctacagcagctacatcttcagcctggtgcggcctgcccgctaccagagggtggccggctacagcagagctgctgtgctgctgggcgtcttcaccagctctgtgctgggccagctgctggtgacagtgggccgggtgtccttcagcaccctgaactacatcagcctggccttcctgaccttctctgtggtgctggccctcttcctgaagaggcccaagaggagcctcttcttcaacagagatgaccggggccgctgtgagaccagcgccagcgagctggagaggatgaaccctggccctgggggcaagctgggccacgccctgcgggtggcctgtggggacagcgtgctggccaggatgctgcgggagctgggggacagcctgcggcggccccagctgcggctgtggagcctgtggtgggtgttcaacagcgctggctactacctggtggtgtactacgtgcacatcctgtggaatgaggtggaccccaccaccaacagcgcccgggtgtacaacggggctgctgatgctgccagcaccctgctgggcgccatcaccagctttgctgctggctttgtgaagatccgctgggcccgctggagcaagctgctgattgctggggtgacagccacccaggccggcctggtgttcctgctggcccacaccaggcaccccagcagcatctggctgtgctatgctgcctttgtgctcttccggggcagctaccagttcctggtgcccatcgccaccttccagatcgccagcagcctgagcaaggagctgtgtgccctggtgtttggagtgaacaccttctttgccaccatcgtgaagaccatcatcaccttcatcgtgtctgatgtgcggggcctgggcctgcctgtgaggaagcagttccagctgtacagcgtgtacttcctgatcctgagcatcatctacttcctgggcgccatgctggatggcctgcggcactgccagaggggccaccacccccggcagcccccagcccagggcctgcggtctgctgctgaggagaaggccgcccaggccctgtctgtgcaggacaagggcctgggcggcctgcagcctgcccagagcccccccctgagccctgaggacagcctgggcgctgtgggccctgccagcctggagcagaggcagagcgacccctacctggcccaggccccagccccccaggccgctgagttcctgagccctgtgaccacccccagcccctgcaccctgtgcagcgcccaggccagcggccctgaggccgcagatgagacctgcccccagctggccgtgcaccccccaggagtgtccaagctgggcctgcagtgcctgcccagtgatggagtgcagaatgtgaaccagtag

SEQ ID NO: 323103 - DNA, 1776 bp, Artificial Sequence
  derived and/or modified sequence
atggtgcccagcagccccgccgtggagaagcaggtgcccgtggagccgggacccgaccctgagttgcgatcctggagacatttagtgtgctatctctgcttctacgggttcatggcacagattcgacctggcgaaagtttcataaccccatacctgcttgggccagacaaaaattttaccagagagcaggtcaccaatgagattacacctgtgcttagctactcttatttggctgttcttgtgcccgtgtttctgctgactgattatctgagatacacgcccgtactgctgctccaggggctgagcttcgtgtcagtttggttgcttctgctgcttggtcacagcgtcgcccatatgcagctcatggagctgttttactctgttactatggcagcaaggatcgcttactctagctatatattttcactggttaggcccgccaggtaccagcgagtggctggatattcacgcgccgccgttctgctcggagtctttacgtcttctgttttgggacagctactggtgacagtggggagagttagcttctccactctaaattacatctcactcgcgtttctgacattttctgtggttctcgccctctttctgaagcggccgaagagatccctgtttttcaacagagatgaccgtggtcggtgtgaaacatctgccagcgaactggagcggatgaatccaggtcctggtggaaagctagggcacgcgctgcgcgtcgcctgcggggactccgttctggcccgcatgttaagggagctgggagattctctccggcgaccacagctgcggctttggtccctctggtgggtctttaatagcgcagggtactacctggtcgtgtactacgtgcatatcctgtggaacgaggtagatccgaccactaattcagcaagagtctataacggagccgctgacgctgcctccactctccttggggcaattacaagcttcgctgccggctttgtaaaaatcagatgggcccgctggtctaaattgctcattgccggcgtaaccgctactcaggcgggcctggtctttctacttgcacatacacggcacccctcctccatttggctatgttatgccgccttcgtgctgtttcgcgggtcataccagttcttagtgccaattgccacattccagatcgcttcctctctcagcaaggagctctgtgccctagtattcggggttaacacattcttcgctaccatagttaaaaccatcatcacctttatcgtatcagacgtgaggggtctaggcctccccgtccgaaagcagttccagctctactccgtctattttctcatcctgtcgattatctacttcctcggcgcgatgttggatgggctaagacactgccagcgcggacatcaccctaggcagccccctgcacaggggcttaggagtgcagcagaggagaaggctgcacaggcgctaagcgtccaggacaagggattaggaggcctgcaacccgcccagagtccaccgctcagtcccgaggatagtttaggggctgtgggccctgctagcctggaacagaggcaatccgatccatatctggctcaagcgcccgctccacaggccgccgaattccttagtcccgtgacgacaccttcgccctgcactctttgttcggcccaggccagtgggcctgaagccgctgacgagacttgcccacagttagccgtgcatcctcccggagtgagcaagctcggactgcagtgtttgccaagcgatggcgtacagaatgtgaatcagtag

SEQ ID NO: 323104 - DNA, 1776 bp, Artificial Sequence
  derived and/or modified sequence
atggtcccaagctcgcctgccgtcgaaaagcaggtaccagttgaacccggaccagatccagaactgcgcagctggagacatttggtttgttatctttgcttttacggtttcatggcccaaattaggccaggggagtcattcattaccccttacctcttgggacctgacaagaattttacgcgtgagcaggtgacaaatgaaatcacaccggtgctgtcctactcatatttggctgttctcgtaccagttttcctgctcaccgattacctgcggtatacacccgtgttgttacttcagggactgagcttcgtttctgtctggcttctgctgcttctcggccactcagtcgcacacatgcagctcatggagctgttctactccgttaccatggcggctagaatagcatactcgtcgtatatcttctctctcgtgagacctgcgagataccaaagggtcgccggttatagccgggcagctgtgctgctgggcgtttttacatcttctgtactcgggcaactgctggtgactgttggccgagtgtcgttttctaccctgaattacatctctctggcgtttcttacgttcagtgtggtcctagcacttttcctgaaacgaccaaaaaggagcttgttcttcaatcgagacgacagaggccgatgtgagacctccgcgagtgaacttgagcggatgaatccagggccagggggaaagttgggccacgccctccgagtcgcgtgcggggacagtgtcctcgcccgaatgctccgggagttgggggactcattacgtcgaccgcagttgcggctctggtccttgtggtgggtgttcaactccgccggatactatctcgtggtatattacgtccatattctctggaatgaggtcgatcctacaactaattccgcaagggtgtacaacggcgctgctgatgccgcatccacattgctcggggcaatcacgagctttgctgctggcttcgtgaagatccgctgggcacgttggagcaagctcctgattgccggtgtgaccgccactcaggccggactggtgtttcttctggctcataccaggcacccgtcctcaatctggctgtgctacgctgccttcgtgctgttccgaggatcgtaccaattccttgttccaatagcaaccttccagatcgcttcaagcctcagcaaagaactgtgtgcccttgtgtttggggtgaatactttctttgctacgatcgtgaagaccatcatcacctttattgtaagtgacgtgcgcggtcttggcctccccgtacgtaaacagttccagctttattctgtttattttctgattttgtctataatctattttcttggtgcaatgctagatgggctacgtcactgtcagagggggcaccaccctcgccagccacccgctcagggactgcgcagtgccgctgaggaaaaagccgcacaagccttgtctgtgcaggataagggattgggcggtttgcagcccgctcagagtccaccactgagccctgaggactctctgggcgctgttggccctgcttcactcgagcagaggcagagcgatccttacctggcgcaggccccagccccacaggccgctgagttcctcagccccgtgaccactccatctccttgtacactctgcagcgcccaggcctcagggccagaagccgctgatgaaacctgccctcagctggcagtccaccccccaggggtgtccaagcttgggcttcaatgcctcccttcagatggtgtgcagaatgtaaatcagtag

SEQ ID NO: 323105 - protein, 281 aa, Artificial Sequence
  derived and/or modified sequence
MLRELGDSLRRPQLRLWSLWWVFNSAGYYLVVYYVHILWNEVDPTTNSARVYNGAADAASTLLGAITSFAAGFVKIRWARWSKLLIAGVTATQAGLVFLLAHTRHPSSIWLCYAAFVLFRGSYQFLVPIATFQIASSLSKELCALVFGVNTFFATIVKTIITFIVSDVRGLGLPVRKQALRMSRPRLGLCLPGPFPPQSAAPARAGMAASSAEDPGSERGPWRRAGTVAARGDPGGERGPWRREGTLAARGDPGGERGPWWREGTLAAKPRMQWVTRATAP

SEQ ID NO: 323106 - protein, 269 aa, Artificial Sequence
  derived and/or modified sequence
  misc_feature (1)..(1): Xaa can be any naturally occurring amino acid
XLRLWSLWWVFNSAGYYLVVYYVHILWNEVDPTTNSARVYNGAADAASTLLGAITSFAAGFVKIRWARWSKLLIAGVTATQAGLVFLLAHTRHPSSIWLCYAAFVLFRGSYQFLVPIATFQIASSLSKELCALVFGVNTFFATIVKTIITFIVSDVRGLGLPVRKQALRMSRPRLGLCLPGPFPPQSAAPARAGMAASSAEDPGSERGPWRRAGTVAARGDPGGERGPWRREGTLAARGDPGGERGPWWREGTLAAKPRMQWVTRATAP

SEQ ID NO: 323107 - DNA, 846 bp, Artificial Sequence
  derived and/or modified sequence
atgctgagagagctgggcgacagcctgagaagaccccagctgagactgtggagcctgtggtgggtgttcaacagcgccggctactacctggtggtgtactacgtgcacatcctgtggaacgaggtggaccccaccaccaacagcgccagagtgtacaacggcgccgccgacgccgccagcaccctgctgggcgccatcaccagcttcgccgccggcttcgtgaagatcagatgggccagatggagcaagctgctgatcgccggcgtgaccgccacccaggccggcctggtgttcctgctggcccacaccagacaccccagcagcatctggctgtgctacgccgccttcgtgctgttcagaggcagctaccagttcctggtgcccatcgccaccttccagatcgccagcagcctgagcaaggagctgtgcgccctggtgttcggcgtgaacaccttcttcgccaccatcgtgaagaccatcatcaccttcatcgtgagcgacgtgagaggcctgggcctgcccgtgagaaagcaggccctgagaatgagcagacccagactgggcctgtgcctgcccggccccttccccccccagagcgccgcccccgccagagccggcatggccgccagcagcgccgaggaccccggcagcgagagaggcccctggagaagagccggcaccgtggccgccagaggcgaccccggcggcgagagaggcccctggagaagagagggcaccctggccgccagaggcgaccccggcggcgagagaggcccctggtggagagagggcaccctggccgccaagcccagaatgcagtgggtgaccagagccaccgccccctag

SEQ ID NO: 323108 - DNA, 810 bp, Artificial Sequence
  derived and/or modified sequence
tgactgagactgtggagcctgtggtgggtgttcaacagcgccggctactacctggtggtgtactacgtgcacatcctgtggaacgaggtggaccccaccaccaacagcgccagagtgtacaacggcgccgccgacgccgccagcaccctgctgggcgccatcaccagcttcgccgccggcttcgtgaagatcagatgggccagatggagcaagctgctgatcgccggcgtgaccgccacccaggccggcctggtgttcctgctggcccacaccagacaccccagcagcatctggctgtgctacgccgccttcgtgctgttcagaggcagctaccagttcctggtgcccatcgccaccttccagatcgccagcagcctgagcaaggagctgtgcgccctggtgttcggcgtgaacaccttcttcgccaccatcgtgaagaccatcatcaccttcatcgtgagcgacgtgagaggcctgggcctgcccgtgagaaagcaggccctgagaatgagcagacccagactgggcctgtgcctgcccggccccttccccccccagagcgccgcccccgccagagccggcatggccgccagcagcgccgaggaccccggcagcgagagaggcccctggagaagagccggcaccgtggccgccagaggcgaccccggcggcgagagaggcccctggagaagagagggcaccctggccgccagaggcgaccccggcggcgagagaggcccctggtggagagagggcaccctggccgccaagcccagaatgcagtgggtgaccagagccaccgccccctag

SEQ ID NO: 323109 - DNA, 846 bp, Artificial Sequence
  derived and/or modified sequence
atgctgagagagctgggtgactccctgagacgaccccagctgcggctctggagtctgtggtgggttttcaactctgcaggctactatctcgtggtgtattacgtgcacatcctgtggaatgaggtcgaccccacaaccaacagcgcaagggtctataatggtgctgccgatgcagcatctacccttttgggtgccataacatcttttgcggctggctttgtaaagatccggtgggcgagatggagtaagctgctcatcgctggggtcaccgctacccaggccggccttgttttcctcttagcacatacccgacacccctctagcatctggctgtgttacgccgccttcgtgttatttcgcgggtcttatcagttcctcgttcccattgcgacatttcagatcgctagtagcctttcaaaggagctatgtgcgctcgtgttcggagtaaacacgttctttgccacaatagtgaagaccatcataactttcatcgtgtcagatgtgcggggtctaggactgcccgttagaaagcaggctctccgaatgtcccggccccgcctgggactgtgtctgccaggccctttccctcctcagagcgctgcccccgccagagctggaatggctgcctcatctgccgaggaccctggctcggaacggggaccatggagaagagctggcaccgttgcggctcggggagatccgggaggagagaggggcccgtggcggcgagaagggactctggcggcgcgcggggaccctggaggcgaacggggaccatggtggcgggagggaaccttagcagccaaacctcggatgcagtgggtaacacgagctacggcaccatag

SEQ ID NO: 323110 - DNA, 810 bp, Artificial Sequence
  derived and/or modified sequence
tagcttcgcctgtggtcactgtggtgggtgttcaattccgctggttactatctcgtagtttactacgttcatatcctgtggaacgaggtggaccccactacaaatagcgctcgagtgtataacggggctgcggatgctgccagcacacttttgggcgccattacttcattcgctgctggctttgtgaagatccgttgggctagatggtccaagctgctgatcgccggcgtgacagctacccaggcaggcctggtcttcctgctagctcacactaggcaccccagctctatctggctgtgttacgctgccttcgtgttattccgaggttcctatcagttcctcgtgccaatagctacattccaaattgcaagttccctctcaaaagagctttgcgccctggtgttcggcgtgaacaccttctttgctaccatcgtgaaaacaattataacattcatcgtatcagatgtgcgtggactgggactacctgtcagaaagcaggcccttagaatgagccgtccacgactgggtctgtgtctccccggtcctttcccacctcagtctgcggctcctgctagggcgggcatggcagcatctagtgcagaggatcccggatcggagagagggccatggcgccgtgcaggaacagtcgctgccagaggcgaccctgggggagaacgggggccctggcgccgcgaaggaaccttagcagccaggggagatccaggcggggaaagagggccatggtggcgagagggcacattagccgccaagcctcggatgcagtgggtgactcgcgccacggcgccgtag

SEQ ID NO: 323111 - DNA, 846 bp, Artificial Sequence
  derived and/or modified sequence
atgctgcgggagctgggggacagcctgcggcggccccagctgcggctgtggagcctgtggtgggtgttcaacagcgctggctactacctggtggtgtactacgtgcacatcctgtggaatgaggtggaccccaccaccaacagcgcccgggtgtacaatggagctgctgatgctgccagcaccctgctgggcgccatcaccagctttgctgctggctttgtgaagatccgctgggcccgctggagcaagctgctgattgctggggtgacagccacccaggccggcctggtgttcctgctggcccacaccaggcaccccagcagcatctggctgtgctacgccgcctttgtgctcttccggggcagctaccagttcctggtgcccatcgccaccttccagatcgccagcagcctgagcaaggagctgtgtgccctggtgtttggagtgaacaccttctttgccaccatcgtgaagaccatcatcaccttcatcgtgtctgatgtgcggggcctgggcctgcctgtgaggaagcaggccctgaggatgagccggccccggctgggcctgtgcctgcccggccccttccccccccagagcgctgccccagcccgggccggcatggccgccagcagcgcagaagatcctggcagcgagcggggcccctggaggagagctggcaccgtggccgcccggggggaccccggcggggagcggggcccctggaggcgggagggcaccctggccgcccggggggaccctggaggagagcggggcccctggtggagggagggcaccctggccgccaagcccaggatgcagtgggtgacccgggccacagccccctag

SEQ ID NO: 323112 - DNA, 810 bp, Artificial Sequence
  derived and/or modified sequence
tgactgcggctgtggagcctgtggtgggtgttcaacagcgctggctactacctggtggtgtactacgtgcacatcctgtggaatgaggtggaccccaccaccaacagcgcccgggtgtacaatggagctgctgatgctgccagcaccctgctgggcgccatcaccagctttgctgctggctttgtgaagatccgctgggcccgctggagcaagctgctgattgctggggtgacagccacccaggccggcctggtgttcctgctggcccacaccaggcaccccagcagcatctggctgtgctacgccgcctttgtgctcttccggggcagctaccagttcctggtgcccatcgccaccttccagatcgccagcagcctgagcaaggagctgtgtgccctggtgtttggagtgaacaccttctttgccaccatcgtgaagaccatcatcaccttcatcgtgtctgatgtgcggggcctgggcctgcctgtgaggaagcaggccctgaggatgagccggccccggctgggcctgtgcctgcccggccccttccccccccagagcgctgccccagcccgggccggcatggccgccagcagcgcagaagatcctggcagcgagcggggcccctggaggagagctggcaccgtggccgcccggggggaccccggcggggagcggggcccctggaggcgggagggcaccctggccgcccggggggaccctggaggagagcggggcccctggtggagggagggcaccctggccgccaagcccaggatgcagtgggtgacccgggccacagccccctag

SEQ ID NO: 323113 - DNA, 846 bp, Artificial Sequence
  derived and/or modified sequence
atgctgcgggagctgggcgacagcctgcggcggccccagctgcggctgtggtctctctggtgggtctttaacagcgccggatactatctcgtggtttactatgtccacatactgtggaatgaagtggatcccactaccaattccgcccgcgtttataatggcgccgcggatgcggcttccactctgctgggcgctatcaccagcttcgcagctggatttgttaagattaggtgggcccgttggagcaaactcctgatcgcaggggttacagcaactcaggccggccttgtctttctcctggcccatacccggcacccttcttcaatttggttgtgttatgcggctttcgtgttattccggggaagttatcagttccttgtgcctatcgccacatttcagatagcttcctctctgtccaaagagctgtgcgcgcttgtgtttggtgtgaacacatttttcgctacgatagtcaaaaccataatcacttttatcgtgtcagacgttagaggtctcggcctgccggtgaggaagcaggccttgagaatgtcccgacctaggttggggctctgtttgcctggaccttttccaccccagtctgcggctcctgcccgcgccggcatggccgcatcgtctgcagaagaccctggttctgagagggggccttggagacgcgcagggaccgtggccgcccgcggcgaccctggtggagaacgtgggccttggaggcgcgagggaaccctagctgccagaggtgatcccgggggggagcgcggaccttggtggcgggaaggcacactcgcagccaaaccacggatgcagtgggtgacccgagccactgccccttag

SEQ ID NO: 323114 - DNA, 810 bp, Artificial Sequence
  derived and/or modified sequence
tgactgcggctgtggagcctgtggtgggtgttcaacagcgccggctactatcttgtggtgtattacgttcatattctgtggaacgaagtcgaccctaccacaaacagcgccagggtctacaatggcgcggcagacgcagcctccaccctccttggtgcaatcactagtttcgctgctggatttgtaaagattagatgggccaggtggtcaaaactgctgatcgcaggtgtgaccgctacccaggccggactcgtattccttctggcccacacaaggcatccttcttctatctggttgtgctatgctgcctttgtcttattcagggggtcgtaccagttcctggtgcccatcgctacgttccagattgcctcatcactgagcaaggagttatgtgctctggtgtttggtgtgaacacattttttgctaccattgttaagacgattataacttttattgtgagtgacgtgcgcggattagggctccccgtgaggaaacaggccctccggatgagccggcctcgcctggggctctgtctccctggtccttttcctccccagagcgcagctccagcacgcgcaggaatggctgcctctagtgccgaggatccgggatccgagcggggcccatggcgccgggcagggacggtcgctgcaagaggcgaccctggaggcgagcgaggcccttggaggcgcgaaggtaccttggctgctcggggagacccggggggcgagcgcggcccgtggtggagagaaggcactctcgcagccaaacctcgtatgcagtgggttacccgcgctactgccccttag

SEQ ID NO: 323115 - DNA, 846 bp, Artificial Sequence
  derived and/or modified sequence
atgctccgggaactgggagattccctccgccgaccacaattaagactctggtctctgtggtgggtgttcaactccgcaggttactacctggtggtgtattacgtgcatatcctctggaatgaggtagatcctacgaccaacagcgccagggtgtacaacggtgctgccgacgccgcatcaactcttcttggagcaatcaccagtttcgctgcaggttttgtgaagatcagatgggcccgatggtcaaaactcctgatcgcgggagtcactgccacacaagctggtctggtgttcctcctcgcgcacactagacacccgagctccatatggctttgttatgctgcctttgtcctcttccgtggatcttatcaatttctcgttcccattgcaacctttcagatcgcctccagcctttcaaaagaactgtgtgcattggtctttggtgttaacacatttttcgcaacaattgtcaaaacgatcatcacctttatagtgtccgacgtcagaggtctgggcctgcccgtgcggaaacaggccttgcggatgagtagaccaagactgggcctgtgcctccccggaccgtttcctcctcagtccgccgctcctgcccgagcgggtatggccgcaagctctgccgaggatcctggaagtgagaggggaccctggcgcagagccggaaccgtcgcggcacgaggggatccaggcggtgaaagggggccatggaggcgtgaaggaacactggccgcacgaggagatcctggcggagaacggggaccttggtggcgtgaagggaccctggcggctaagccaaggatgcagtgggttaccagggccacagctccttag

SEQ ID NO: 323116 - DNA, 810 bp, Artificial Sequence
  derived and/or modified sequence
taactgcgactgtggtcgttatggtgggtctttaacagcgcaggctattaccttgtggtatattacgttcacatcctctggaatgaagtggacccaaccacgaactccgcccgtgtgtataatggagctgccgatgcagcctcaactctgctgggagccatcacctcttttgccgcaggcttcgtgaaaatcagatgggcacggtggtctaaacttctcatagccggtgtaacagctacgcaagccggattggtctttctgctggctcatacaagacacccttctagcatctggctgtgctacgccgctttcgtgttgtttcggggatcttatcagtttctcgtccctatcgcaacttttcagatagcatcatctctcagcaaggagctgtgtgccctggtctttggagttaacacctttttcgcaaccattgtgaaaactataattactttcatcgtctccgacgtccgcggtctaggacttcccgtgagaaaacaggcattacgaatgagtagacctcgtctgggattatgcttacccggaccttttcctccacaaagcgcagctccggctagagccggtatggcagcttcttccgccgaggatcccggtagtgaacggggaccatggcgacgggcaggaaccgtggcagccagaggggaccccggtggagaacgcggaccctggcgtcgggagggaacactggcggcaaggggagatccaggtggtgagagaggaccttggtggcgggaggggacgctcgcggctaaacccaggatgcagtgggttaccagagccacagctccatag

SEQ ID NO: 323117 - DNA, 3572 bp, Artificial Sequence
  derived and/or modified sequence
agctgcgcctgtggtccctctggtgggtcttcaactcggccggctactacctggtggtctactacgtgcacatcctgtggaacgaggtggaccccaccaccaacagtgcgcgggtctacaacggcgcggcagatgctgcctccacgctgctgggcgccatcacgtccttcgccgcgggcttcgtgaagatccgctgggcgcgctggtccaagctgctcatcgcgggcgtcacggccacgcaggcggggctggtcttccttctggcgcacacgcgccacccgagcagcatctggctgtgctatgcggccttcgtgctgttccgcggctcctaccagttcctcgtgcccatcgccacctttcagattgcatcttctctgtctaaagagctctgtgccctggtcttcggggtcaacacgttctttgccaccatcgtcaagaccatcatcactttcattgtctcggacgtgcggggcctgggcctcccggtccgcaagcaggccttaaggatgtcccggcccagactcggcctctgcctgcctggtcccttcccaccccagagtgcagccccagcaagagcaggtatggcggcctcctctgcagaggaccctggcagcgagaggggaccctggcggcgagcggggaccgtggcggcgagaggggaccctggcggcgagaggggaccgtggcggcgagaggggaccctggcggcgagaggggaccctggcggcgagaggggaccgtggtggcgagagggaaccctggcggcaaaaccgagaatgcagtgggtcactcgggccacggctccctgaggacaggaactggccccggccccacctcatcccacgctggagtcgtgcacagacgtccctcgggaggagtgaagaggccaccgggtctgcgtctcaggtaaaaaggtgactgaaaatgccccaccctgctgacatcagggagacaaagctcttggctcaaaagacagcagagtggacacctttgggctgagcgggagaacccccagcatggagggcttggagggcatggagggcatggagggcatagagggcatggagggcatggcccaggcccatggatgccctgctgagaatccacaggggcctgttgtatgtgtgtatatgggtgcacatgtgtgcatatatgtgtattggtgtgtatgcatgtgtatatgtatgtgtgcatgagtatacatgtgcagtgtgtatgcccatcatggaatgggccagggagggctcatagtcatgtatgtggatacacatgtggatacgtgcacatgtatgagtgtatgtatatacctgtatgggtgtgcacgtggacaggctcgtatatgcatgaatacatgtgtatatgtgcacctatgtggagtgtatgggcatgtgtacacacatgagcacgtgtggatgtgtgtgtgcgtgtatgtgtgcgcgtgtgtatgggcatgtatgtgcatagatgcatgtgtatatgtgcacacatgtatgagtacggccatatatgtgcatgcatgtttgggcacacgtgtgcgtgtgtggacatgtatgactgtgcatgggtatggcatgaccagtgctgtgtggccacatggcagggctgcttataagtggcctctgggaggagctgcaggaccccaggctgtggccaggccattcccaggtcctggtctcccagccacccagtccgccccttgagagacactcaccctcatgccaaatccaaggctggcatctcccggctcccctttctctcctttcaatccgttcatcccggggcgaccctggggcggagcacagggggtggggactgctgggcactgatgattaccagacaccttcccgcagggtgcctgccgttagccccacgccaggcccggccggcccacgctcagcctcacacgttcccagctctcaggctaccccggcccttctcacccctttcctgcacaaggacccttttgggaggaggtgactgagcctagcacacacaggcccactgccctgtctgcctccagggcttcctcctgggtactggcccctcgtggggtactgccagccacatccaggacaagagctgcgctcaggcagggccggttcttgggggaggacagtgggtgcggcggccgtccactcccctctgggcatgtcacccccgtgggcctgggctgctccccacctgccagaccccatctgccgcccccactggagaccccaggtcctcaccggccgtccaggaaagccaatctctcccttgtaccccggccgtccgtatggaccctgcaagaggaagggggccaggcttagtggggcagaccctggcccttgaccacgagttggggggtcctggggaaggggaggggccatgcagagcacagcaccctgggccacccatcagctcggaggagcccactgcagcctcacgccgacacctgccccacacgctttaaaactgcactagggagatgagccctgggccgcacagcacaagctcagcagccgcgggcgaccgtgtccttgggggccgtcatgcccgagctcagtgcagagaaagccagggaccgacttaccgggggtcctcggaagcccggctctccctgagcaaaaaaacaagaagacagggttaggtggcagcttgtgccccacctggcagcctctctgagggcccctgtggcgaaggcacggttaggtggcggcttgtgccccacctgatagcctccctaagggccgctgtggtccctttgggtgcactgggccgtccccaaggcgcaggcagccctggggaggacaggagccactggtgaggggagggtcgggtttggggtttgcgtccaggttggtgcgtgcatgcatgccccgggaccctgaagcaggggtggagggtggagggtggagggcatgtgccacgcagtgtcctggttgccacaggccccagctccaatgcacagctgggtgggatagtggagctctcactgggcctggggatcctgtgtctgaggcccaccccaaacaccccggagggctcactgctccctctgaaagtgggagagccggtggcccacactccaaagatccaggcttctccccaggaccctccccgagggcttttctgggcggctgcctgctgggggtggggacgcaggcacaggccccttgaggaactgactccgggccctgcccacagcatcagggcccccaggaagaggctggaggggcagccagaaacctgctgaggctgagctggtacagcctgggctcctgcaccccacaggccaggccccagggaggcgcgagctcagagctgcagcccactgagaacctcccctcagcagggtgggctcaggggtagggagaggacgaggggcagggagaggacgaggggccggcggaaccgccgacatgggtgcgagaaaggaggggccaccagggccaggcctggatggtagagccctgcttgggagaggctcgtgcatcaggagccagaccctcaggaagaccctccccaggctgtctccacagccccaggagcccccacgcctgccggaaggaggctgcccggccctcaccttg

SEQ ID NO: 323118 - DNA, 1194 bp, Artificial Sequence
  derived and/or modified sequence
atgaaaggaacatccattttattcaaagcacctccaaacctgcaatcctaagttccaggcaactcaatcccaaaaatccactgtagatgcccaaaggctggggtgttcggtcttcaacatttttgcctttgtggctcccagtcaagatagagctgcaccaagtccaattccattcctcatcacagatgattttttctactttaagatcagaactatacaagcttcttgctttgtgtcagcatgctgttgtacccatgggcaaattcttaggtaagacaaaaacacagtcccaagggcaggtagtaattttttcagaaaaaggtaaggcaatcatttatctcagtctgcccaggacagtcccaatttacacatgtatattctcccaatctgtaggctgtcttttcattttgttgattatttcacttaattttttattatttatttattttatagagacagatctcattatgttgcccagggtgatccttgatctcctggcctcaagtgatcctccaaccttggtctcccaaagtgctgggattacagatgtgaactaccacacccagtcaacgtgcagaaggttttcagtttgatgtagtctgatgtagtctcatgtatttatccttcttgttgttgcctgagcttttggtgtgatatccaaaaatatcattgccaagatcaatatcaagaaactttccccctatgtttcttacagaaattttatggtttcagatttttcatccattttgagtatatttgtgtgtatgatgtaagataagggtccagtctccccagtgttggatatccaattttcataacaccatttattgaagagattattctttctccactgtgttttcttgatgtccttgtcaaaaattagttgacttttatatgcttgggtttatttctgggctctattctgtttcattgctttacatctctgttttcatgccagtgccacagtgttttgattactatagctttgtaatataatttgaaatcagaatgtgtaatacctataactttgttttttgctctaaagatttatttatttatttatttttgccatttcaggtcttttgtggtttcatatgaatttcagaattgtttttcctatttctgtgaaaaatgccattgacattttgatagggattgtgttgaatctatatattgctttggatagtatggatg

SEQ ID NO: 323119 - DNA, 1479 bp, Artificial Sequence
  derived and/or modified sequence
atggccctgaacagcggcagcccccccgccatcggcccctactacgagaaccacggctaccagcccgagaacccctaccccgcccagcccaccgtggtgcccaccgtgtacgaggtgcaccccgcccagtactaccccagccccgtgccccagtacgcccccagagtgctgacccaggccagcaaccccgtggtgtgcacccagcccaagagccccagcggcaccgtgtgcaccagcaagaccaagaaggccctgtgcatcaccctgaccctgggcaccttcctggtgggcgccgccctggccgccggcctgctgtggaagttcatgggcagcaagtgcagcaacagcggcatcgagtgcgacagcagcggcacctgcatcaaccccagcaactggtgcgacggcgtgagccactgccccggcggcgaggacgagaacagatgcgtgagactgtacggccccaacttcatcctgcaggtgtacagcagccagagaaagagctggcaccccgtgtgccaggacgactggaacgagaactacggcagagccgcctgcagagacatgggctacaagaacaacttctacagcagccagggcatcgtggacgacagcggcagcaccagcttcatgaagctgaacaccagcgccggcaacgtggacatctacaagaagctgtaccacagcgacgcctgcagcagcaaggccgtggtgagcctgagatgcatcgcctgcggcgtgaacctgaacagcagcagacagagcagaatcgtgggcggcgagagcgccctgcccggcgcctggccctggcaggtgagcctgcacgtgcagaacgtgcacgtgtgcggcggcagcatcatcacccccgagtggatcgtgaccgccgcccactgcgtggagaagcccctgaacaacccctggcactggaccgccttcgccggcatcctgagacagagcttcatgttctacggcgccggctaccaggtggagaaggtgatcagccaccccaactacgacagcaagaccaagaacaacgacatcgccctgatgaagctgcagaagcccctgaccttcaacgacctggtgaagcccgtgtgcctgcccaaccccggcatgatgctgcagcccgagcagctgtgctggatcagcggctggggcgccaccgaggagaagggcaagaccagcgaggtgctgaacgccgccaaggtgctgctgatcgagacccagagatgcaacagcagatacgtgtacgacaacctgatcacccccgccatgatctgcgccggcttcctgcagggcaacgtggacagctgccagggcgacagcggcggccccctggtgaccagcaagaacaacatctggtggctgatcggcgacaccagctggggcagcggctgcgccaaggcctacagacccggcgtgtacggcaacgtgatggtgttcaccgactggatctacagacagatgagagccgacggctag

SEQ ID NO: 323120 - DNA, 1470 bp, Artificial Sequence
  derived and/or modified sequence
atggccctgaacagcggcagcccccccgccatcggcccctactacgagaaccacggctaccagcccgagaacccctaccccgcccagcccaccgtggtgcccaccgtgtacgaggtgcaccccgcccagtactaccccagccccgtgccccagtacgcccccagagtgctgacccaggccagcaaccccgtggtgtgcacccagcccaagagccccagcggcaccgtgtgcaccagcaagaccaagaaggccctgtgcatcaccctgaccctgggcaccttcctggtgggcgccgccctggccgccggcctgctgtggaagttcatgggcagcaagtgcagcaacagcggcatcgagtgcgacagcagcggcacctgcatcaaccccagcaactggtgcgacggcgtgagccactgccccggcggcgaggacgagaacagatgcgtgagactgtacggccccaacttcatcctgcaggtgtacagcagccagagaaagagctggcaccccgtgtgccaggacgactggaacgagaactacggcagagccgcctgcagagacatgggctacaagaacaacttctacagcagccagggcatcgtggacgacagcggcagcaccagcttcatgaagctgaacaccagcgccggcaacgtggacatctacaagaagctgtaccacagcgacgcctgcagcagcaaggccgtggtgagcctgagatgcatcgcctgcggcgtgaacctgaacagcagcagacagagcagaatcgtgggcggcgagagcgccctgcccggcgcctggccctggcaggtgagcctgcacgtgcagaacgtgcacgtgtgcggcggcagcatcatcacccccgagtggatcgtgaccgccgcccactgcgtggagaagcccctgaacaacccctggcactggaccgccttcgccggcatcctgagacagagcttcatgttctacggcgccggctaccaggtggagaaggtgatcagccaccccaactacgacagcaagaccaagaacaacgacatcgccctgatgaagctgcagaagcccctgaccttcaacgacctggtgaagcccgtgtgcctgcccaaccccggcatgatgctgcagcccgagcagctgtgctggatcagcggctggggcgccaccgaggagaagggcaagaccagcgaggtgctgaacgccgccaaggtgctgctgatcgagacccagagatgcaacagcagatacgtgtacgacaacctgatcacccccgccatgatctgcgccggcttcctgcagggcaacgtggacagctgccagggcgacagcggcggccccctggtgaccagcaagaacaacatctggtggctgatcggcgacaccagctggggcagcggctgcgccaaggcctacagacccggcgtgtacggcaacgtgatggtgttcaccgactggatctacagacagatgagatag

SEQ ID NO: 323121 - DNA, 1479 bp, Artificial Sequence
  derived and/or modified sequence
atggccctgaactccggtagcccaccagccatcggtccctactacgaaaaccatggctaccagccagagaacccttatccggcacagcccaccgtggtgccaactgtgtacgaagtgcatccggcacagtattatcctagtccagtccctcagtacgccccaagggtgctgacccaggcctcaaatcccgtcgtctgcacacaacccaagtctcctagcgggactgtgtgcacatctaaaacaaaaaaagcactctgtatcactctcaccctgggaaccttcttggtgggggccgccttggcggcgggcctgctgtggaagtttatgggatctaagtgttcaaattctggcatcgaatgcgactcatccggaacatgtattaacccttccaattggtgtgacggggtgtcacactgtcctggaggtgaggatgagaaccgatgtgtaagattgtatggacctaactttatcctgcaagtgtactctagtcaaaggaaaagctggcatcctgtatgtcaggacgattggaacgaaaactacggcagagccgcttgtagggatatggggtataagaataatttttactctagccagggcatcgtggatgattctggcagcacatcatttatgaagttaaatacctcggccggcaacgtcgacatctacaagaaactgtatcacagcgacgcctgcagcagcaaggccgtggtgagtctgcggtgtatcgcttgcggggtcaatcttaactcgtctaggcaatcccgcatcgtggggggagaatcagcgctgccaggagcttggccttggcaggtcagcctccacgtccagaacgttcacgtgtgtggaggaagtatcatcactcccgaatggatcgtgaccgccgcccattgcgtagagaaacccctcaataatccttggcattggactgctttcgcaggcatcctccggcaaagttttatgttttatggcgctggataccaggtggaaaaagtaattagccatcctaactacgactcaaaaacaaagaataacgacatcgccctcatgaaattacagaaacctctcacctttaatgatctcgtgaagcctgtatgtctgcctaacccagggatgatgctgcagcccgaacagttatgttggatctctggctggggagccacagaggagaaagggaaaacctcggaagttctgaacgccgcgaaggtccttttgatcgagacccagcgctgcaattcgaggtacgtgtacgataatctcattacacccgccatgatatgtgctggcttcctccaaggaaacgtggatagctgccagggggactcagggggccctctagtcacttcaaagaataacatttggtggctcatcggagatacaagctgggggtcaggatgcgcgaaggcctacaggcccggcgtgtatggtaacgtaatggtcttcactgactggatctatagacaaatgcgcgcagacggctag

SEQ ID NO: 323122 - DNA, 1470 bp, Artificial Sequence
  derived and/or modified sequence
atggcccttaattctgggagcccccccgctatcggaccctactacgagaatcacggctaccaacccgaaaacccctaccccgcccaaccaacagttgtgccaacagtgtatgaggtgcaccctgcacagtattacccaagccccgtgcctcaatacgcgccgagggtcctgactcaggcttccaatcccgtcgtgtgcacccaaccaaagagcccatctggaacagtgtgcacctccaagaccaaaaaagccttatgcatcacactcaccctcggcacgtttctggttggggccgcattggccgccggcctgctctggaagtttatgggttctaagtgtagcaatagtggaattgaatgcgattcttccggcacatgtattaatccgtctaattggtgcgacggtgtgtctcattgccccgggggggaggatgagaatagatgcgtcaggctgtatggccccaactttattctgcaggtgtacagtagtcagagaaagagctggcacccagtgtgtcaggacgattggaatgagaactacggcagggccgcatgccgggatatgggatataaaaacaatttttattcttcccagggcatcgttgacgatagtggatcaacaagttttatgaaactgaatacttccgccggcaacgttgacatctataagaaattatatcattcagacgcttgttccagtaaagctgtggtgtcattgagatgtatcgcatgtggagttaatctaaactcaagccggcagtctagaatcgtggggggcgaatcagcgctgcccggagcctggccctggcaggtgtccctgcacgtgcagaacgtgcacgtgtgcgggggcagcatcatcacacccgagtggattgtgacggctgcccattgtgttgaaaaaccgcttaacaatccctggcactggactgcctttgccggtatcctgagacagtcttttatgttctacggggccggttaccaggtggagaaggtgattagtcatcccaactacgactccaaaacaaaaaataatgatatcgctctgatgaagctacagaaacctctgaccttcaacgatctggtgaaacctgtttgtctgccgaacccaggcatgatgctgcaaccagaacagctctgctggattagtggctggggcgctactgaggaaaaaggcaagacgagcgaagtactcaatgctgccaaggtgcttctgattgagactcagcgatgcaactctagatatgtgtatgacaatctcatcacgcctgcgatgatttgtgctggtttcctgcaaggaaatgtggatagctgccagggggacagcgggggccctctcgtgaccagtaagaacaacatctggtggctgatcggggatactagttggggctcagggtgtgcaaaagcctacaggccaggagtctacggaaacgtgatggtgtttaccgattggatctataggcagatgagatag

SEQ ID NO: 323123 - DNA, 1479 bp, Artificial Sequence
  derived and/or modified sequence
atggctttaaacagtggtagcccccctgccatcggcccatattacgagaaccacggttatcagcccgagaacccctaccccgctcagccaactgtagtgcccactgtgtatgaggtccaccccgcccagtattacccctctcctgttccgcagtatgccccgcgggtcctgacccaggcttctaatcctgtagtctgcacgcagccgaagtctccctccggcactgtatgtacctccaagacgaaaaaggcattgtgcataaccctcaccctcggcacctttctggtgggcgccgctctggctgccgggctgctgtggaaatttatgggatcaaagtgttcaaattctggcatcgagtgcgacagtagcggtacttgtataaaccccagcaactggtgcgatggcgttagccattgccccggcggcgaggatgagaatcgatgcgttcgtttgtacgggcctaatttcattttgcaggtctatagctcccaacggaagagctggcaccccgtgtgccaggatgattggaacgagaactacgggagggccgcgtgtcgcgatatgggatacaagaacaatttttattcctcccaaggcatcgttgatgattctggttctacctcctttatgaaactcaataccagtgctggcaatgtggacatctacaagaagctgtatcattctgatgcgtgtagctctaaagcagtggtctcgctcagatgtattgcttgcggcgtaaatttaaatagttctcgtcagagccggatcgtaggtggagagagcgcgctgccgggcgcatggccatggcaggtcagtctgcacgtgcagaacgtacacgtgtgcggcggcagcataattaccccagagtggatagtgactgccgctcactgtgttgaaaaaccactgaataacccctggcactggacggcctttgccggaatcctgagacagagcttcatgttttatggcgccggttaccaggtggagaaggtgatcagccatcccaattatgatagcaaaaccaagaacaatgatatcgccttgatgaagctccaaaagcccctgacattcaacgatcttgtgaaacctgtgtgcctccccaaccctggcatgatgctgcagccagaacaattgtgctggatttcaggttggggtgccactgaagagaagggtaaaacgtctgaagttctgaacgcagcgaaagtgctgcttatcgaaacccagagatgtaacagcaggtatgtttatgacaacctgatcacaccagctatgatatgcgccggattcctgcagggaaatgttgattcctgtcaaggagatagcggtggcccattagtgaccagcaaaaacaatatctggtggcttatcggcgacacgtcatggggcagcggttgcgctaaagcataccgccctggcgtctatggcaacgttatggtgttcactgattggatctatagacagatgcgtgccgacgggtag

SEQ ID NO: 323124 - DNA, 1479 bp, Artificial Sequence
  derived and/or modified sequence
atggccctgaacagcggcagccccccagccatcggcccctactatgagaaccacggctaccagcctgagaacccctacccagcccagcccaccgtggtgcccaccgtgtatgaggtgcacccagcccagtactaccccagccctgtgccccagtatgccccccgggtgctgacccaggccagcaaccctgtggtgtgcacccagcccaagagccccagcggcaccgtgtgcaccagcaagaccaagaaggccctgtgcatcaccctgaccctgggcaccttcctggtgggcgccgccctggccgccggcctgctgtggaagttcatgggcagcaagtgcagcaacagcggcattgaatgtgacagcagcggcacctgcatcaaccccagcaactggtgtgatggagtgagccactgccctggaggagaagatgaaaatagatgtgtgcggctgtatggccccaacttcatcctgcaggtgtacagcagccagaggaagtcctggcaccctgtgtgccaggatgactggaatgaaaactacggccgggccgcctgccgggacatgggctacaagaacaacttctacagcagccagggcatcgtggatgacagcggcagcaccagcttcatgaagctgaacaccagcgctggaaatgtggacatctacaagaagctgtaccacagtgatgcctgcagcagcaaggctgtggtgtccctgcgctgcatcgcctgtggggtgaacctgaacagcagccggcagagccgcatcgtgggcggggagagcgccctgcccggggcctggccctggcaggtgtccctgcacgtgcagaatgtgcacgtgtgtggcggcagcatcatcaccccagagtggatcgtgacagctgcccactgtgtggagaagcccctgaacaacccctggcactggacagcctttgctggcatcctgcggcagagcttcatgttctacggggccggctaccaggtggagaaggtgatcagccaccccaactatgacagcaagaccaagaacaatgacatcgccctgatgaagctgcagaagcccctgaccttcaatgacctggtgaagcctgtgtgcctgcccaaccctggcatgatgctgcagcctgagcagctgtgctggatcagcggctggggcgccacagaggagaagggcaagaccagcgaggtgctgaatgctgccaaggtgctgctgattgagacccagcgctgcaacagccgctacgtgtatgacaacctgatcaccccagccatgatctgtgccggcttcctgcagggcaatgtggacagctgccagggcgacagcggcggccccctggtgaccagcaagaacaacatctggtggctgattggagacacctcctggggcagcggctgtgccaaggcctacagacctggggtgtatggaaatgtgatggtgttcacagactggatctaccggcagatgagagcagatggatag

SEQ ID NO: 323125 - DNA, 1470 bp, Artificial Sequence
  derived and/or modified sequence
atggccctgaacagcggcagccccccagccatcggcccctactatgagaaccacggctaccagcctgagaacccctacccagcccagcccaccgtggtgcccaccgtgtatgaggtgcacccagcccagtactaccccagccctgtgccccagtatgccccccgggtgctgacccaggccagcaaccctgtggtgtgcacccagcccaagagccccagcggcaccgtgtgcaccagcaagaccaagaaggccctgtgcatcaccctgaccctgggcaccttcctggtgggcgccgccctggccgccggcctgctgtggaagttcatgggcagcaagtgcagcaacagcggcattgaatgtgacagcagcggcacctgcatcaaccccagcaactggtgtgatggagtgagccactgccctggaggagaagatgaaaatagatgtgtgcggctgtatggccccaacttcatcctgcaggtgtacagcagccagaggaagtcctggcaccctgtgtgccaggatgactggaatgaaaactacggccgggccgcctgccgggacatgggctacaagaacaacttctacagcagccagggcatcgtggatgacagcggcagcaccagcttcatgaagctgaacaccagcgctggaaatgtggacatctacaagaagctgtaccacagtgatgcctgcagcagcaaggctgtggtgtccctgcgctgcatcgcctgtggggtgaacctgaacagcagccggcagagccgcatcgtgggcggggagagcgccctgcccggggcctggccctggcaggtgtccctgcacgtgcagaatgtgcacgtgtgtggcggcagcatcatcaccccagagtggatcgtgacagctgcccactgtgtggagaagcccctgaacaacccctggcactggacagcctttgctggcatcctgcggcagagcttcatgttctacggggccggctaccaggtggagaaggtgatcagccaccccaactatgacagcaagaccaagaacaatgacatcgccctgatgaagctgcagaagcccctgaccttcaatgacctggtgaagcctgtgtgcctgcccaaccctggcatgatgctgcagcctgagcagctgtgctggatcagcggctggggcgccacagaggagaagggcaagaccagcgaggtgctgaatgctgccaaggtgctgctgattgagacccagcgctgcaacagccgctacgtgtatgacaacctgatcaccccagccatgatctgtgccggcttcctgcagggcaatgtggacagctgccagggcgacagcggcggccccctggtgaccagcaagaacaacatctggtggctgattggagacacctcctggggcagcggctgtgccaaggcctacagacctggggtgtatggaaatgtgatggtgttcacagactggatctaccggcagatgaggtag

SEQ ID NO: 323126 - DNA, 1479 bp, Artificial Sequence
  derived and/or modified sequence
atggccctgaacagcggcagcccccccgccatcggcccctactacgagaatcatggctaccagcctgagaatccctacccagcgcagcctactgtggtccccactgtttacgaagtgcaccctgcacagtactacccaagcccagttccccagtacgctccacgggtcctgacacaagctagcaaccccgtcgtgtgcacccagcccaaaagtccctcgggcacagtgtgcacgagtaagacaaagaaggcgctgtgcataacactgacactcgggactttccttgtcggcgccgctctggccgcggggttactgtggaaatttatggggtcaaaatgtagtaattccggcatcgagtgtgatagcagcgggacatgtataaatccgagcaactggtgcgacggcgtgtcacactgtccaggaggagaagacgagaacagatgtgttcggctgtatggacctaatttcatccttcaggtatattcgtcccagcggaagagctggcaccccgtctgccaggacgactggaatgaaaactacggacgcgctgcatgtcgcgacatgggctataaaaataatttctactcctcccagggaatcgtggacgacagtggatccactagcttcatgaaactgaacacttccgcaggaaacgtcgacatatataagaagctgtatcatagcgatgcttgtagctcaaaagccgtcgtcagcctgagatgtattgcgtgtggagtcaacttgaactcctctcgacaaagcagaatagtgggcggggagtccgccttgccaggcgcttggccatggcaggtgagcctgcatgtacagaacgtccatgtgtgcggcgggagcataattacccctgagtggattgtgactgcagcccattgcgtggagaagcccttgaacaacccctggcactggacagcttttgcgggtattctgcgtcagtcctttatgttctacggggctgggtaccaggtggagaaagtcatatcccaccccaactacgacagtaaaaccaaaaacaacgatattgccctgatgaagttacaaaagcctttgacctttaatgatttggtgaagccagtatgtctcccaaatcccggcatgatgttgcagcccgagcagctgtgttggatttctggctggggggccaccgaagagaagggcaagacctccgaagtcttgaatgctgcaaaggtcctgctgatcgaaacccagcggtgcaactctcggtatgtttacgataacctaattactccagcaatgatatgtgccggcttcctgcaggggaatgtggactcttgccagggagattccggaggaccactagtcacctccaagaacaatatatggtggctgataggcgatacctcctgggggagtgggtgcgcaaaagcctaccgacccggcgtgtacgggaatgttatggtctttaccgactggatctaccgccagatgagagcggatggctag

SEQ ID NO: 323127 - DNA, 1470 bp, Artificial Sequence
  derived and/or modified sequence
atggccctgaacagcggcagcccccccgccatcggcccctactacgaaaatcacgggtatcaacctgaaaatccataccccgcacagccaactgtggttcccaccgtatatgaagtgcatcccgcccagtattatccctcacctgtgccccagtatgctcctcgggtgttaactcaagcctcaaatccagtggtttgcacacaaccaaagtctccctccggcactgtatgtacatccaagacaaagaaagcactgtgcattacattaaccctggggacctttcttgtgggagcggctcttgccgctggcctgctttggaaatttatgggatccaaatgcagtaactcaggaatcgagtgcgattcttccggaacctgcattaacccctccaactggtgtgatggcgtgtcccattgtccagggggggaagacgagaatagatgtgtgaggctgtatggacctaactttattctccaggtgtacagcagtcagcgtaagtcctggcaccccgtgtgtcaggatgactggaacgaaaactatggtcgagcggcctgcagagatatggggtacaagaacaacttctattccagccagggcattgttgatgatagtggttccaccagctttatgaaactgaacacgtcggctggcaacgtggacatctacaaaaagctgtatcacagtgacgcatgtagcagcaaggcagtggtgagcttaagatgtatcgcctgcggcgtgaaccttaacagtagtaggcagtctcgcatcgttgggggcgagtcagcgctccctggagcttggccttggcaggtctcactgcatgtgcagaacgtccatgtctgcggcgggtcgatcatcacacctgagtggattgtgaccgcagctcattgcgtggagaaaccactcaataatccttggcattggactgccttcgcaggcattctaaggcagtctttcatgttctatggtgcagggtaccaggtggagaaagtgatctctcacccaaattacgactccaaaacgaagaacaacgacatcgcactgatgaagctgcaaaaacctttgacgttcaacgatttggttaagcccgtgtgcctgcccaatccgggaatgatgttgcagccagagcagctgtgctggatctctggatggggagctaccgaggagaaggggaagacttctgaggtcctgaacgctgcaaaagtgctgcttattgaaactcaaaggtgcaactctcgatacgtttatgacaatttgattacccccgctatgatttgcgccggctttctccagggcaatgtcgattcgtgtcagggagattctggaggacccctggtcacgtcaaagaacaacatctggtggctgatcggggatacgtcgtggggttcaggctgtgctaaagcttatcgcccgggcgtgtatggaaacgttatggttttcacagactggatatataggcaaatgcgctag

SEQ ID NO: 323128 - DNA, 1479 bp, Artificial Sequence
  derived and/or modified sequence
atggccctgaacagcggcagcccccccgccatcggcccctactacgagaatcacggttatcaacctgagaacccataccccgcacaacccactgtggtgccaaccgtgtatgaggtgcatcctgctcagtactacccctctccggtgccacagtatgctcccagggtgctaacacaggcaagcaatcccgtggtctgtacacagcctaagtctcctagcggaacagtgtgcaccagtaagactaaaaaggctctgtgcatcacactgactctcggcacctttttggtgggtgccgccctcgccgctggcctgctgtggaagtttatggggtcgaagtgctctaacagtggcatagagtgcgattcctcgggcacatgcattaatcctagtaattggtgtgacggcgtgagccactgccccgggggtgaagatgagaacaggtgtgtccgcttatacggtccgaattttatcctacaagtgtatagtagtcagcgtaagagttggcatcccgtgtgccaggacgactggaatgaaaattacggcagggccgcatgtagggatatggggtacaaaaataatttctactcatctcagggaattgtggacgattccgggtcgacctccttcatgaagctgaacaccagtgctggcaacgtcgatatatacaagaagttgtaccactctgacgcctgttcatccaaggcagttgtctctttgcgctgcattgcctgcggcgtcaatcttaactcctcacgccagtcaaggattgtgggaggagaatctgcattgcccggcgcgtggccttggcaggtctccctgcatgtgcagaacgtgcatgtgtgtggcggatctatcatcactcctgaatggattgtgacggcagcacattgcgtggagaaaccccttaataacccgtggcattggacagcattcgccggaatcttgcgtcagtcattcatgttctacggcgccggctaccaggtggaaaaggtgatcagccaccccaattacgacagcaaaactaagaacaatgacatcgccctcatgaagcttcagaagcccctcactttcaacgacctggttaagcctgtctgtttgcccaacccagggatgatgctgcagcctgagcaattgtgttggatctctggctggggtgcaaccgaggagaagggcaagacctctgaggtgttaaacgccgcgaaagtacttttgatagaaactcaaagatgtaacagcaggtacgtctacgataatctcattacgcccgccatgatctgcgcggggtttctccagggtaatgtcgattcatgccagggcgacagcggcggccctctggtgacgtccaagaataatatctggtggttgataggcgacacttcatggggatctgggtgcgccaaggcgtacagaccaggtgtgtacggcaacgttatggtgttcactgactggatctatcggcagatgagagcggatggctag

SEQ ID NO: 323129 - DNA, 1479 bp, Artificial Sequence
  derived and/or modified sequence
atggccttgaatagtggtagtcctcccgctatagggccttattacgaaaaccatggataccagccagaaaatccctatcctgcccagccaacagtggtgcccaccgtgtatgaggtacatcccgcacaatattaccccagccctgttcctcagtacgccccaagggtgctcacacaagcctctaacccagtcgtgtgcacccaaccaaaatccccatcaggaacagtgtgtacgagtaagacgaaaaaggccctgtgtatcacattaaccctcgggacttttctcgtcggtgcagccctggctgctgggctgctgtggaagtttatgggatctaaatgtagcaattccggcatagaatgtgattcctcgggcacttgcatcaacccctcaaactggtgtgacggggtgagccactgtccgggaggcgaagatgaaaatagatgtgtgaggttgtacgggcctaactttatcttgcaggtgtactcctcccagagaaagagctggcaccccgtgtgccaggacgattggaacgagaactatggccgagccgcatgtcgcgacatgggttataagaataacttctactcttctcaaggcattgtcgacgattccggcagcacctcctttatgaagctgaacacctctgcgggtaacgtagacatttacaagaaactgtaccattccgacgcatgttcctctaaagctgtagtatccttgcggtgtatagcctgtggcgtgaacctgaatagcagccgacagtcccgcattgttggaggcgaaagcgctcttcccggtgcgtggccatggcaggtgtctcttcacgtgcagaacgttcacgtctgcgggggtagcatcattacacccgagtggattgttaccgcagcacattgcgttgaaaagccactaaataacccttggcactggacagccttcgcaggaatcctaagacaaagtttcatgttctacggagctggataccaggtagaaaaggtgatcagtcaccctaactacgactccaaaacaaagaataatgatattgctctgatgaaactgcagaaaccattaaccttcaacgatcttgtgaagcccgtgtgccttcctaatcctggaatgatgctccaacctgagcaactttgttggatttccggctggggtgccaccgaagagaaaggcaaaacaagcgaagttctgaacgcggcaaaagtgttgctaatcgagacacaaagatgcaattcaagatacgtctacgacaatctgattaccccggctatgatttgcgctgggtttttacagggtaatgtcgactcttgtcagggtgatagcggcggacctctggttacttccaagaacaatatctggtggttgatcggcgatacatcgtgggggagcggttgcgctaaagcctatagaccaggcgtgtacggcaatgtgatggtttttaccgattggatttacaggcagatgcgggctgatggttag

SEQ ID NO: 323130 - DNA, 1470 bp, Artificial Sequence
  derived and/or modified sequence
atggccttgaattctggaagtccccctgctattgggccatactacgaaaatcacggttaccaaccggagaacccctacccagcacagcccacggttgtccctacagtgtacgaggtgcacccagcccaatactatccttctcccgttccacagtacgcgccacgggtgctgacgcaggctagcaatccagtagtgtgtacgcagccaaagagcccaagcgggaccgtttgtacgagtaaaacaaaaaaagccctgtgtatcacactgactctggggaccttcctggtgggcgcagccctggctgcgggattgttatggaaattcatgggctccaagtgcagtaactccggaattgaatgtgactccagcggaacctgtataaatccctccaactggtgtgatggtgttagccactgccccggaggagaggatgagaaccgctgcgtgaggctgtatggacctaatttcatattacaggtttatagtagtcagcggaagtcttggcatcctgtatgccaggatgattggaacgagaattatggaagggcagcgtgccgagatatgggatataaaaataatttttattcctcccagggcattgttgacgattccggctcgactagcttcatgaaactcaacacttcagctggaaacgtggatatctataagaagttataccatagtgatgcttgctcctccaaagcagtggtttccctgagatgtatcgcttgtggtgttaacctgaattcctcacgccagagccgcatcgtcggcggagagtctgcactgccaggcgcatggccatggcaggtctctcttcacgtgcaaaacgtacacgtatgtggaggctcaataatcaccccggagtggatcgtgacagcagcccactgcgttgagaaacccctcaataatccctggcactggactgccttcgctggaattctgagacaatctttcatgttttacggagctgggtatcaggtggaaaaagtcatttcacatcctaactatgacagcaagacaaagaacaatgatatcgccctcatgaagctgcagaaaccattaacctttaatgacctggtgaagcccgtgtgcctaccaaaccctgggatgatgctacagcccgaacagctgtgctggattagtggctggggtgcaaccgaggagaagggcaagaccagcgaagtccttaatgccgcaaaggtgttgcttattgagactcaaaggtgcaattccaggtacgtgtacgataatctgattactcccgctatgatttgtgcaggttttctccagggcaacgtggatagttgccagggagacagtggcggacccctcgtaacttcaaaaaataacatctggtggctcataggagacacctcctgggggagcgggtgcgccaaagcttacagaccaggagtatacggaaatgttatggtgtttacagattggatttatagacaaatgaggtag

SEQ ID NO: 323131 - DNA, 1479 bp, Artificial Sequence
  derived and/or modified sequence
atggcgctgaactctggctctccaccggctatcggcccatattacgaaaaccacggctatcagccagaaaatccttacccagcccagccgacggttgtcccaacggtgtatgaagtccatcctgctcaatattacccctccccagtgccccagtatgctccaagggtgttaacgcaggctagtaaccccgtcgtctgcacccagcccaaatccccctccggtacggtctgcacaagcaagacaaagaaggccctgtgtatcacactgaccctcggcaccttccttgtgggggcagccttagccgctggcctgctgtggaaattcatgggaagcaagtgttccaattcaggaatcgaatgtgattccagcggcacgtgtatcaacccaagtaactggtgtgatggggtcagccactgtccaggaggcgaggacgagaaccgatgcgtccggctgtacggacctaattttatcctgcaggtgtactcttcccagcgaaagtcctggcacccagtctgccaggatgattggaatgagaattacggccgtgctgcgtgccgtgacatggggtataaaaacaatttctactcctctcagggcattgtggacgactcgggcagcacatcgttcatgaagttgaacacttccgctggcaacgtcgacatctataagaagctgtatcattccgatgcttgctccagcaaggctgtcgtgtccctgagatgcattgcgtgtggggtgaacctaaacagctcccgtcaatctcggattgttggaggggagagcgctttaccaggggcttggccctggcaagtgtccctccatgtgcagaatgtgcatgtctgcggaggatccataattacccccgagtggatcgtaactgccgctcactgcgttgaaaagcctctgaacaacccgtggcattggaccgccttcgctgggatcctgaggcagagcttcatgttttatggcgcaggctatcaggtggagaaggtcattagtcacccaaactatgacagtaaaactaagaataacgatatagccctgatgaagttgcagaaacccctgacgtttaatgacctcgtgaaacccgtttgtctccccaaccccggtatgatgttgcagcccgaacagctctgctggatatccggatggggtgcaacagaggaaaaaggtaaaacctctgaggtgctgaacgctgctaaagtcctgctgattgaaactcagaggtgcaactctaggtacgtgtacgataatctgattactcctgcgatgatttgtgcaggttttctccaggggaacgttgatagctgtcagggggatagcgggggtccactggtaacctccaagaacaacatctggtggttgataggggacacctcttggggcagcggctgtgcaaaggcttatcgacctggcgtttacggcaacgtgatggtttttacagactggatttaccgtcagatgagggcagacgggtag

SEQ ID NO: 323132 - DNA, 240 bp, Artificial Sequence
  derived and/or modified sequence
atggccctgaacagcggcagcccccccgccatcggcccctactacgagaaccacggctaccagcccgagaacccctaccccgcccagcccaccgtggtgcccaccgtgtacgaggtgcaccccgcccagtactaccccagccccgtgccccagtacgcccccagagtgctgacccaggccagcaaccccgtggtgtgcacccagcccaagagccccagcggcaccgtgtgcaccagctag

SEQ ID NO: 323133 - DNA, 240 bp, Artificial Sequence
  derived and/or modified sequence
atggccctcaattctggctctcctcccgcgattggcccttactatgagaaccacgggtaccagcccgagaatccttatcccgcccagcccaccgtggtcccgacagtgtacgaggtccaccccgcacaatactatccctctccagtgccacaatacgcacccagagtccttacacaagccagcaaccccgtagtgtgtacccagcctaagtctccgtccgggaccgtctgtactagctag

SEQ ID NO: 323134 - DNA, 240 bp, Artificial Sequence
  derived and/or modified sequence
atggccctgaacagcggcagccccccagccatcggcccctactatgagaaccacggctaccagcctgagaacccctacccagcccagcccaccgtggtgcccaccgtgtatgaggtgcacccagcccagtactaccccagccctgtgccccagtatgccccccgggtgctgacccaggccagcaaccctgtggtgtgcacccagcccaagagccccagcggcaccgtgtgcaccagctag

SEQ ID NO: 323135 - DNA, 240 bp, Artificial Sequence
  derived and/or modified sequence
atggccctgaacagcggcagcccccccgccatcggcccctactacgaaaaccacgggtaccaacccgagaatccttatcctgctcaacccacggtggtccccacagtgtatgaagtccatccagctcagtattatcctagtcccgtgccacagtacgcccctcgggtgctgacacaagcaagtaaccccgtggtttgcacacagcctaaatctccctccggtacggtatgcacaagctag

SEQ ID NO: 323136 - DNA, 240 bp, Artificial Sequence
  derived and/or modified sequence
atggccctgaacagcgggtcgcctcctgcaatcggcccttattatgaaaaccacgggtatcagcctgagaacccatatcccgctcagcccactgttgtgcctaccgtgtacgaggtccaccctgctcagtattacccttcacccgtgcctcagtacgccccaagggtgctgactcaagcctccaatcctgtggtgtgtacacagccaaagagcccctccggtacggtctgtacctcctag

SEQ ID NO: 323137 - DNA, 86 bp, Artificial Sequence
  derived and/or modified sequence
gaatagaattgaatcatcattgaatggaatcgagtagaatcattgaaatcgaatggaatcatcatcgaatggaattgggtggaatc

SEQ ID NO: 323138 - protein, 144 aa, Artificial Sequence
  derived and/or modified sequence
MEPSALRKAGSEQEEGFEGLPRRVTDLGMVSNLRRSNSSLFKSWRLQCPFGNNDKQESLSSWIPENIKKKECVYFVESSKLSDAGKVVCQCGYTHEQHLEEATKPHTFQGTQWDPKKHVQEMPTDAFGDIVFTGLSQKVKKYVR

SEQ ID NO: 323139 - DNA, 1248 bp, Artificial Sequence
  derived and/or modified sequence
ctgataaggtctgttaggttagatataattgctattttattttaaatcacagcaaagttatttgtgttcacccttgggtttatttagaaaatacaaggttacaaagggcttccaaagatcattattagcagtaagaagattaccgaggaaaggaaaagtggtaaggaagtgggaagaaaaccgaagactgatgactgaataagatcttacatatttgcatagctcagaaatttgaatactatatccaggagtctatttttttttcaacttgtaaaaaatggtagtaaaatacaaaaaacataaaatgttctatcttaaccatttttaggagcacagttcagtgttattaaatatattcacaatgttgtgcaaccattaccaccatccatctccataactctgttcatcttataaaactgaaactatggccgttttaagtccccattgcccttcttcccagtaaccactattctattttgtctccatgattttggttactctatatacttcatgtcagtggaattacacagtatttatatttttgtggctgggttatttcacttagcataagtccttaggattcatgtaatgtgtagtatatatcagaatttccttcctttttaaggctaaataataatccagtgaatggaaatagcacattatgctaaagtattcactgctgatggacatttaggttgctacattttagctactatgaattatcattcagccaagcactgtggctcatgcttgcagtcccagctatgcaagaggttaaagcaggaagatcgcttgagtccaggatttcaaggccagcttgggcaacacagtgagacctcatctcttaaaactgtaataggcccacttgctccctcctgccatctggctgacatgaagaactggaggtggcagcagtggtagcctgcatctgaggctcatgggctgcaagcccctgctcgtgcaccatggatgattttgccaaagaaagtttcactgtagtggattatgtcttgttagaaaattgccctaatatgggtgactatgtcgttgctcctcaatttatgaccgacaattatgttcgtgtgactcagcttaactgggatggggtgggtacgcaataaaaagattacatctaagtgagagaaatttagcaattcttgtggttctgagataagtttgaagaaatcacaacatcttgagttgatagaagatattgtggatttggcaaagaaagttgctgtaagtggt

SEQ ID NO: 323140 - DNA, 1839 bp, Artificial Sequence
  derived and/or modified sequence
atgctgggcgagtacgactgggccctgcaggccaacatcaaggcccagaagctgtgcaagaacgaccccgagggcatcaaggacctgatccagcagcacgtgaagctgcagaagcagatcgaggacctgcagggcagaaccgccaacaaggaccccatcaaggccttctacgagaacagagcctacacccccagaagcctgagcgcccccatcttcaccaccagcctgaacttcgtggagaaggagagagacttcagaaagatcaaccacgagatggccaacggcggcaaccagaacctgaaggtggccgacgaggccctgaaggtggacgactgcgactgccaccccgagttcagcccccccagcagccagccccccaagcacaagggcaagcagaagagcagaaacaacgagagcgagaagttcagcagcagcagccccctgaccctgcccgccgacctgaagaacatcctggagaagcagttcagcaagagcagcagagccgcccaccaggacttcgccaacatcatgaagatgctgagaagcctgatccaggacggctacatggccctgctggagcagagatgcagaagcgccgcccaggccttcaccgagctgctgaacggcctggacccccagaagatcaagcagctgaacctggccatgatcaactacgtgctggtggtgtacggcctggccatcagcctgctgggcatcggccagcccgaggagctgagcgaggccgagaaccagttcaagagaatcatcgagcactaccccagcgagggcctggactgcctggcctactgcggcatcggcaaggtgtacctgaagaagaacagattcctggaggccctgaaccacttcgagaaggccagaaccctgatctacagactgcccggcgtgctgacctggcccaccagcaacgtgatcatcgaggagagccagccccagaagatcaagatgctgctggagaagttcgtggaggagtgcaagttcccccccgtgcccgacgccatctgctgctaccagaagtgccacggctacagcaagatccagatctacatcaccgaccccgacttcaagggcttcatcagaatcagctgctgccagtactgcaagatcgagttccacatgaactgctggaagaagctgaagaccaccaccttcaacgacaagatcgacaaggacttcctgcagggcatctgcctgacccccgactgcgagggcgtgatcagcaagatcatcatcttcagcagcggcggcgaggtgaagtgcgagttcgagcacaaggtgatcaaggagaaggtgccccccagacccatcctgaagcagaagtgcagcagcctggagaagctgagactgaaggaggacaagaagctgaagagaaagatccagaagaaggaggccaagaagctggcccaggagagaatggaggaggacctgagagagagcaacccccccaagaacgaggagcagaaggagaccgtggacaacgtgcagagatgccagttcctggacgacagaatcctgcagtgcatcaagcagtacgccgacaagatcaagagcggcatccagaacaccgccatgctgctgaaggagctgctgagctggaaggtgctgagcaccgaggactacaccacctgcttcagcagcagaaacttcctgaacgaggccgtggactacgtgatcagacacctgatccaggagaacaacagagtgaagaccagaatcttcctgcacgtgctgagcgagctgaaggaggtggagcccaagctggccgcctggatccagaagctgaacagcttcggcatgagcctgtacatccccgagcagtag

SEQ ID NO: 323141 - DNA, 1839 bp, Artificial Sequence
  derived and/or modified sequence
atgttgggcgagtacgattgggctttgcaggccaatattaaagcccagaagctttgtaagaacgaccctgagggcatcaaggatctgatccagcagcacgtcaagctgcagaagcagatagaggacctccagggccggactgcgaataaggaccctatcaaggcattttacgaaaatagagcatacactcccagatccctaagcgcaccaatttttacaacatccctgaactttgtggagaaggagcgcgactttaggaaaattaatcatgaaatggccaatggagggaatcagaaccttaaggttgcagatgaggccctaaaggtggacgactgtgactgtcatccagaattttctcctcctagttcacagccccccaaacacaagggaaagcagaaaagccgaaacaatgagtctgagaagttcagttctagcagcccgctgaccctgccagcggatctaaaaaacattctcgaaaaacaattttctaagagctctagagcagcgcatcaggattttgcaaatataatgaaaatgcttagatcgctcatccaggatgggtatatggctctgcttgagcaacggtgccgcagcgcggcccaggcctttaccgaactgctgaacgggctggatcctcagaaaatcaagcaactgaatctagcgatgataaactacgtgctggtggtgtatgggctggccatctcattgctgggcatcggccagccagaggaattatcagaggctgagaaccagtttaagcgaattatcgagcattatcctagcgagggactggactgcctggcttattgtgggataggcaaagtgtatctgaagaaaaatcggtttctcgaagccctcaatcactttgaaaaagcccggacactcatttaccggttgccaggcgtgctcacttggccgaccagcaatgtaattattgaagagtcacagccccaaaagataaaaatgctgttggaaaagttcgtggaagaatgtaaatttcccccggtgccagacgcaatatgctgttaccaaaaatgccatggttactctaagattcagatctacattacggaccctgactttaagggattcatccgcatttcttgctgtcagtattgtaagatcgaattccacatgaactgttggaagaagcttaaaacaactaccttcaatgataaaatcgacaaggacttcttgcagggtatttgcctcactcctgactgcgagggcgtgatctctaaaatcatcattttcagtagtggcggcgaggtgaaatgcgagttcgagcacaaagttattaaagagaaagtgcccccgcgtcccattctcaaacagaagtgctccagtctggaaaaattgaggctgaaggaggacaaaaagctaaagcgcaagattcagaagaaagaagccaaaaaacttgcccaagagcgaatggaagaagacctcagggaatctaatcctcctaagaatgaggaacaaaaggagaccgttgataacgtgcagcgctgccagttcctggacgacaggatcttacagtgtataaagcagtatgctgacaagatcaaatccgggattcaaaatactgccatgttattgaaagagctgctatcttggaaagttctcagcactgaagactatacaacatgcttttcctcaaggaattttctgaacgaggcagttgactacgttatccgacaccttatacaggagaataacagagtcaagaccagaattttcttacacgtgctgtccgaactcaaagaagtggaacccaagctggccgcctggattcaaaaactcaattccttcggaatgagtctttatattccagagcaatag

SEQ ID NO: 323142 - DNA, 1839 bp, Artificial Sequence
  derived and/or modified sequence
atgctgggggagtatgactgggccctgcaggccaacatcaaggcccagaagctgtgcaagaatgaccctgagggcatcaaggacctgatccagcagcacgtgaagctgcagaagcagatcgaggacctgcagggccgcacagccaacaaggaccccatcaaggccttctatgagaacagagcctacacccccaggagcctgagcgcccccatcttcaccaccagcctgaactttgtggagaaggagcgggacttcaggaagatcaaccacgagatggccaacggcggcaaccagaacctgaaggtggctgatgaggccctgaaggtggatgactgtgactgccaccctgagttcagcccccccagcagccagccccccaagcacaagggcaagcagaagagcagaaataatgaaagtgagaagttcagcagcagcagccccctgaccctgcctgctgacctgaagaacatcctggagaagcagttcagcaagagcagccgggccgcccaccaggactttgccaacatcatgaagatgctgcggagcctcatccaggacggctacatggccctgctggagcagcgctgccgctctgctgcccaggccttcacagagctgctgaatggcctggacccccagaagatcaagcagctgaacctggccatgatcaactacgtgctggtggtgtatggcctggccatcagcctgctgggcatcggccagcctgaggagctgtctgaggccgagaaccagttcaagaggatcatcgagcactaccccagcgagggcctggactgcctggcctactgcggcatcggcaaggtgtacctgaagaagaaccgcttcctggaggccctgaaccactttgagaaggcccggaccctcatctaccgcctgcccggggtgctgacctggcccaccagcaatgtcatcatcgaggagagccagccccagaagatcaagatgctgctggagaagtttgtggaggagtgcaagttcccccctgtgcctgatgccatctgctgctaccagaagtgccacggctacagcaagatccagatctacatcacagatcctgacttcaagggcttcatccgcatcagctgctgccagtactgcaagattgagttccacatgaactgctggaagaagctgaagaccaccaccttcaatgacaagattgacaaggacttcctgcagggcatctgcctgaccccagactgtgagggcgtcatcagcaagatcatcatcttcagcagcggcggggaggtgaagtgtgaatttgagcacaaggtgatcaaggagaaggtgcccccccggcccatcctgaagcagaagtgcagcagcctggagaagctgcggctgaaggaggacaagaagctgaagaggaagatccagaagaaggaggccaagaagctggcccaggagaggatggaggaggacctgcgggagagcaacccccccaagaatgaggagcagaaggagaccgtggacaacgtgcagcgctgccagttcctggatgaccgcatcctgcagtgcatcaagcagtatgctgacaagatcaagagcggcatccagaacacagccatgctgctgaaggagctgctgtcctggaaggtgctgagcacagaggactacaccacctgcttcagcagcaggaacttcctgaatgaagctgtggactatgtgatccgccacctgatccaggagaacaacagagtgaagacccgcatcttcctgcacgtgctgtctgagctgaaggaggtggagcccaagctggccgcctggatccagaagctgaacagctttggcatgagcctgtacatccctgagcagtag

SEQ ID NO: 323143 - DNA, 1839 bp, Artificial Sequence
  derived and/or modified sequence
atgctgggcgagtacgactgggccctgcaggccaacatcaaggcccagaaactatgtaagaatgaccctgaggggataaaggacctgatacaacagcacgtgaagctgcagaagcagatcgaggatctgcagggccgcactgccaataaagaccccattaaagctttttacgaaaaccgggcctatacaccccgctccttgtcagcacccatctttaccacatctctgaatttcgtggaaaaagaacgagacttcagaaagatcaaccacgagatggctaacgggggcaatcaaaatctgaaggtggcggatgaggccctcaaggttgacgattgtgactgccaccctgagttctctccgccatcaagccagccacctaagcacaaaggaaagcagaagagtcgcaacaatgaatcggaaaagttcagtagctcttcacctctgacgctaccggccgatctgaagaatattcttgaaaagcaattcagcaagtcttcgcgggctgcgcaccaagattttgcgaacattatgaagatgctcaggtctctgattcaggatggttacatggcactcctggaacaacgttgtcgctccgccgctcaggcttttactgaactacttaacggcttggacccccagaaaattaaacaactgaaccttgcaatgataaactatgtgctggtggtgtatggtcttgccatatctttactcggcatcgggcaacctgaagaactatctgaggcagaaaaccagtttaaaagaattatcgaacattacccatctgaaggccttgactgtctggcatactgtggcatcgggaaggtttatctgaaaaagaaccggtttttagaagcactgaaccattttgagaaagcccggacactgatctatcgcctccccggtgttcttacctggccgaccagtaacgtgatcattgaggagagtcagcctcagaagattaagatgctccttgaaaaatttgtcgaggagtgcaaattcccacccgtacctgatgcaatctgttgctaccagaaatgccacggctattcaaagattcagatctacattactgacccagactttaaagggttcatacggatttcttgttgccagtactgcaagatcgagttccatatgaactgttggaagaaattgaagacaactacgttcaacgacaaaatcgataaggactttctgcagggtatttgcttaaccccggactgtgaaggcgtgatctccaaaatcattatcttcagcagtggcggagaggtgaagtgcgaattcgaacacaaggtgataaaggaaaaggtgccccccaggcctatcctcaagcagaaatgctcttctttagagaagctgcggcttaaagaagataaaaagctgaaacgcaagatccagaaaaaggaggcaaagaaacttgctcaggaacgtatggaggaagacttgcgagagagcaacccgccaaagaacgaagagcagaaagaaacagtggataatgtgcaacggtgtcagtttttggacgaccgcatactccaatgcatcaaacaatatgcagacaaaatcaagtctggcatccagaacacagctatgctgctgaaggagcttctgagttggaaagttctctccaccgaagattataccacatgtttctcaagccgaaacttcttgaatgaggcagtcgattacgtaattagacatctgattcaagagaacaaccgtgtgaagacccggatttttctacacgtgctgtccgagttgaaggaggtcgagcctaagctcgcggcatggatccagaagctaaactcattcggaatgtctttgtacattcccgagcagtag

SEQ ID NO: 323144 - DNA, 1839 bp, Artificial Sequence
  derived and/or modified sequence
atgctgggcgagtacgactgggccttgcaggccaatattaaagcccagaagctgtgtaaaaatgacccggaaggaatcaaggacctgattcagcagcacgtcaagcttcagaaacaaatcgaagatctgcaggggagaacagccaataaagatcctattaaagccttttatgagaatagagcgtacactcctagatctttgtcagcaccaatcttcacaacctctctcaattttgtcgagaaggagcgcgactttcgaaagattaaccacgagatggccaacggcggaaatcaaaacctcaaagtggcagatgaagcactgaaggtggatgattgcgattgccatcccgagttctccccaccgagctctcagccccctaagcataagggcaagcaaaaaagtagaaataacgaatcggagaagtttagctccagttccccactgaccctgccggctgatctgaagaatatactcgaaaaacagtttagcaagtcctctagggccgcacaccaggactttgctaacattatgaagatgttgcggtcactgattcaggatggatatatggccctgctagagcagcgatgtagatcagcggctcaggctttcacggagctgcttaatggcctggacccacaaaaaatcaagcagttgaatcttgctatgattaattacgtgctagtggtgtatggccttgctattagtttactgggtattggacaacctgaagaactctcagaagccgaaaatcaatttaagaggattatcgagcactatccatccgagggccttgattgccttgcctattgcgggatcggcaaggtgtatctcaaaaaaaatcgcttcttagaagcactgaaccacttcgaaaaggcaagaactctcatctataggttacctggggtacttacgtggccaaccagcaacgttattattgaggagagccagccccagaagatcaagatgctgcttgagaagttcgtcgaagaatgcaagttccctcctgtcccagatgcgatttgttgttatcagaagtgtcatggatactctaagatacaaatctacatcactgatccagactttaagggctttattcgcataagctgctgtcagtattgcaaaattgaatttcacatgaactgctggaagaaactgaaaactactacctttaatgataagattgataaggacttcctgcaaggcatttgcctaactccagactgtgagggcgttattagtaagatcattatattctcttccgggggtgaggtgaagtgtgaattcgagcacaaagttattaaagaaaaggtgcccccacgccctatcctcaaacagaaatgctcaagcctcgagaaacttcgactcaaggaagacaaaaagctaaagagaaagattcagaagaaggaggctaaaaaactcgctcaggagcgcatggaggaggatcttcgcgaatccaatcctccaaagaacgaagaacaaaaggagaccgtcgataatgtacagcgctgtcagtttctggacgacagaattttgcagtgtattaagcagtatgcagataaaatcaaaagcggaatacagaatacggcaatgctgctgaaggaactgctctcttggaaggtgttatctacagaggactacaccacatgcttttcgtccagaaactttcttaacgaagctgtggactacgtaatcaggcatctgatacaggaaaacaacagggtgaagactcggattttcctgcatgtgctgtctgaactcaaagaagtggagcccaaactcgcagcttggatacagaagttaaacagcttcggcatgagtctttacatccctgagcagtag

SEQ ID NO: 323145 - DNA, 2025 bp, Artificial Sequence
  derived and/or modified sequence
gtggagggccggaggtggcggcggcggcggcggcggctgctgctgctgctgcccgcgtccgaggctcgcgggcggcgggcccggaaatgcactcggtgatggaaagagagccactattctgaagaacacttggccaaagggtcattatcgttattgtgatgctctttctatgctgggggaatatgactgggccctgcaagcaaacataaaagctcaaaaactctgtaaaaatgaccctgagggaatcaaggatctaattcagcagcatgtaaagttacaaaaacaaatagaagacctacaaggtcgaacagcaaataaggatccaattaaagccttttatgaaaacagggcctacacacctaggagtttatcagcacctatatttactacttcacttaactttgtggagaaggaaagagatttcagaaaaattaatcacgaaatggccaacggtggtaatcagaatctaaaggtggcggatgaggcgttgaaggtagatgattgtgactgtcatcctgaattttcaccaccatcaagtcagcctccaaaacataaaggaaaacaaaaatctcgaaacaatgaatcagaaaagttcagttctagttcaccattgactttaccagcagatttgaagaacatcttggagaaacagttttctaaatcttccagagctgcacaccaggattttgctaatataatgaaaatgctgagaagcttaattcaagatggctatatggccttattggagcagcgttgccgcagcgctgcacaggcctttacagagttgctgaacggtttagatcctcaaaaaataaagcaattgaacctggccatgattaactatgttttggtcgtctatggacttgccatttctctccttggaataggacagcctgaggaattatctgaagccgaaaaccagtttaagaggattattgaacactaccccagtgagggccttgattgcttggcctactgtggaattggaaaagtatatttgaaaaaaaacagatttctagaagctctcaatcactttgagaaagcaagaaccttgatttatcgtcttcctggagtgttaacttggcccacgagtaatgtgattattgaagagtctcagccacaaaaaataaagatgctgttagagaaatttgttgaagaatgcaagttccctccagtgccagatgccatttgttgctatcagaagtgccatggatattctaagatccagatatacataactgatccagactttaagggttttatacgcatcagctgttgccagtactgtaaaatagaatttcacatgaattgctggaagaagttaaaaactacaacctttaatgataaaattgacaaggattttctacaaggaatatgtcttacccctgactgtgaaggtgtcatttctaagattatcatcttcagcagtggtggtgaagttaaatgtgaatttgaacacaaggtcataaaagaaaaggttcctccaagacctattctgaaacagaaatgttctagcctagagaaactaagactgaaagaagacaaaaaattgaagagaaagatccaaaaaaaagaagcaaaaaagttagcacaagaaagaatggaggaggacttaagagaaagtaatccacccaaaaatgaagagcagaaagaaactgtagacaatgttcagcgttgtcagttccttgatgacagaattctacagtgtataaagcagtatgctgacaagattaaatccggcatacagaatacagccatgcttctcaaagaattgctttcttggaaagttttgagcacagaagactatacaacctgtttttctagcagaaattttctaaatgaagcagtggactatgttattcgccacttgattcaagaaaataacagagtaaagacaagaatatttctgcatgttttgagtgagcttaaagaagtggagcccaaattagccgcctggatccaaaaacttaatagctttggtatgtccctttatattccagagcaataaactttaatacgaagggg

SEQ ID NO: 323146 - DNA, 699 bp, Artificial Sequence
  derived and/or modified sequence
ggatcctcctcccgtccttctcatccttcgtaagtggctgcctggcctcccaagggccggtggggatgccgccccagtcccccggcgggtctggcgtagatgtccagggtgctgcagaaggacgcggagcaggagtcacagatgagagcggagatccaggacatgaagcaggagctctccacagtcaacatgatggacgagtttgccagatatgccaggctggaaagaaagatcaacaagatgacggataagctcaaaacccatgtgaaagctcggacagctcaattagccaagataaaatgggtgataagtgtcgctttctacgtattgcaggctgccctgatgatctcactcatttggaagtattattctgtccctgtggctgtcgtgccgagtaaatggataacccctctagaccgcctggtagcctttcctactagagtagcaggtggtgttggaattacctgttggattttagtctgtaacaaagttgtcgctattgtgcttcatccgttcagctgaacaggaggatggatacagccgcgaggctaaaaaacggatttcctcttcctagcttaaaatctgatttacactgttttgttttttaagaaacaaaagtgcatagtttagattttttttttgttgaatatgtttgttcttggactttatgagagagtcttataagaatcacgattttct

SEQ ID NO: 323147 - DNA, 402 bp, Artificial Sequence
  derived and/or modified sequence
atggtgtctgtgggctttggagaccgggccggcctgggcagcagctgccgctgcagccagatcaccccagacatggccagcgctgtggccaccaggtatgtgctgggccactggccccgggaccacatctgtggctgcggcagccaccagctgagctcctggagggctgagccagatggaggagtgggcatgccccacaccctgtctgagcccccatctggcctgaccggcatctgggccggggccctggtgtccccagagaagcagatgaaggagaacctgcggagcaatgattctgagccccggctgcccggctttgagagctgcctgatccacagcctggccgtgtggccctgggccagcaactttgccagcctgggccccagcgtgaacaagggctag

SEQ ID NO: 323148 - DNA, 99 bp, Artificial Sequence
  derived and/or modified sequence
atggccagcgacagcatcttcgagagcttccccagctacccccagtgcttcatgagagagtgcatcctgggcatgaaccccagcagagacgtgcactag

SEQ ID NO: 323149 - DNA, 576 bp, Artificial Sequence
  derived and/or modified sequence
atgaaccccagcagagacgtgcacgacgccagcaccagcagaagattcaccccccccagcaccgccctgagccccggcaagatgagcgaggccctgcccctgggcgcccccgacgccggcgccgccctggccggcaagctgagaagcggcgacagaagcatggtggaggtgctggccgaccaccccggcgagctggtgagaaccgacagccccaacttcctgtgcagcgtgctgcccacccactggagatgcaacaagaccctgcccatcgccttcaaggtggtggccctgggcgacgtgcccgacggcaccctggtgaccgtgatggccggcaacgacgagaactacagcgccgagctgagaaacgccaccgccgccatgaagaaccaggtggccagattcaacgacctgagattcgtgggcagaagcggcagaggcaagagcttcaccctgaccatcaccgtgttcaccaaccccccccaggtggccacctaccacagagccatcaagatcaccgtggacggccccagagagcccagaaacagcctgacctggcccagatacccccacatctag

SEQ ID NO: 323150 - DNA, 99 bp, Artificial Sequence
  derived and/or modified sequence
atggcgtcagacagcattttcgaatctttcccatcctaccctcagtgcttcatgcgggagtgcattcttgggatgaatcccagcagagacgtgcactag

SEQ ID NO: 323151 - DNA, 576 bp, Artificial Sequence
  derived and/or modified sequence
atgaatcctagccgggacgtccatgatgcctccacaagtcgcagatttactccaccctccactgctcttagtcccgggaagatgtccgaggcacttccattaggggcccccgatgccggggcagcattggccggaaagctcagatctggtgataggtcaatggtggaggtcttggctgatcatcccggagagctagtgagaaccgacagccccaacttcctatgttccgtgctgcccacccactggcggtgcaataagacacttccaatagcattcaaggtggtggctctgggagacgtccctgacggtacgctggtgaccgtcatggccggtaacgatgaaaattacagtgccgagttgagaaatgcaaccgcagctatgaaaaaccaggtggccaggtttaacgatctccggttcgtggggaggtcaggccgcgggaagtccttcacactgacgatcactgtgttcaccaacccaccgcaggtggcaacctatcaccgcgccattaaaattacagtcgacgggccacgggagccacgcaattctctgacatggccgcgctatccccacatctag

SEQ ID NO: 323152 - DNA, 99 bp, Artificial Sequence
  derived and/or modified sequence
atggccagtgacagcatctttgagagcttccccagctacccccagtgcttcatgagggagtgcatcctgggcatgaaccccagcagagatgtgcactag

SEQ ID NO: 323153 - DNA, 576 bp, Artificial Sequence
  derived and/or modified sequence
atgaaccccagcagagatgtgcatgatgccagcaccagccgccgcttcaccccacccagcacagccctgagccctgggaagatgtctgaggccctgcccctgggcgccccagatgctggagctgccctggccggcaagctgcggagcggggaccgctccatggtggaggtgctggccgaccaccctggagagctggtgaggacagacagccccaacttcctgtgcagcgtgctgcccacccactggcgctgcaacaagaccctgcccatcgccttcaaggtggtggccctgggagatgtgcctgatggcaccctggtgacagtgatggctggaaatgatgagaactacagcgctgagctgagaaatgccacagctgccatgaagaaccaggtggcccgcttcaatgacctgcgctttgtgggccgcagcggccggggcaagagcttcaccctgaccatcaccgtcttcaccaaccccccccaggtggccacctaccaccgggccatcaagatcaccgtggatggcccccgggagcccaggaacagcctgacctggccccgctacccccacatctag

SEQ ID NO: 323154 - DNA, 99 bp, Artificial Sequence
  derived and/or modified sequence
atggccagcgacagcatcttcgagagcttccccagctacccccagtgctttatgagggagtgcatccttggcatgaaccccagccgggatgtgcactag

SEQ ID NO: 323155 - DNA, 576 bp, Artificial Sequence
  derived and/or modified sequence
atgaaccccagccgggacgtgcacgacgccagcaccagccggcggtttaccccacctagtacagccctctcacccggaaaaatgagtgaggcattgcccctgggggcaccagatgctggggcagcactggccggaaagctccgatcaggcgaccgatctatggtagaagtgctagctgatcatcctggcgagctagtgcgaactgactcacctaatttcctctgctctgtcctgccaactcactggagatgtaacaagacgctgcccattgcgttcaaagtggtggcactcggggatgtcccggatggcaccctcgtgacagtcatggcgggaaatgacgagaactattcagctgagctgcgcaacgcaactgctgcaatgaaaaatcaggtggcgcgcttcaacgacctgagattcgtgggccgctcaggacgtgggaagtcttttactctgacaataaccgtgttcaccaaccctccccaggtggccacctatcaccgcgccatcaaaatcactgtcgatggaccccgcgaacctcgcaattctttgacttggcccaggtacccccacatttag

SEQ ID NO: 323156 - DNA, 99 bp, Artificial Sequence
  derived and/or modified sequence
atggcttctgacagtatattcgagagcttcccctcctacccccagtgttttatgagggaatgtatcctgggaatgaatccctcccgggatgtccactag

SEQ ID NO: 323157 - DNA, 576 bp, Artificial Sequence
  derived and/or modified sequence
atgaatccaagtcgtgacgtgcacgacgctagcacaagtcgccgttttacccctccttcaactgctttgtcaccaggcaagatgtctgaggcacttccccttggagcaccagacgccggagccgcacttgcaggaaaactccgttcaggggatcggtcaatggtcgaggtgttggcagaccaccccggtgaactggtccgtaccgattcacccaacttcctgtgctctgtgctacccactcattggcggtgtaataagacactgccaatcgcttttaaagttgtggctttgggtgacgtccctgacgggactctggttaccgtcatggctggtaacgatgagaactactccgctgaactgcggaatgcaaccgcagccatgaaaaaccaggtggccaggtttaatgatctacggttcgtgggtcggagcgggaggggcaaatcttttacgctgacgattactgtgttcacgaatccgccacaagtggcgacctaccacagagctattaaaattaccgtagacggcccaagagagcccagaaattcacttacttggccccgataccctcacatatag

SEQ ID NO: 323158 - DNA, 346 bp, Artificial Sequence
  derived and/or modified sequence
cacaagttgggtagcctggcagtgtcagaagtctgaacccagcatagtggtcagcaggcaggacgaatcacactgaatgcaaaccacagggtttcgcagcgtggtgagcatcaccaacccacagccaaggcggcgctggctttttttttttttttaatctttaacaatttgaatatttgtttttacaaaggtaaaagaaatcattgagtcccccgccttcagaagagggtgcattttcaggaggaagcgatggcttcagacagcatatttgagtcatttccttcgtacccacagtgcttcatgagagaatgcatacttggaatgaatccttctagagacgtccacg

SEQ ID NO: 323159 - DNA, 792 bp, Artificial Sequence
  derived and/or modified sequence
gagcatcaccaacccacagccaaggcggcgctggctttttttttttttttaatctttaacaatttgaatatttgtttttacaaaggtaaaagaaatcattgagtcccccgccttcagaagagggtgcattttcaggaggaagcgatggcttcagacagcatatttgagtcatttccttcgtacccacagtgcttcatgagagaatgcatacttggaatgaatccttctagagacgtccacgatgccagcacgagccgccgcttcacgccgccttccaccgcgctgagcccaggcaagatgagcgaggcgttgccgctgggcgccccggacgccggcgctgccctggccggcaagctgaggagcggcgaccgcagcatggtggaggtgctggccgaccacccgggcgagctggtgcgcaccgacagccccaacttcctctgctccgtgctgcctacgcactggcgctgcaacaagaccctgcccatcgctttcaaggtggtggccctaggggatgttccagatggcactctggtcactgtgatggctggcaatgatgaaaactactcggctgagctgagaaatgctaccgcagccatgaagaaccaggttgcaagatttaatgacctcaggtttgtcggtcgaagtggaagagggaaaagcttcactctgaccatcactgtcttcacaaacccaccgcaagtcgccacctaccacagagccatcaaaatcacagtggatgggccccgagaacctcgaaactctttgacctggcctcggtatcctcacatttaa

SEQ ID NO: 323160 - protein, 565 aa, Artificial Sequence
  derived and/or modified sequence
MPSETPQAEVGPTGCPHRSGPHSAKGSLEKGSPEDKEAKEPLWIRPDAPSRCTWQLGRPASESPHHHTAPAKSPKILPDILKKIGDTPMVRINKIGKKFGLKCELLAKCEFFNAGGSVKDRISLRMIEDAERDGTLKPGDTIIEPTSGNTGIGLALAAAVRGYRCIIVMPEKMSSEKVDVLRALGAEIVRTPTNARFDSPESHVGVAWRLKNEIPNSHILDQYRNASNPLAHYDTTADEILQQCDGKLDMLVASVGTGGTITGIARKLKEKCPGCRIIGVDPEGSILAEPEELNQTEQTTYEVEGIGYDFIPTVLDRTVVDKWFKSNDEEAFTFARMLIAQEGLLCGGSAGSTVAVAVKAAQELQEGQRCVVILPDSVRNYMTKFLSDRWMLQKGFLKEEDLTEKKPWWWHLRVQELGLSAPLTVLPTITCGHTIEILREKGFDQAPVVDEAGVILGMVTLGNMLSSLLAGKVQPSDQVGKVIYKQFKQIRLTDTLGRLSHILEMDHFALVVHEQIQSQDQAWAGVVGGPADHSTGKSSQRQMVFGVVTAIDLLNFVAAQERDQK

SEQ ID NO: 323161 - DNA, 1698 bp, Artificial Sequence
  derived and/or modified sequence
atgccctccgaaacgccgcaggccgaggttggaccgaccggctgcccacatcgcagcggcccgcatagcgctaaggggtcattagaaaagggttctcctgaagataaggaagcgaaggagcccctgtggatccggccagatgcaccttcaaggtgcacctggcaactagggagaccggcgagcgagagtccccaccaccacacagcgcctgctaagagtcccaagatcctccctgacattttgaaaaaaataggggacacacccatggttcggatcaacaaaatcggtaaaaaattcgggctgaagtgtgagttgcttgcgaagtgcgaattttttaacgccggcggttcagttaaagacagaatttccctgagaatgatcgaggacgccgagcgggacggaaccctgaaacccggtgataccatcattgagcctaccagcggcaacacagggatcggactggcgctcgcagctgctgtacgagggtatcgctgtattatagtgatgcctgaaaagatgagttccgagaaggttgatgttctgagggcattaggagctgagattgtcagaacaccaaccaacgcacgattcgacagtccggaatcccacgtgggcgtcgcgtggagactcaaaaacgaaattcccaacagtcatatcctcgaccaatatagaaatgcttcaaaccctctggcgcattacgacactacagcagatgagatcctgcagcagtgtgatggcaaacttgacatgttggtggcctctgttggcacaggaggcacaatcaccggcattgcgaggaagcttaaggaaaagtgtcctggatgccgaatcatcggagtcgatcctgagggaagtatcctcgccgaacctgaggagctgaaccagactgagcagactacctacgaggtcgaaggcataggctacgactttatacccaccgtgctcgaccggacagttgtggataaatggttcaagtctaacgatgaggaagcattcacctttgcacggatgctaatcgctcaggaggggctgttgtgcggaggatccgctggctcaaccgtggccgtcgcggtgaaggccgctcaggaattgcaggagggtcagaggtgcgtggtcattttgcccgatagcgtccggaactacatgacaaaattcctctctgacaggtggatgctgcagaagggcttcctaaaagaggaggacttaacagaaaagaaaccctggtggtggcatctgagagtgcaggaacttggactaagcgccccgctgacagttctcccgacaattacctgtggacataccatcgaaatcctgcgtgagaaagggtttgatcaagcacctgttgtggacgaggccggggtgatattgggcatggttacgcttgggaacatgcttagttccctcctggcaggaaaagttcaaccttctgaccaggtgggcaaagtgatctataagcagtttaagcaaatccggttaaccgataccctcgggcggttgtctcacattttagagatggaccactttgcattggtggtacacgagcagatccaaagccaagatcaggcctgggccggagtggtgggaggccccgcagaccactctaccggaaagagctcacagcgacagatggtgttcggtgtcgtcactgctattgacctacttaatttcgtcgcggcccaagagcgggaccagaagtag

SEQ ID NO: 323162 - DNA, 1698 bp, Artificial Sequence
  derived and/or modified sequence
atgcccagcgagaccccccaggccgaggtgggccccaccggctgcccccacaggagcggcccccacagcgccaagggcagcctggagaagggcagccctgaggacaaggaggccaaggagcccctgtggatccggccagatgcccccagccgctgcacctggcagctgggccgcccagccagcgagagcccccaccaccacacagccccagccaagagccccaagatcctgcctgacatcctgaagaagatcggggacacccccatggtgcgcatcaacaagattggcaagaagtttggcctgaagtgtgagctgctggccaagtgtgagttcttcaatgctgggggctctgtgaaggaccgcatcagcctgaggatgattgaagatgctgagagagatggcaccctgaagccaggggacaccatcatcgagcccaccagcggcaacacaggcatcggcctggccctggccgctgctgtgcggggctaccgctgcatcatcgtgatgcctgagaagatgagcagcgagaaggtggatgtgctgcgggccctgggcgctgagatcgtgaggacccccaccaatgccaggtttgacagccctgagagccacgtgggcgtggcctggaggctgaagaatgagatccccaacagccacatcctggaccagtacagaaatgccagcaaccccctggcccactatgacaccacagcagatgagatcctgcagcagtgtgatggcaagctggacatgctggtggcctctgtgggcactggaggcaccatcaccggcatcgccaggaagctgaaggagaagtgccccggctgccgcatcatcggcgtggaccctgagggcagcatcctggccgagcctgaggagctgaaccagacagagcagaccacctatgaggtggagggcatcggctatgacttcatccccaccgtgctggacagaacagtggtggacaagtggttcaagagcaatgatgaggaggccttcacctttgccaggatgctgattgcccaggagggcctgctgtgtggcggcagcgctggcagcacagtggccgtggccgtgaaggccgcccaggagctgcaggagggccagagatgtgtggtgatcctgcctgattctgtgaggaactacatgaccaagttcctgagtgaccgctggatgctgcagaagggcttcctgaaggaggaggacctgacagagaagaagccctggtggtggcacctgcgggtgcaggagctgggcctgagcgcccccctgactgtgctgcccaccatcacctgtggccacaccatcgagatcctgcgggagaagggctttgaccaggcccctgtggtggatgaggccggggtcatcctgggcatggtgaccctgggcaacatgctgagcagcctgctggccggcaaggtgcagcccagcgaccaggtgggcaaggtgatctacaagcagttcaagcagatccggctgacagacaccctgggccgcctgagccacatcctggagatggaccactttgccctggtggtgcatgagcagatccagagccaggaccaggcctgggccggcgtggtgggcggccctgctgaccacagcacaggcaagagcagccagaggcagatggtgtttggagtggtgacagccatcgacctgctgaactttgtggccgcccaggagcgggaccagaagtag

SEQ ID NO: 323163 - DNA, 1698 bp, Artificial Sequence
  derived and/or modified sequence
atgcccagcgagaccccccaggccgaggtgggccccaccggctgcccccatcggtccgggccacatagtgccaagggcagcctggaaaagggttccccagaagacaaggaagcaaaggagccgctgtggatccggcctgacgccccttctcggtgcacctggcaactgggccgccccgcgtccgaaagcccacaccatcataccgctccagcgaagagtccaaaaattctacctgacatactcaagaagattggcgatacccccatggtccgtattaacaagatagggaaaaaattcggcctgaagtgcgaactgcttgctaagtgtgagttttttaacgccggcgggagtgtgaaagatcggattagtctccggatgattgaggatgcagagcgggatggaaccctaaagcctggagataccattattgaacccactagcggcaatacagggatcggtctcgcccttgccgccgccgtcagaggataccgctgtataatcgtaatgccagagaaaatgagtagcgagaaggtagacgtacttagggctctcggagcagaaattgtgcgaaccccgacaaacgccaggttcgacagtcccgagagtcatgtcggggttgcctggcgcctaaaaaatgaaattccgaactcccatatactagatcagtacaggaacgctagcaaccctttagcacactacgacaccacggcagatgagattctgcagcaatgcgatgggaaattagatatgctggtcgcttcggtggggacaggcggaaccatcacaggtattgcccgcaaactgaaagagaaatgcccaggctgccgcattattggcgtggaccccgagggctccatcctggccgagcctgaggaactgaaccagactgagcagaccacatatgaagttgaagggatcggttacgatttcatcccaacagtgctggaccgcacggtagtggacaagtggttcaagtctaatgacgaggaggctttcaccttcgcccgaatgctgatcgcccaggagggcctattgtgcggcggttccgcgggtagcacagttgccgtagccgtgaaggctgcccaagagctgcaagaaggtcagcgttgcgttgtcatcttaccagactctgtcagaaattacatgaccaaatttctgagcgatcgttggatgctgcaaaagggcttcctcaaagaggaagacctgacggagaaaaagccctggtggtggcacttgagagttcaagagctgggcctctcagcccctctgacggtgctgccgacgatcacctgtggccacaccattgagatcttgagagagaaaggatttgatcaggcccccgtggtggatgaggcgggagtaatcttgggaatggtgacacttggaaacatgctgtcctctctccttgcagggaaagtacagccaagtgaccaggtgggcaaggttatctataagcagttcaaacagatccgcctgaccgacacgttgggtcgccttagccacatcttggagatggaccatttcgcattggtggtacacgaacagatccagtcgcaggatcaggcttgggccggtgtggttgggggccctgcggatcattccacaggtaagagtagccagcgacagatggtctttggcgtcgtgacggctatagacctcctcaacttcgtggctgcccaagagcgcgatcagaaatag

SEQ ID NO: 323164 - DNA, 1698 bp, Artificial Sequence
  derived and/or modified sequence
atgcccagtgaaaccccgcaggccgaagtagggcctaccgggtgcccgcatcgctctggtccccactctgctaaaggatcgttggaaaagggatcgccagaagataaagaggctaaagagcccctttggatcaggccggatgctccgtctaggtgcacatggcagctcggacggccagccagcgagtccccgcaccaccatacagcaccggcaaagagtccaaagatccttcctgatatcctaaagaagatcggagacaccccgatggtgcgtatcaataaaatcggcaagaagttcggcctcaagtgtgaactgctggcaaagtgtgagtttttcaacgcaggcggatctgtgaaagacaggatttcccttaggatgatcgaagacgccgaacgagacggcactctaaagcccggagacactatcatcgaaccaacatccggcaacacaggaataggcctggctttggctgccgctgtgagggggtatagatgtattattgtgatgcctgaaaaaatgagcagcgaaaaagttgacgtactcagggccttaggtgcagagatcgtgcggacccctacaaacgcccgtttcgatagtcctgagagccacgtaggtgtggcatggagattaaaaaacgaaatccctaactcgcacattctggatcagtatcgcaacgcctcaaaccctcttgcccactacgacactaccgcggacgagatcttgcaacagtgtgacgggaagctcgatatgctggtggcttcagtgggcaccggcggtaccataacaggcatcgcgaggaagcttaaggaaaaatgccctggttgccggatcataggcgtggacccggaaggatcaatacttgctgaacccgaggagctgaaccaaacagagcagaccacctatgaggtcgaaggcatcggctacgacttcatcccaacggtccttgatcgcaccgtagtggacaagtggttcaagagcaacgacgaagaggccttcactttcgcacggatgctgatcgcccaggagggtctcctgtgtggagggagcgcgggatcaacagtagctgtagcagtcaaagccgctcaggaactccaggaaggtcaacgatgtgtcgtaatcctacccgacagtgttaggaactacatgaccaagtttctctctgatcgttggatgctgcagaaagggttcctaaaagaggaggacctgactgaaaagaagccttggtggtggcatctgcgagtgcaggaactaggcctgagcgccccactaaccgtgttgccaaccatcacttgtggccatacgatcgagatacttcgagaaaaaggttttgatcaagcacccgtggtggacgaagcaggcgtcattttgggcatggtgaccctgggcaatatgctcagcagccttctggctgggaaggtacagccctctgaccaggtggggaaagtgatttacaagcagttcaagcagattcgccttaccgatacacttgggagactcagccatatcctcgagatggatcattttgcccttgtggtccatgaacagattcagagccaagatcaagcgtgggccggagtcgtgggtgggccagctgatcactccacaggaaagagttcacagcggcagatggtgttcggcgtcgtaacagcaatcgatttgctgaatttcgttgccgctcaagagcgcgatcagaaatag

SEQ ID NO: 323165 - DNA, 2554 bp, Artificial Sequence
  derived and/or modified sequence
gcgaggccgccaccccggggtcgccgtctccgcctcgccgcagtcggggcagccgctcgcccctcttttccatgtatccgtccaggatcccatgacagattctgttgtcacgtctccttacagagtttgagcggtgctgaactgtcagcaccatctgtccggtcccagcatgccttctgagaccccccaggcagaagtggggcccacaggctgcccccaccgctcagggccacactcggcgaaggggagcctggagaaggggtccccagaggataaggaagccaaggagcccctgtggatccggcccgatgctccgagcaggtgcacctggcagctgggccggcctgcctccgagtccccacatcaccacactgccccggcaaaatctccaaaaatcttgccagatattctgaagaaaatcggggacacccctatggtcagaatcaacaagattgggaagaagttcggcctgaagtgtgagctcttggccaagtgtgagttcttcaacgcgggcgggagcgtgaaggaccgcatcagcctgcggatgattgaggatgctgagcgcgacgggacgctgaagcccggggacacgattatcgagccgacatccgggaacaccgggatcgggctggccctggctgcggcagtgaggggctatcgctgcatcatcgtgatgccagagaagatgagctccgagaaggtggacgtgctgcgggcactgggggctgagattgtgaggacgcccaccaatgccaggttcgactccccggagtcacacgtgggggtggcctggcggctgaagaacgaaatccccaattctcacatcctagaccagtaccgcaacgccagcaaccccctggctcactacgacaccaccgctgatgagatcctgcagcagtgtgatgggaagctggacatgctggtggcttcagtgggcacgggcggcaccatcacgggcattgccaggaagctgaaggagaagtgtcctggatgcaggatcattggggtggatcccgaagggtccatcctcgcagagccggaggagctgaaccagacggagcagacaacctacgaggtggaagggatcggctacgacttcatccccacggtgctggacaggacggtggtggacaagtggttcaagagcaacgatgaggaggcgttcacctttgcccgcatgctgatcgcgcaagaggggctgctgtgcggtggcagtgctggcagcacggtggcggtggccgtgaaggccgcgcaggagctgcaggagggccagcgctgcgtggtcattctgcccgactcagtgcggaactacatgaccaagttcctgagcgacaggtggatgctgcagaagggctttctgaaggaggaggacctcacggagaagaagccctggtggtggcacctccgtgttcaggagctgggcctgtcagccccgctgaccgtgctcccgaccatcacctgtgggcacaccatcgagatcctccgggagaagggcttcgaccaggcgcccgtggtggatgaggcgggggtaatcctgggaatggtgacgcttgggaacatgctctcgtccctgcttgccgggaaggtgcagccgtcagaccaagttggcaaagtcatctacaagcagttcaaacagatccgcctcacggacacgctgggcaggctctcgcacatcctggagatggaccacttcgccctggtggtgcacgagcagatccagtcgcaggaccaggcctgggcaggcgtggtgggggggcctgcagaccacagcaccgggaagtccagtcagcggcagatggtgttcggggtggtcaccgccattgacttgctgaacttcgtggccgcccaggagcgggaccagaagtgaagtccggagcgctgggcggtgcggagcgggcccgccacccttgcccacttctccttcgctttcctgagccctaaacacacgcgtgattggtaactgcctggcctggcaccgttatccctgcacacggcacagagcatccgtctcccctcgttaacacatggcttcctaaatggccctgtttacggcctatgagatgaaatatgtgattttctctaatgtaacttcctcttaggatgtttcaccaaggaaatattgagagagaagtcggccaggtaggatgaacacaggcaatgactgcgcagagtggattaaaggcaaaagagagaagagtccaggaaggggcggggagaagcctgggtggctcagcatcctccacgggctgcgccgtctgctcggggctgagctggcgggagcagtttgcgtgtttgggttttttaattgagatgaaattcaaataacctaaaaatcaatcacttgaaagtgaacaatcagcggcatttagtacatccagaaagttgtgtaggcaccacctctgtcacgttctggaacattctgtcatcaccccgtgaagcaatcatttcccctcccgtcttcctcctcccctggcaactgctgatcgactttgtgtctctgttgtctaaaataggttttccctgttctggacatttcatataaatggaatcacac

SEQ ID NO: 323166 - DNA, 1698 bp, Artificial Sequence
  derived and/or modified sequence
atgcccagcgagaccccccaggccgaggtgggccccaccggctgcccccacagaagcggcccccacagcgccaagggcagcctggagaagggcagccccgaggacaaggaggccaaggagcccctgtggatcagacccgacgcccccagcagatgcacctggcagctgggcagacccgccagcgagagcccccaccaccacaccgcccccgccaagagccccaagatcctgcccgacatcctgaagaagatcggcgacacccccatggtgagaatcaacaagatcggcaagaagttcggcctgaagtgcgagctgctggccaagtgcgagttcttcaacgccggcggcagcgtgaaggacagaatcagcctgagaatgatcgaggacgccgagagagacggcaccctgaagcccggcgacaccatcatcgagcccaccagcggcaacaccggcatcggcctggccctggccgccgccgtgagaggctacagatgcatcatcgtgatgcccgagaagatgagcagcgagaaggtggacgtgctgagagccctgggcgccgagatcgtgagaacccccaccaacgccagattcgacagccccgagagccacgtgggcgtggcctggagactgaagaacgagatccccaacagccacatcctggaccagtacagaaacgccagcaaccccctggcccactacgacaccaccgccgacgagatcctgcagcagtgcgacggcaagctggacatgctggtggccagcgtgggcaccggcggcaccatcaccggcatcgccagaaagctgaaggagaagtgccccggctgcagaatcatcggcgtggaccccgagggcagcatcctggccgagcccgaggagctgaaccagaccgagcagaccacctacgaggtggagggcatcggctacgacttcatccccaccgtgctggacagaaccgtggtggacaagtggttcaagagcaacgacgaggaggccttcaccttcgccagaatgctgatcgcccaggagggcctgctgtgcggcggcagcgccggcagcaccgtggccgtggccgtgaaggccgcccaggagctgcaggagggccagagatgcgtggtgatcctgcccgacagcgtgagaaactacatgaccaagttcctgagcgacagatggatgctgcagaagggcttcctgaaggaggaggacctgaccgagaagaagccctggtggtggcacctgagagtgcaggagctgggcctgagcgcccccctgaccgtgctgcccaccatcacctgcggccacaccatcgagatcctgagagagaagggcttcgaccaggcccccgtggtggacgaggccggcgtgatcctgggcatggtgaccctgggcaacatgctgagcagcctgctggccggcaaggtgcagcccagcgaccaggtgggcaaggtgatctacaagcagttcaagcagatcagactgaccgacaccctgggcagactgagccacatcctggagatggaccacttcgccctggtggtgcacgagcagatccagagccaggaccaggcctgggccggcgtggtgggcggccccgccgaccacagcaccggcaagagcagccagagacagatggtgttcggcgtggtgaccgccatcgacctgctgaacttcgtggccgcccaggagagagaccagaagtag

SEQ ID NO: 323167 - protein, 1374 aa, Artificial Sequence
  derived and/or modified sequence
MVYRTQYLVVEVPESRNVTDCCEGYEQLGLYCVLPLNQSGQFTSRPGACPAEGPEPSTSPCSLDIDCPGLEKCCPWSGGRYCMAPAPQAPERDPVGSWYNVTILVKMDFKELQQVDPRLLNHMRLLHSLVTSALQPMASTVHHLHSAPGNASTTVSRLLLGLPRPLPVADVSTLLGDIAKRVYEVISVQVQDVNECFYEELNACSGRELCANLEGSYWCVCHQEAPATSPRKLNLEWEDCPPVSDYVVLNVTSDSFQVSWRLNSTQNHTFHVRVYRGMELLRSARTQSQALAVAGLEAGVLYRVKTSYQGCGADVSTTLTIKTNAQVFEVTIKIVNHNLTEKLLNRSSVEYQDFSRQLLHEVESSFPPVVSDLYRSGKLRMQIVSLQAGSVVVRLKLTVQDPGFPMGISTLAPILQPLLASTVFQIDRQGTRVQDWDECVDSAEHDCSPAAWCINLEGSYTCQCRTTRDATPSRAGRACEGDLVSPMGGGLSAATGVTVPGLGTGTAALGLENFTLSPSPGYPQGTPAAGQAWTPEPSPRRGGSNVVGYDRNNTGKGVEQEVPSTAPGLGMDQGSPSQVNPSQGSPSQGSLRQESTSQASPSQRSTSQGSPSQVNPSQRSTSHANSSQGSPSQGSPSQESPSQGSTSQASPSHRNTIGVIGTTSSPKATGSTHSFPPGATDGPLALPGQLQGNSIMEPPSWPSPTEDPTGHFLWHATRSTRETLLNPTWLRNEDSGPSGSVDLPLTSTLTALKTPACVPVSIGRIMVSNVTSTGFHLAWEADLAMDSTFQLTLTSMWSPAVVLETWNTSVTLSGLEPGVLHLVEIMAKACGKEGARAHLKVRTAARKLIGKVRIKNVRYSESFRNASSQEYRDFLELFFRMVRGSLPATMCQHMDAGGVRMEVVSVTNGSIVVEFHLLIIADVDVQEVSAAFLTAFQTVPLLEVIRGDTFIQDYDECERKEDDCVPGTSCRNTLGSFTCSCEGGAPDFPVEYSERPCEGDSPGNETWATSPERPLTTAGTKAAFVQGTSPTPQGLPQRLNLTGAVRVLCEIEKVVVAIQKRFLQQESIPESSLYLSHPSCNVSHSNGTHVLLEAGWSECGTLMQSNMTNTVVRTTLRNDLSQEGIIHHLKILSPIYCAFQNDLLTSSGFTLEWGVYTIIEDLHGAGNFVTEMQLFIGDSPIPQNYSVSASDDVRIEVGLYRQKSNLKVVLTECWATPSSNARDPITFSFINNSCPVPNTYTNVIENGNSNKAQFKLRIFSFINDSIVYLHCKLRVCMESPGATCKINCNNFRLLQNSETSATHQMSWGPLIRSEGEPPHAEAGLGAGYVVLIVVAIFVLVAGTATLLIVRYQRMNGRYNFKIQSNNFSYQVFYE

SEQ ID NO: 323168 - DNA, 4125 bp, Artificial Sequence
  derived and/or modified sequence
atggtgtacagaacccagtacctggtggtggaggtgcccgagagcagaaacgtgaccgactgctgcgagggctacgagcagctgggcctgtactgcgtgctgcccctgaaccagagcggccagttcaccagcagacccggcgcctgccccgccgagggccccgagcccagcaccagcccctgcagcctggacatcgactgccccggcctggagaagtgctgcccctggagcggcggcagatactgcatggcccccgccccccaggcccccgagagagaccccgtgggcagctggtacaacgtgaccatcctggtgaagatggacttcaaggagctgcagcaggtggaccccagactgctgaaccacatgagactgctgcacagcctggtgaccagcgccctgcagcccatggccagcaccgtgcaccacctgcacagcgcccccggcaacgccagcaccaccgtgagcagactgctgctgggcctgcccagacccctgcccgtggccgacgtgagcaccctgctgggcgacatcgccaagagagtgtacgaggtgatcagcgtgcaggtgcaggacgtgaacgagtgcttctacgaggagctgaacgcctgcagcggcagagagctgtgcgccaacctggagggcagctactggtgcgtgtgccaccaggaggcccccgccaccagccccagaaagctgaacctggagtgggaggactgcccccccgtgagcgactacgtggtgctgaacgtgaccagcgacagcttccaggtgagctggagactgaacagcacccagaaccacaccttccacgtgagagtgtacagaggcatggagctgctgagaagcgccagaacccagagccaggccctggccgtggccggcctggaggccggcgtgctgtacagagtgaagaccagctaccagggctgcggcgccgacgtgagcaccaccctgaccatcaagaccaacgcccaggtgttcgaggtgaccatcaagatcgtgaaccacaacctgaccgagaagctgctgaacagaagcagcgtggagtaccaggacttcagcagacagctgctgcacgaggtggagagcagcttcccccccgtggtgagcgacctgtacagaagcggcaagctgagaatgcagatcgtgagcctgcaggccggcagcgtggtggtgagactgaagctgaccgtgcaggaccccggcttccccatgggcatcagcaccctggcccccatcctgcagcccctgctggccagcaccgtgttccagatcgacagacagggcaccagagtgcaggactgggacgagtgcgtggacagcgccgagcacgactgcagccccgccgcctggtgcatcaacctggagggcagctacacctgccagtgcagaaccaccagagacgccacccccagcagagccggcagagcctgcgagggcgacctggtgagccccatgggcggcggcctgagcgccgccaccggcgtgaccgtgcccggcctgggcaccggcaccgccgccctgggcctggagaacttcaccctgagccccagccccggctacccccagggcacccccgccgccggccaggcctggacccccgagcccagccccagaagaggcggcagcaacgtggtgggctacgacagaaacaacaccggcaagggcgtggagcaggaggtgcccagcaccgcccccggcctgggcatggaccagggcagccccagccaggtgaaccccagccagggcagccccagccagggcagcctgagacaggagagcaccagccaggccagccccagccagagaagcaccagccagggcagccccagccaggtgaaccccagccagagaagcaccagccacgccaacagcagccagggcagccccagccagggcagccccagccaggagagccccagccagggcagcaccagccaggccagccccagccacagaaacaccatcggcgtgatcggcaccaccagcagccccaaggccaccggcagcacccacagcttcccccccggcgccaccgacggccccctggccctgcccggccagctgcagggcaacagcatcatggagccccccagctggcccagccccaccgaggaccccaccggccacttcctgtggcacgccaccagaagcaccagagagaccctgctgaaccccacctggctgagaaacgaggacagcggccccagcggcagcgtggacctgcccctgaccagcaccctgaccgccctgaagacccccgcctgcgtgcccgtgagcatcggcagaatcatggtgagcaacgtgaccagcaccggcttccacctggcctgggaggccgacctggccatggacagcaccttccagctgaccctgaccagcatgtggagccccgccgtggtgctggagacctggaacaccagcgtgaccctgagcggcctggagcccggcgtgctgcacctggtggagatcatggccaaggcctgcggcaaggagggcgccagagcccacctgaaggtgagaaccgccgccagaaagctgatcggcaaggtgagaatcaagaacgtgagatacagcgagagcttcagaaacgccagcagccaggagtacagagacttcctggagctgttcttcagaatggtgagaggcagcctgcccgccaccatgtgccagcacatggacgccggcggcgtgagaatggaggtggtgagcgtgaccaacggcagcatcgtggtggagttccacctgctgatcatcgccgacgtggacgtgcaggaggtgagcgccgccttcctgaccgccttccagaccgtgcccctgctggaggtgatcagaggcgacaccttcatccaggactacgacgagtgcgagagaaaggaggacgactgcgtgcccggcaccagctgcagaaacaccctgggcagcttcacctgcagctgcgagggcggcgcccccgacttccccgtggagtacagcgagagaccctgcgagggcgacagccccggcaacgagacctgggccaccagccccgagagacccctgaccaccgccggcaccaaggccgccttcgtgcagggcaccagccccaccccccagggcctgccccagagactgaacctgaccggcgccgtgagagtgctgtgcgagatcgagaaggtggtggtggccatccagaagagattcctgcagcaggagagcatccccgagagcagcctgtacctgagccaccccagctgcaacgtgagccacagcaacggcacccacgtgctgctggaggccggctggagcgagtgcggcaccctgatgcagagcaacatgaccaacaccgtggtgagaaccaccctgagaaacgacctgagccaggagggcatcatccaccacctgaagatcctgagccccatctactgcgccttccagaacgacctgctgaccagcagcggcttcaccctggagtggggcgtgtacaccatcatcgaggacctgcacggcgccggcaacttcgtgaccgagatgcagctgttcatcggcgacagccccatcccccagaactacagcgtgagcgccagcgacgacgtgagaatcgaggtgggcctgtacagacagaagagcaacctgaaggtggtgctgaccgagtgctgggccacccccagcagcaacgccagagaccccatcaccttcagcttcatcaacaacagctgccccgtgcccaacacctacaccaacgtgatcgagaacggcaacagcaacaaggcccagttcaagctgagaatcttcagcttcatcaacgacagcatcgtgtacctgcactgcaagctgagagtgtgcatggagagccccggcgccacctgcaagatcaactgcaacaacttcagactgctgcagaacagcgagaccagcgccacccaccagatgagctggggccccctgatcagaagcgagggcgagcccccccacgccgaggccggcctgggcgccggctacgtggtgctgatcgtggtggccatcttcgtgctggtggccggcaccgccaccctgctgatcgtgagataccagagaatgaacggcagatacaacttcaagatccagagcaacaacttcagctaccaggtgttctacgagtag

SEQ ID NO: 323169 - DNA, 4125 bp, Artificial Sequence
  derived and/or modified sequence
atggtatatcgcacccagtacctagtggttgaggtgccagaaagccgaaacgttacagattgctgtgaaggttacgagcagctaggattgtactgtgtgttgcctctgaaccaatcaggccaattcacctcccggcctggtgcttgccctgcagaaggccccgaaccatccacttccccctgcagtctcgatattgactgtccgggcctggagaagtgctgcccttggagcggaggcaggtattgtatggctcccgccccacaggctcccgagagagacccagtcgggtcctggtataacgtgacaatactggtcaaaatggactttaaggagctacagcaagtcgacccacgcttgttgaatcacatgagactgctccacagtcttgttacctcagcactccagccaatggcctcaacggtccaccacctgcactcggctcccggaaacgcaagtacaacggtgagtaggctgctcctggggctgccccgcccacttccagtcgcggatgtctcaaccctactgggagatatagctaaacgagtgtatgaagttataagcgtgcaagtgcaagacgttaacgagtgtttctatgaggaactcaacgcatgcagtggccgggagttgtgcgccaatctggagggctcttactggtgcgtttgccaccaagaagcacctgccacgtccccgaggaagctgaatctggaatgggaagactgcccaccagtgagtgactatgtggtgcttaacgtgacaagcgatagttttcaggtgagttggcgcctgaactctactcagaaccatacatttcatgtccgcgtgtaccgaggcatggagcttcttagaagcgcccggacccagagccaggctctggctgtcgcaggactggaggccggggtattatacagagtcaaaacatcataccaggggtgcggagcggacgtgagtactaccctgacgatcaaaaccaacgcccaggtcttcgaagtgacaatcaagattgtcaaccataacctgacagaaaagctgctgaacaggagttctgtggagtatcaagattttagcagacagctcctgcacgaggtcgaatccagttttcctccggtcgttagcgacctctatcgctctggaaaactgagaatgcagatcgtttctttgcaggccggaagcgttgtggtgagattgaaactgaccgtccaggacccgggtttccctatggggatttctacactagcccccattttacagcctctattagcttccactgtgtttcaaatagaccggcagggcaccagggtccaagactgggacgaatgtgttgacagcgcagagcatgattgttctcctgccgcctggtgtatcaacttggaaggctcttacacttgtcaatgtagaacaacacgagatgcaactccttctcgcgctggtcgcgcttgcgagggggatttagtatcgccaatgggagggggccttagcgctgccactggagtgaccgtgcccggtctaggcactggcaccgctgccctggggctggaaaactttacactgtctccatcacctggctatcctcagggcacaccagcagctggccaggcctggacacctgagccttcccctcgccgcggcggctcaaacgtcgtaggatatgatcgcaataataccggaaagggtgttgaacaagaagtcccatctaccgcaccgggtctgggaatggaccaagggagtcccagccaggtcaatccctcccagggctctcccagccaaggctccctgagacaggagtctacctcacaagcctcacccagtcagagatcaaccagccaggggtcgccaagccaggttaacccttctcagcgttccaccagtcacgcgaattccagccagggctctccttcacagggcagtccatcacaggagagccccagtcagggaagcacatctcaagcaagcccgtctcacaggaataccatcggcgtgatcgggacgacttcttcccccaaggcaacaggttctacccactcttttcccccaggggctaccgacggacccctagcccttccagggcagttgcagggtaacagcattatggaaccgccatcctggccatcacctaccgaggatccaaccggacactttctttggcacgcaacccgttcaacacgggaaaccctgctgaatcctacctggttgcgtaacgaggacagcggccccagcggcagcgttgacctgccattgacctctacgcttaccgccctgaaaacccctgcttgtgtccctgtaagtatcggcagaattatggtctctaacgttacctctactggctttcacttagcatgggaagccgatcttgccatggattctacattccagttgaccttgactagtatgtggtcccccgctgtagttctggagacttggaacacatctgtgaccttaagcggactggaacccggagtactgcaccttgtggaaatcatggccaaagcgtgtggaaaagaaggggcacgggcacacctgaaagtgagaaccgccgcccggaagctcatcggaaaggttagaataaagaacgtgcggtactctgaatcattccgcaatgcctcatcccaagagtatcgtgacttcctggaactgtttttccgtatggtacggggcagtctcccggctacaatgtgtcaacacatggacgccgggggggtgaggatggaggtggtatccgttaccaacgggagcatagtggtggagttccacctgctgatcatcgcggacgtggatgtccaagaggtgtctgcggcgtttctgacggcctttcaaactgtgccactgcttgaggttatccggggcgataccttcatccaggactacgacgagtgcgaaaggaaggaagacgactgtgttcctggcacaagttgccgcaataccctcggtagttttacttgttcgtgtgagggaggtgcccccgattttcctgtggaatacagcgagcgaccttgcgagggggattcgccaggcaatgagacctgggcaacatccccagaacgacccttgacaaccgcaggcaccaaagccgcctttgtgcaggggacctcaccaaccccacagggtttacctcagaggttgaatctgactggcgccgttagagttctgtgtgagattgaaaaggtggtcgtggcaatacagaagaggttcctgcaacaggaaagtattcctgaatcttccttatacctaagtcacccgtcgtgcaatgtgagccattctaatggcacacacgtgctccttgaggctggctggtccgagtgcggaacactaatgcagagtaacatgactaatactgtcgtgagaaccacgctgcgaaacgacctctcacaggagggaattattcaccacttgaagatactcagcccaatatactgcgcctttcagaacgatctgctgacctcctccggctttaccctggaatggggtgtttacacaataatcgaggacctacatggcgccggtaatttcgttactgagatgcagctgttcattggagactctcctatccctcaaaactattccgtgagtgcctcagacgacgtacgaatcgaggtcggcctgtatcggcaaaagtcaaacctaaaggttgtgctgacagaatgctgggccaccccctcctctaatgctcgcgatcctatcaccttcagtttcataaataacagttgccctgtcccaaatacatacactaacgtaatcgagaacggtaacagcaacaaggcccagtttaagctacggattttctccttcatcaacgattcgattgtgtacctacattgtaaacttagggtgtgcatggagagccccggcgcaacttgcaagattaattgtaacaactttaggcttctgcagaactcggagacgtcagcaacccaccagatgagctggggcccacttataaggtctgaaggcgagcctccccatgccgaggccggcctcggcgccggatacgttgtactgatagtggttgctatttttgtccttgtggccggaacagcaaccctgctgatcgtccgctatcagcgcatgaatggtcgttataattttaagattcaatccaacaatttttcctaccaggtattttatgaatag

SEQ ID NO: 323170 - DNA, 4125 bp, Artificial Sequence
  derived and/or modified sequence
atggtgtaccgcacccagtacctggtggtggaggtgcctgagagcagaaatgtgacagactgctgtgagggctatgagcagctgggcctgtactgtgtgctgcccctgaaccagagcggccagttcaccagcaggcctggggcctgcccagctgagggccctgagcccagcaccagcccctgcagcctggacatcgactgccccggcctggagaagtgctgcccctggagcggcggccgctactgcatggccccagccccccaggcccctgagcgggaccctgtgggctcctggtacaacgtgaccatcctggtgaagatggacttcaaggagctgcagcaggtggacccccggctgctgaaccacatgaggctgctgcacagcctggtgaccagcgccctgcagcccatggccagcacagtgcaccacctgcacagcgcccctggaaatgccagcaccaccgtgtcccggctgctgctgggcctgccccggcccctgcctgtggctgatgtgtccaccctgctgggggacatcgccaagagggtgtatgaagtcatctctgtgcaggtgcaggatgtgaatgaatgcttctatgaggagctgaatgcctgcagcggccgggagctgtgtgccaacctggagggcagctactggtgtgtgtgccaccaggaggccccagccaccagccccaggaagctgaacctggagtgggaggactgcccccctgtgtctgactatgtggtgctgaatgtgaccagtgacagcttccaggtgtcctggaggctgaacagcacccagaaccacaccttccacgtgcgggtgtaccggggcatggagctgctgcggagcgcccggacccagagccaggccctggccgtggccggcctggaggccggcgtgctgtacagagtgaagaccagctaccagggctgtggggctgatgtgtccaccaccctgaccatcaagaccaatgcccaggtgtttgaggtgaccatcaagatcgtgaaccacaacctgacagagaagctgctgaacagaagctctgtggagtaccaggacttcagccggcagctgctgcacgaggtggagagcagcttcccccctgtggtgtctgacctgtaccgcagcggcaagctgaggatgcagatcgtgtccctgcaggccggctctgtggtggtgcggctgaagctgactgtgcaggaccccggcttccccatgggcatcagcaccctggcccccatcctgcagcccctgctggccagcaccgtcttccagattgaccggcagggcaccagggtgcaggactgggatgaatgtgtggacagcgctgagcatgactgcagccctgctgcctggtgcatcaacctggagggcagctacacctgccagtgcaggaccaccagagatgccacccccagcagagctggccgggcctgtgagggggacctggtgagccccatgggcggcggcctgtctgctgccactggagtgacagtgcccggcctgggcaccggcacagctgccctgggcctggagaacttcaccctgagccccagccctggctacccccagggcaccccagctgctggccaggcctggaccccagagcccagcccccggcggggcggcagcaatgtggtgggctatgacaggaacaacacaggcaagggcgtggagcaggaggtgcccagcacagcccctggcctgggcatggaccagggcagccccagccaggtgaaccccagccagggcagccccagccagggcagcctgcggcaggagagcaccagccaggccagccccagccagaggagcaccagccagggcagccccagccaggtgaaccccagccagaggagcaccagccacgccaacagcagccagggcagccccagccagggcagccccagccaggagagccccagccagggcagcaccagccaggccagccccagccacaggaacaccatcggggtcatcggcaccaccagcagccccaaggccaccggcagcacccacagcttccccccaggggccacagatggccccctggccctgcccggccagctgcagggcaacagcatcatggagccccccagctggcccagccccacagaggaccccaccggccacttcctgtggcacgccaccaggagcacccgggagaccctgctgaaccccacctggctgagaaatgaagattctggccccagcggctctgtggacctgcccctgaccagcaccctgacagccctgaagaccccagcctgtgtgcctgtgtccatcggccgcatcatggtgtccaatgtgaccagcacaggcttccacctggcctgggaggccgacctggccatggacagcaccttccagctgaccctgacctccatgtggagccctgctgtggtgctggagacctggaacacctctgtgaccctgagcggcctggagcccggggtgctgcacctggtggagatcatggccaaggcctgtgggaaggagggcgcccgggcccacctgaaggtgaggacagctgccaggaagctgattggcaaggtgcgcatcaagaatgtgcgctacagcgagagcttcagaaatgccagcagccaggagtacagagacttcctggagctgttcttcaggatggtgcggggcagcctgcctgccaccatgtgccagcacatggatgctgggggcgtgaggatggaggtggtgtctgtgaccaacggcagcatcgtggtggagttccacctgctgatcatcgcagatgtggatgtgcaggaggtgtctgctgccttcctgacagccttccagacagtgcccctgctggaggtgatccggggggacaccttcatccaggactatgatgaatgtgagaggaaagaagatgactgtgtgcccggcaccagctgcaggaacaccctgggcagcttcacctgcagctgtgagggcggggccccagacttccctgtggagtacagcgagcggccctgtgagggggacagccctggaaatgagacctgggccaccagccctgagcggcccctgaccacagctggcaccaaggccgcctttgtgcagggcaccagccccaccccccagggcctgccccagaggctgaacctgaccggggctgtgcgggtgctgtgtgaaattgagaaggtggtggtggccatccagaagcgcttcctgcagcaggagagcatccctgagagcagcctgtacctgagccaccccagctgcaatgtgagccacagcaatggcacccacgtgctgctggaggccggctggagcgaatgtggcaccctgatgcagagcaacatgaccaacacagtggtgaggaccaccctgagaaatgacctgagccaggagggcatcatccaccacctgaagatcctgagccccatctactgtgccttccagaatgacctgctgaccagcagcggcttcaccctggagtggggcgtgtacaccatcatcgaggacctgcatggagctggcaactttgtgacagagatgcagctgttcatcggggacagccccatcccccagaactacagcgtgtctgccagtgatgatgtgagaattgaggtgggcctgtaccggcagaagagcaacctgaaggtggtgctgacagagtgctgggccacccccagcagcaatgcccgggaccccatcaccttctccttcatcaacaacagctgccctgtgcccaacacctacaccaacgtgattgaaaatggaaacagcaacaaggcccagttcaagctgcgcatcttctccttcatcaatgacagcatcgtgtacctgcactgcaagctgcgggtgtgcatggagagccctggggccacctgcaagatcaactgcaacaacttccggctgctgcagaacagcgagaccagcgccacccaccagatgtcctggggccccctcatccgctctgagggggagccccctcatgctgaggccggcctgggcgccggctacgtggtgctgattgtggtggccatctttgtgctggtggccggcacagccaccctgctgattgtgcgctaccagaggatgaatggccgctacaacttcaagatccagagcaacaacttctcctaccaggtgttctatgaatag

SEQ ID NO: 323171 - DNA, 4125 bp, Artificial Sequence
  derived and/or modified sequence
atggtgtaccggacccagtacctggtggtggaggtgcccgagagcagaaatgtgacggactgctgcgagggctatgaacaattggggctgtattgcgttctgcctctgaaccagtccgggcagtttacatcgcggccaggagcctgtcccgcggagggtcctgaaccatccacttcgccatgttctctcgacattgattgccctggcctcgagaagtgctgtccatggtcggggggcaggtactgtatggcacccgctcctcaggctccagaacgggacccagtcggatcttggtacaatgttactattcttgtgaagatggacttcaaagagctccaacaagtggacccgaggctgcttaaccatatgcggctcctgcattccctggtgacttccgccctgcaaccaatggcctcaactgtgcatcacctgcatagtgcccccggcaacgccagcacgaccgtctcccggttgctcctgggcctgccccgccctttgcctgtggctgatgtgagcacacttctgggtgatatcgccaaacgcgtttacgaggtgatttcggtccaggttcaggatgtcaacgaatgtttctatgaagagttaaacgcctgtagcgggcgagagttgtgcgccaatttggagggaagctactggtgtgtatgtcatcaggaggcccctgcgacctcaccccgcaaacttaacttagaatgggaggactgccctccagtcagcgactacgtggtactcaacgtgacatccgattcatttcaggtgtcttggaggttgaattccactcagaaccacacctttcatgtgagggtgtataggggaatggagctgctgagatcagcccggacgcaatctcaggctctcgccgtggcggggcttgaggccggggttctgtatagagttaagacctcatatcagggatgtggcgctgacgtaagtacaaccctgacaataaaaactaacgcccaggtgttcgaggtcactatcaagatagtcaatcacaaccttaccgaaaaactgctgaacaggagctcagtggaatatcaagacttctccaggcagctactgcacgaagtggaatcttctttccctccagtcgtgtctgacttgtataggtccggaaaattacgcatgcagatcgtgtctctccaggctggatctgtggtggtgcgactgaaattaaccgttcaggacccagggttcccgatgggcatttccactttggcccctattcttcaacccctgctcgcatctactgtttttcagattgaccgtcagggcacgcgggttcaagactgggacgagtgcgtggactccgccgaacacgactgctctccagcggcatggtgcataaatttggaagggagctacacgtgccagtgtaggacaacccgcgatgccacgccatcccgggcgggccgggcgtgtgaaggggatctggtctctccgatgggaggcgggctgtcagctgccaccggtgttaccgttcctggactcggcacagggaccgctgctctgggcctggaaaattttaccctgtcacctagcccagggtatccgcagggaacccccgccgcaggacaagcatggacgccagagccatctcccaggaggggcggcagtaacgtggtgggctatgatcgtaacaacaccggaaaaggggtcgagcaagaggtaccttccactgccccaggcctgggtatggatcagggatctcctagccaagtcaaccctagccagggatctccatcacaaggcagcctccgacaggagtccacgtcccaggccagccccagccagcggagtacatcccaagggtccccatcccaggtcaacccctcacaaagaagcacttcccacgctaatagctcacagggctctccttcgcaggggagccccagtcaggaaagtccctcgcagggcagcacatctcaggcctcaccaagtcaccgaaatacaataggcgtgatcggcaccacctctagccctaaggccactgggtcgacgcatagcttccctcccggagccaccgacggcccactcgctctcccaggacagttgcaggggaacagtattatggagccgcccagctggccgtctcccacagaagaccccaccggtcacttcctttggcacgccacaagaagcactcgggaaacactgttaaacccaacttggctccgcaacgaagattccgggccttcagggtccgtggacctgccactcacttctaccctgactgccctgaaaactcccgcttgcgtgccagtttctatcggccgtatcatggtgagcaatgtgactagcaccggatttcacttggcatgggaggcagacctggcaatggatagcacctttcaactgacgctcacctcgatgtggagtccggcagtagtgctggaaacatggaatacctccgtcacgctctctggacttgaaccgggagtcctacacttagtggagattatggccaaagcctgcgggaaggagggagctcgggcccatctcaaggtgcgcaccgccgcccgcaagctgatcggaaaggtgaggatcaaaaatgtcagatatagtgaatcttttcggaacgcctcatcccaggagtaccgggatttcctggaactctttttcaggatggtacggggcagcctgcccgctactatgtgccagcatatggatgccggcggggtgcgtatggaagtggttagcgtaacaaatggttctatcgtggtggaatttcacctactgattattgccgatgtggacgtgcaggaggtgtcggccgcattcctcacagcatttcaaaccgtaccacttttggaggtcatcagaggagatactttcatccaagattacgatgagtgcgagcgcaaggaggatgactgcgtccccggaactagttgtagaaataccttaggatccttcacgtgcagctgcgagggcggagcccctgatttcccagtagaatacagtgagcgaccttgtgagggagactctcccggaaacgagacttgggcaacctctccagaaaggcctctgacaacagcagggaccaaagcagccttcgtccagggtacctcgccgacaccacagggcctccctcagaggttaaatctgacaggcgctgtgagggtcctctgtgagatagaaaaggttgttgttgcgatccaaaaacggttcctccagcaggaaagtattccagaatcgagcctgtatctatcacatccttcctgtaatgtgtcgcattcaaatggaacacatgtgcttttagaggctggatggagcgagtgtggaactctcatgcagagtaatatgacaaatacggtggtccgcactactctgcggaacgacctcagccaggagggaattatccatcatttaaaaatactcagccccatctattgtgcgtttcagaatgacctgctgacgtcatctggcttcacgctggagtggggagtctatacaatcatcgaagacctgcacggcgcaggcaacttcgtgacagaaatgcagctctttatcggcgatagcccaatcccacagaattattccgtatccgcttctgatgatgtcagaatcgaagttgggctttatagacagaagtccaatctcaaagtggtgctgaccgaatgttgggccacccccagcagcaacgctagggatccaattacattcagttttatcaacaatagctgtccagtgcctaatacttacactaacgtgattgagaatggcaatagtaacaaggctcaatttaagcttagaattttctccttcatcaacgacagcatcgtttacctccattgtaagctcagagtttgtatggaatcccccggcgccacctgcaaaatcaactgcaataactttcgactgttgcagaatagtgagaccagcgccacccaccagatgagctgggggcccctgatcaggtcagaaggagagccacctcacgctgaggccggacttggggcgggatacgtggttttaatcgtggtcgccatctttgtattggtggcagggacggcgactttgctcattgtaagatatcagaggatgaatgggcggtacaattttaagattcagagcaataacttttcttaccaagttttttatgagtag

SEQ ID NO: 323172 - DNA, 4125 bp, Artificial Sequence
  derived and/or modified sequence
atggtgtataggacccagtatctggtggtggaggtacctgagtctagaaacgtgacagactgttgtgagggatacgagcaactaggactgtattgcgtgctgcccttgaaccagtcaggtcagtttacgtcgcggcctggggcatgccccgcagagggacctgaaccttcgacctctccctgttccctggatatcgactgtcctggtttggagaaatgttgcccctggtctggaggccgatattgcatggctccagcaccgcaggcacccgagcgggaccctgttggatcctggtataacgtgaccattctggtgaaaatggactttaaggagctgcagcaggtggacccaagactgctgaatcatatgaggttgcttcacagtctcgtgacctcagccctacaaccaatggcaagcacagtgcaccatctgcactcagctcccggaaatgcctctactacggtgtcccgcttactgttggggctgccacgcccactaccggtggccgacgtctccactttactgggcgacattgccaaaagggtgtacgaggtaatatctgtccaggtgcaggacgttaacgagtgcttctacgaggaactgaatgcgtgctcagggcgagagctctgtgccaatctcgaggggtcttattggtgtgtttgccatcaggaagcgccagctactagcccccgtaagctgaatctcgagtgggaagactgtccacctgtgtccgattacgttgtcctgaacgtcaccagcgacagcttccaggtgtcatggaggctgaactctacccaaaatcacacctttcacgtgcgtgtctacagggggatggagctactgagaagtgcaagaacacagtcacaggcacttgctgttgcaggactggaggccggtgtcctgtacagagtgaagacctcttaccagggatgcggtgctgatgtttccacaaccctgactattaaaacaaatgctcaggtgttcgaagtaacaatcaaaatcgttaaccacaacctcactgaaaagctcctcaaccggtcttcagtggagtatcaggacttttctcggcagctgctgcatgaagtggagagttcatttccaccagtcgtgtcagatctctacagatccggaaagctgaggatgcagattgtgtctttgcaagctggctcggtcgtcgtcagactcaagttgacagtgcaggaccccggtttcccaatgggtatcagtacactggcacccatcctgcaaccactgctggctagcactgtgtttcagattgatagacaggggacacgggttcaagactgggatgagtgcgtggactcagcagagcacgattgctcacctgccgcatggtgtatcaacctggagggaagctatacctgccagtgtagaactactcgcgacgctactcccagcagagccggacgcgcatgcgaaggagatttagtcagccctatgggagggggtctgagcgccgcaaccggagtgaccgtgccagggcttggtacggggaccgcagccctgggattggaaaacttcactctcagtccatcaccaggatacccccagggtacaccggcagcaggacaggcatggaccccggagccaagccccaggcgtggcggatctaatgtggttggatacgatcggaataacaccggaaaaggcgtcgagcaagaggtgccctccaccgcacctggccttgggatggatcagggaagtccaagccaggttaacccttcccagggctcgccaagtcaggggagtctgaggcaggagagcaccagtcaggcctcaccgagccagcgctctacgtcacaagggtctcccagccaggtgaatccaagccaacggtccactagccatgccaatagcagccagggatcacctagccaggggtcgccaagccaagaatctccaagccagggatctacatcccaggcatcacctagccaccgaaatactattggagtgattggcaccaccagtagtcctaaagccaccggttccacccatagctttccgccaggcgctactgatggtcctttggctctgcccggacagctgcaaggcaattctataatggagcccccaagttggcctagccccactgaagatccgacgggccacttcctgtggcacgcaacacgtagcacgagagaaaccctcctcaatccaacatggctgagaaacgaggactctggtccatctggcagtgttgatttacctctgacctctactctgacagctctcaaaacacctgcctgcgtcccagtcagtattgggaggattatggtgtccaatgtcacctctaccggctttcacctggcgtgggaggctgacctcgccatggacagtacttttcagctaaccctcacttctatgtggagccccgctgtggtcctggaaacatggaacacgtcagtgaccctcagtggactggagcccggtgtgctccatctggtcgaaataatggccaaagcttgtgggaaagagggggcaagagcccacttaaaggtaagaactgcagctagaaagttaataggcaaggtgaggatcaagaatgtgagatacagcgaatctttcaggaacgcaagcagccaggagtatcgtgattttttggaactttttttcaggatggtgcgagggtcgcttcctgctaccatgtgccaacatatggacgccggaggggtgaggatggaggtggtctctgtgaccaacggctctatagtggtggaatttcacctgctcatcatcgccgacgttgatgtacaagaggtctctgccgcatttctgaccgccttccagaccgtccctctgctcgaggttatacgcggtgacacattcatacaggattacgacgaatgcgagcggaaggaagatgattgtgtaccaggaaccagttgcagaaatacattaggtagcttcacctgtagctgcgagggaggtgcgccagatttccctgtagagtactccgagcgaccttgtgaaggggattctcccggaaacgagacgtgggctacgtctccagagagaccacttacaacggctggtactaaagcggcttttgtgcagggcacatctcccaccccgcaggggctgccccagcggcttaatttaactggtgccgtccgcgtgttatgcgagattgagaaggtggtcgttgcgatccagaaaagattcctgcaacaggaatccatccctgaatcatccctttatctcagccaccctagctgtaatgtgtctcattcaaacggcactcacgtactcctggaggctgggtggagcgagtgtggaaccctgatgcagagtaatatgacaaacactgtggtcagaacaaccctacgaaatgacctctcccaagaaggcatcattcatcatctaaagattttgtcacccatatattgcgctttccagaatgacctcctgacttcgagcggattcaccctcgagtggggcgtgtatacaatcatcgaggatctccatggcgctggcaactttgttactgagatgcagctctttatcggcgactcacccatccctcagaattatagcgttagcgcctctgatgacgtaagaatcgaggttggtctctaccggcagaaatctaacctcaaagtggtacttacagaatgctgggcgacacccagcagcaatgcacgggaccctatcaccttttcgttcatcaacaattcctgtccggttccgaacacatacaccaatgttatcgagaacggcaatagcaacaaggctcaattcaagctccgtattttcagttttatcaacgattcaatagtatatctacattgcaagctgcgggtatgcatggagtcacccggagcaacctgtaagattaattgtaacaacttccggttactccagaactctgagacgtcggctacgcatcaaatgagctgggggccactgatccgttccgaaggagaacccccacacgccgaggcaggactgggcgctggctatgtcgttctgatagttgtggctatttttgtgttagtagccggaacagctacattactgattgtcaggtaccagaggatgaatggaagatacaactttaaaattcagagcaataacttcagctaccaagtcttttacgaatag

SEQ ID NO: 323173 - protein, 252 aa, Artificial Sequence
  derived and/or modified sequence
MAPAPQAPERDPVGSWYNVTILVKMDFKELQQVDPRLLNHMRLLHSLVTSALQPMASTVHHLHSAPGNASTTVSRLLLGLPRPLPVADVSTLLGDIAKRVYEVISVQVQDVNECFYEELNACSGRELCANLEGSYWCVCHQEAPATSPRKLNLEWEDCPPVSDYVVLNVTSDSFQVSWRLNSTQNHTFHVRVYRGMELLRSARTQSQALAVAGLEAGVLYRVKTSYQGCGADVSTTLTIKTKYVLEKLDFQS

SEQ ID NO: 323174 - protein, 184 aa, Artificial Sequence
  derived and/or modified sequence
MAPAPQAPERDPVGSWYNVTILVKMDFKELQQVDPRLLNHMRLLHSLVTSALQPMASTVHHLHSAPGNASTTVSRLLLGLPRPLPVADVSTLLGDIAKRVYEVISVQVQDVNECFYEELNACSGRELCANLEGSYWCVCHQEAPATSPRKLNLEWEARGLEIHLELRATSTSHGTPLSSAENCL

SEQ ID NO: 323175 - DNA, 234 bp, Artificial Sequence
  derived and/or modified sequence
cccgtgggcagctggtacaacgtgaccatcctggtgaagatggacttcaaggagctgcagcaggtggaccccagactgctgaaccacatgagactgctgcacagcctgatgagcatgagcgtgagcatgagaagcagcatgcccgccctggagggcaactgcgcccagacctggagagccagaaccggcgccagcgtgaccagaaagctgcagcccagactgcacggcagctag

SEQ ID NO: 323176 - DNA, 234 bp, Artificial Sequence
  derived and/or modified sequence
cctgtgggctcctggtacaacgtgaccatcctggtgaagatggacttcaaggagctgcagcaggtggacccccggctgctgaaccacatgaggctgctgcacagcctgatgtccatgtctgtgtccatgaggagctccatgcctgccctggagggcaactgtgcccagacctggagggccaggactggagcctctgtgaccaggaagctgcagccccggctgcacggcagctag

SEQ ID NO: 323177 - protein, 136 aa, Artificial Sequence
  derived and/or modified sequence
MQLFIGDSPIPQNYSVSASDDVRIEVGLYRQKSNLKVVLTECWATPSSNARDPITFSFINNSCPVPNTYTNVIENGNSNKAQFKLRIFSFINDSIVYLHCKLRVCMESPGATCKIAALGRRTHVDWWAFPISQWLS

SEQ ID NO: 323178 - DNA, 411 bp, Artificial Sequence
  derived and/or modified sequence
atgcagctgttcatcggcgacagccccatcccccagaactacagcgtgagcgccagcgacgacgtgagaatcgaggtgggcctgtacagacagaagagcaacctgaaggtggtgctgaccgagtgctgggccacccccagcagcaacgccagagaccccatcaccttcagcttcatcaacaacagctgccccgtgcccaacacctacaccaacgtgatcgagaacggcaacagcaacaaggcccagttcaagctgagaatcttcagcttcatcaacgacagcatcgtgtacctgcactgcaagctgagagtgtgcatggagagccccggcgccacctgcaagatcgccgccctgggcagaagaacccacgtggactggtgggccttccccatcagccagtggctgagctag

SEQ ID NO: 323179 - DNA, 411 bp, Artificial Sequence
  derived and/or modified sequence
atgcaactgtttattggagactcaccaataccccagaattactcagtgagcgcctcagatgatgtgcgtattgaagtcggcctgtacaggcaaaaatccaatttgaaagtcgtgctgactgaatgctgggcaacccctagctcgaacgccagggacccgattactttcagcttcattaacaattcctgtccagtcccaaacacttacacaaacgttatcgagaacgggaactccaacaaggctcagttcaagcttaggattttcagctttatcaatgactctattgtgtatctacactgtaaactaagagtatgcatggaatcccccggggctacctgcaaaatcgccgctcttggtcggcgaacccacgtcgactggtgggcattccccatcagtcagtggctttcgtag

SEQ ID NO: 323180 - DNA, 411 bp, Artificial Sequence
  derived and/or modified sequence
atgcagctgttcatcggggacagccccatcccccagaactacagcgtgtctgccagtgatgatgtgcgcatcgaggtgggcctgtaccggcagaagagcaacctgaaggtggtgctgacagagtgctgggccacccccagcagcaatgcccgggaccccatcaccttctccttcatcaacaacagctgccctgtgcccaacacctacaccaacgtgattgaaaatggaaacagcaacaaggcccagttcaagctgcgcatcttctccttcatcaatgacagcatcgtgtacctgcactgcaagctgcgggtgtgcatggagagccctggggccacctgcaagattgctgccctgggccgccgcacccacgtggactggtgggccttccccatcagccagtggctgtcctag

SEQ ID NO: 323181 - DNA, 411 bp, Artificial Sequence
  derived and/or modified sequence
atgcagctgttcatcggcgacagccccatcccccagaactacagcgtgtctgccagcgacgatgtgcggattgaagtcggactttatagacagaagtccaatctaaaggtagttctgacagagtgttgggctacccctagctcaaacgcccgagatcccattacctttagcttcatcaataactcttgtccagtcccaaacacctacaccaatgtgatcgaaaatgggaattctaataaagctcagttcaagctccgaattttttcgttcatcaatgatagtatcgtatatctccactgcaaactaagggtgtgcatggaaagcccaggtgctacctgtaaaattgctgcactgggaagacgcacacatgtggactggtgggcgttccctatctcccagtggttgtcttag

SEQ ID NO: 323182 - DNA, 411 bp, Artificial Sequence
  derived and/or modified sequence
atgcagttgttcattggtgattcccccatacctcaaaactattcagtgtccgcttccgatgacgttagaattgaggtgggtttatacaggcagaaaagtaatctgaaggtcgtcctgactgagtgctgggcgactccttcatcgaacgctcgcgaccctatcaccttttcgttcatcaacaactcctgccccgtccctaatacttatacaaatgtgatcgaaaatggaaattccaataaagcccagttcaagctgcggatcttcagctttatcaacgattcaattgtctatttacactgtaagctccgcgtgtgcatggaaagccctggtgccacatgtaagatcgcagccttgggtcgccgtacccatgtggactggtgggcctttccgatctcacagtggttgtcatag

SEQ ID NO: 323183 - DNA, 998 bp, Artificial Sequence
  derived and/or modified sequence
ctttcacttgtagctgcgagggaggagcccccgacttccctgtggaatattctgagagaccctgtgaaggtgactctcctggcaatgaaacctgggccaccagcccagagaggcctctcaccacagcagggaccaaggctgcctttgtgcaaggcaccagccccaccccccaaggcctgccccagcggctgaacctgaccggagcagtcagggtgctctgtgagatcgagaaggtggttgtcgccatccagaagcgcttcctgcagcaggaatccatccccgagtcctcgttgtacctcagccacccctcctgcaacgtgagccacagcaatggcacacacgtgctcctggaggccggctggagcgagtgtgggaccctcatgcagagcaacatgacgaacaccgtggtgaggaccacgctgaggaacgacctgtcccaggagggcatcatccaccacctgaagatcctgagccccatctactgcgccttccagaatgacctgctgacatcctccggcttcaccctggagtggggggtttacaccatcatcgaggacctccacggcgctgggaattttgttaccgaaatgcagttgtttatcggagactctcccatacctcagaattatagcgtgtctgccagtgacgatgtcaggatcgaagtggggctctacaggcagaaaagcaacctcaaggtggtcctgacggagtgctgggcaaccccgtctagcaacgcccgggaccccatcaccttcagcttcattaacaacagctgccctgtgcccaacacatacaccaacgtgattgagaacggcaactccaataaggcccagttcaagctgaggatcttttcctttatcaacgactccatcgtctacctgcactgcaaactccgcgtctgcatggaatcccccggagccacgtgcaaaatcgcagcccttggacggaggactcatgtggactggtgggcatttcccatttctcaatggctgagctga

SEQ ID NO: 323184 - protein, 77 aa, Artificial Sequence
  derived and/or modified sequence
PVGSWYNVTILVKMDFKELQQVDPRLLNHMRLLHSLMSMSVSMRSSMPALEGNCAQTWRARTGASVTRKLQPRLHGS

SEQ ID NO: 323185 - DNA, 759 bp, Artificial Sequence
  derived and/or modified sequence
atggcccccgccccccaggcccccgagagagaccccgtgggcagctggtacaacgtgaccatcctggtgaagatggacttcaaggagctgcagcaggtggaccccagactgctgaaccacatgagactgctgcacagcctggtgaccagcgccctgcagcccatggccagcaccgtgcaccacctgcacagcgcccccggcaacgccagcaccaccgtgagcagactgctgctgggcctgcccagacccctgcccgtggccgacgtgagcaccctgctgggcgacatcgccaagagagtgtacgaggtgatcagcgtgcaggtgcaggacgtgaacgagtgcttctacgaggagctgaacgcctgcagcggcagagagctgtgcgccaacctggagggcagctactggtgcgtgtgccaccaggaggcccccgccaccagccccagaaagctgaacctggagtgggaggactgcccccccgtgagcgactacgtggtgctgaacgtgaccagcgacagcttccaggtgagctggagactgaacagcacccagaaccacaccttccacgtgagagtgtacagaggcatggagctgctgagaagcgccagaacccagagccaggccctggccgtggccggcctggaggccggcgtgctgtacagagtgaagaccagctaccagggctgcggcgccgacgtgagcaccaccctgaccatcaagaccaagtacgtgctggagaagctggacttccagagctag

SEQ ID NO: 323186 - DNA, 555 bp, Artificial Sequence
  derived and/or modified sequence
atggcccccgccccccaggcccccgagagagaccccgtgggcagctggtacaacgtgaccatcctggtgaagatggacttcaaggagctgcagcaggtggaccccagactgctgaaccacatgagactgctgcacagcctggtgaccagcgccctgcagcccatggccagcaccgtgcaccacctgcacagcgcccccggcaacgccagcaccaccgtgagcagactgctgctgggcctgcccagacccctgcccgtggccgacgtgagcaccctgctgggcgacatcgccaagagagtgtacgaggtgatcagcgtgcaggtgcaggacgtgaacgagtgcttctacgaggagctgaacgcctgcagcggcagagagctgtgcgccaacctggagggcagctactggtgcgtgtgccaccaggaggcccccgccaccagccccagaaagctgaacctggagtgggaggccagaggcctggagatccacctggagctgagagccaccagcaccagccacggcacccccctgagcagcgccgagaactgcctgtag

SEQ ID NO: 323187 - DNA, 759 bp, Artificial Sequence
  derived and/or modified sequence
atggcccccgccccccaagcccccgaacgggatccggttgggagctggtataacgtgacaattctggtgaaaatggacttcaaggaactgcagcaggtagatccccgccttctcaaccacatgagactgcttcacagtttggtcaccagcgcgcttcagccaatggctagcacagtgcatcatctgcactccgcacctggcaacgcttccaccaccgtgtcacggttgctcttgggcttaccacggcccctgccggtggcagacgtaagtacgcttctgggagacattgcgaagcgagtttacgaggtcatttcggtgcaggtacaagacgttaacgaatgtttttatgaagagctgaatgcttgtagcggaagagagctctgcgctaatctcgagggatcctactggtgtgtgtgtcaccaggaagccccagcaacatcccccagaaagcttaatctcgaatgggaagactgtccgccagtatcggactatgttgttctgaacgtcacctcagactcatttcaagtgtcctggaggttaaactccacccagaatcatacatttcacgtgagagtttacagggggatggagttgcttcggagcgccagaacacagtcccaggcgcttgctgtggcaggactggaggctggtgtgttatatcgagtcaagactagctaccaggggtgtggggccgacgtctccaccacactgacaatcaaaaccaagtacgtacttgaaaagttggatttccagtcttag

SEQ ID NO: 323188 - DNA, 555 bp, Artificial Sequence
  derived and/or modified sequence
atggcccctgccccccaagcacccgagagggatcccgtgggttcctggtataatgtgactatactggtcaaaatggatttcaaagaacttcagcaggtagaccctcgattgcttaatcatatgcgcctgctgcattcattggtgacaagtgcgctccagccaatggctagcacggtccatcatttgcactctgctcctgggaacgcaagcaccactgtgtcgcgtctgctgctgggcctccccaggccactcccagttgccgacgtatcgacactgctgggggacattgccaagagagtgtacgaagtgatctccgtacaggtccaagatgtgaacgaatgcttttacgaggagcttaacgcatgttctgggcgggaactgtgtgctaacttggaaggaagctattggtgcgtgtgccatcaggaagccccggccacttctcctagaaaattgaaccttgaatgggaagcacggggtctggagatacacctggagctccgcgcaacttcaacaagtcatggaacaccactgagcagcgctgagaattgcctctag

SEQ ID NO: 323189 - DNA, 234 bp, Artificial Sequence
  derived and/or modified sequence
ccagtgggatcctggtacaatgtgactatattagttaagatggatttcaaggagctgcagcaggttgatccacgtctactcaaccacatgaggctgcttcactcattgatgtctatgtctgtgtcgatgagatcctccatgccagcattggagggaaattgcgctcaaacctggcgggcccggacaggggcctccgtaaccaggaagcttcagccaagactgcacggtagttag

SEQ ID NO: 323190 - DNA, 759 bp, Artificial Sequence
  derived and/or modified sequence
atggccccagccccccaggcccctgagcgggaccctgtgggctcctggtacaacgtgaccatcctggtgaagatggacttcaaggagctgcagcaggtggacccccggctgctgaaccacatgaggctgctgcacagcctggtgaccagcgccctgcagcccatggccagcacagtgcaccacctgcacagcgcccctggaaatgccagcaccaccgtgtcccggctgctgctgggcctgccccggcccctgcctgtggctgatgtgtccaccctgctgggggacatcgccaagagggtgtatgaagtcatctctgtgcaggtgcaggatgtgaatgaatgcttctatgaggagctgaatgcctgcagcggccgggagctgtgtgccaacctggagggcagctactggtgtgtgtgccaccaggaggccccagccaccagccccaggaagctgaacctggagtgggaggactgcccccctgtgtctgactatgtggtgctgaatgtgaccagtgacagcttccaggtgtcctggaggctgaacagcacccagaaccacaccttccacgtgcgggtgtaccggggcatggagctgctgcggagcgcccggacccagagccaggccctggccgtggccggcctggaggccggcgtgctgtacagagtgaagaccagctaccagggctgtggggctgatgtgtccaccaccctgaccatcaagaccaagtatgtgctggagaagctggacttccagagctag

SEQ ID NO: 323191 - DNA, 555 bp, Artificial Sequence
  derived and/or modified sequence
atggccccagccccccaggcccctgagcgggaccctgtgggctcctggtacaacgtgaccatcctggtgaagatggacttcaaggagctgcagcaggtggacccccggctgctgaaccacatgaggctgctgcacagcctggtgaccagcgccctgcagcccatggccagcacagtgcaccacctgcacagcgcccctggaaatgccagcaccaccgtgtcccggctgctgctgggcctgccccggcccctgcctgtggctgatgtgtccaccctgctgggggacatcgccaagagggtgtatgaagtcatctctgtgcaggtgcaggatgtgaatgaatgcttctatgaggagctgaatgcctgcagcggccgggagctgtgtgccaacctggagggcagctactggtgtgtgtgccaccaggaggccccagccaccagccccaggaagctgaacctggagtgggaggcccggggcctggagatccacctggagctgcgggccaccagcaccagccacggcacccccctgagcagcgctgagaactgcctgtag

SEQ ID NO: 323192 - DNA, 759 bp, Artificial Sequence
  derived and/or modified sequence
atggcccccgccccccaggcccccgagcgggaccccgtgggcagctggtacaacgttaccattctagtcaagatggacttcaaagagttgcagcaggtcgatcctaggctgttgaaccatatgcgactgctccacagtcttgtgactagtgctctccaacccatggcctctacagtccaccacctacatagtgctcccggcaatgccagcacaaccgtctcgagactcctcctgggtcttccccgtcccctgcccgtggcagacgtctcaacgctcctaggggacatcgccaaacgtgtgtacgaggtgatttcggtccaggtgcaggacgtcaacgagtgtttctacgaagagctcaatgcctgctcagggagagagttatgcgcgaacctcgagggatcatactggtgcgtgtgccatcaggaggctccggcaaccagccctcggaagctgaaccttgagtgggaggattgtcctccagtctcagactacgttgtactcaacgtcacctcagatagctttcaggtaagctggagactgaactcaacccaaaatcacaccttccacgtgagagtctacagagggatggagttactcagatcggcaaggacacaatcacaggcacttgccgtggccggcctggaggcaggcgtattgtaccgcgtcaagacctcctatcagggatgtggtgctgatgtatccaccaccctgacaataaaaaccaaatacgtgctggaaaagctggactttcagagctag

SEQ ID NO: 323193 - DNA, 555 bp, Artificial Sequence
  derived and/or modified sequence
atggcccccgccccccaggcccccgagcgggaccccgtgggcagctggtataatgttacaatattggtgaagatggacttcaaggaactccagcaggtagatccccggctcctgaaccatatgagactgctgcactcactggtgacttccgccctacagccgatggcctccaccgttcatcacctgcatagcgcgcctggaaatgctagtaccactgtgtcgcgcctgttattaggccttccgaggccactccctgtggccgatgtttctactctgctcggtgatatcgcaaaacgcgtgtacgaagtaataagtgtgcaagtccaggacgtgaacgaatgcttctatgaggaactcaacgcctgcagcggtcgtgaactgtgtgctaatctggagggttcgtattggtgtgtgtgtcatcaggaggcccctgccactagtccacgcaaactaaaccttgagtgggaggctcgaggcttagaaattcacttagaactgcgggccacgagtacgagtcatggcacccctctgagcagcgctgaaaactgtttatag

SEQ ID NO: 323194 - DNA, 234 bp, Artificial Sequence
  derived and/or modified sequence
cccgtgggcagctggtacaacgtgaccatcctggtgaagatggacttcaaagaattacagcaggtagatccaagattgctgaatcatatgcgtctattacattcacttatgtcgatgtccgtgagtatgcggtctagtatgcctgcactggaagggaactgcgcacagacatggagggcccggacaggggcctcagtcaccagaaagttgcaaccccgactgcacggttcttag

SEQ ID NO: 323195 - DNA, 759 bp, Artificial Sequence
  derived and/or modified sequence
atggcccctgctcctcaggcgcctgaacgggatcctgtcggcagttggtacaatgtgacgattttggtgaaaatggacttcaaggaactgcagcaggtcgatcctcgtctgttaaatcacatgagactcttgcacagtttagtgaccagcgccctccagccaatggccagcacagtgcaccacctgcacagtgcccctggcaatgcctcaaccactgtgtctcgtctgctgcttggcctgcccaggccactacctgtagccgatgttagcaccttgcttggcgacatagccaagcgagtatacgaggttatatctgtccaggttcaggacgtgaacgaatgtttctatgaggaactcaatgcctgcagcgggcgagagctctgcgccaatctagaagggtcttactggtgtgtttgtcaccaggaggctccagctactagtccacggaaacttaacctcgagtgggaggattgccctccggtgagtgactacgtcgtgctgaatgtcacctctgactccttccaggtctcctggcgcttgaactccacgcagaatcacacatttcatgtgcgagtgtaccggggtatggaactgctccggagcgcacgcacccagtcacaggccctagctgtggctgggctggaggcaggcgtgctctatagagtcaagaccagttatcagggatgtggtgctgacgtgagcaccacactgacgattaagactaaatacgtgctggagaagttggactttcagtcatag

SEQ ID NO: 323196 - DNA, 555 bp, Artificial Sequence
  derived and/or modified sequence
atggcccctgcccctcaggctcctgagagagatcccgtgggctcctggtataatgttacaattttggtaaagatggacttcaaggagctccaacaagtggacccgaggctgcttaatcacatgagactgctgcactcgctagtaacatcagcgctccaaccgatggcttccaccgtccatcaccttcactccgcgccaggaaacgccagtaccactgttagccgactgctcctggggttacctaggcccctgcctgttgccgatgtttccacgctgctgggtgacatagcaaaacgagtgtacgaagtcatcagcgtgcaggtacaggatgtaaatgaatgtttctatgaggaactcaacgcctgtagcgggagagaactgtgcgctaacttggagggctcctattggtgcgtgtgccaccaagaggctccggcaacctcacctcgtaaattaaacctagagtgggaggccaggggactggaaattcatcttgaactgcgtgcaacttccactagccatggtacccccctgtcctctgcagagaactgtctatag

SEQ ID NO: 323197 - DNA, 234 bp, Artificial Sequence
  derived and/or modified sequence
cctgtcggatcctggtataatgtgacaatcctagttaaaatggacttcaaggagctgcagcaggttgacccaagactgctcaaccacatgaggctgctccattcactgatgagtatgagcgtttccatgcgctccagcatgcccgctctcgaggggaactgcgcacagacctggagggcccgaacaggcgcatcagttactcgcaaacttcagccacgtctccacggctcctag

SEQ ID NO: 323198 - DNA, 963 bp, Artificial Sequence
  derived and/or modified sequence
accctgtgggctcctggtacaacgtcaccatactggtgaaaatggacttcaaggaactccagcaagtggaccccaggctcctgaaccacatgcgccttctgcattccttgatgtcaatgagtgtttctatgaggagctcaatgcctgctctggaagggaactgtgcgcaaacctggagggctcgtactggtgcgtctgtcaccaggaagctccagccacgtctccacggaagctgaacctggagtgggaagcacgtggccttgagatccacttagaacttcgcgccacgtccacatcccacggcaccccactaagctctgcagagaactgtctatagattcctgctctgtggcttccagggtgagaatcctgtccctttcgtgagcacagaaggttggaaaacagattgtcctccagtcagtgactacgtggtcctcaacgtcaccagtgacagttttcaagtatcctggcgtttaaattctacacagaaccacactttccatgtccgggtttaccggggtatggagttgctcaggagcgccaggacacagagccaggcactggcagtggctgggctggaggctggagtgctgtacagggtgaagaccagctaccaggggtgcggggccgacgtctccaccacgctgaccatcaaaaccaatgcccaggtatttgaagtcacaataaagattgtaaaccacaacctgacggagaagttactcaaccgcagcagtgtggagtaccaggacttttctagacaactgcttcacgaggtcgagagctccttcccaccagtggtgtctgacttgtaccgaagtgggaagctgagaatgcagatcgtgtctctccaggcgggaagtgtggtcgtgaggctcaagctcaccgtgcaggaccccgggtttcccatgggcatctccacgctggcccccatactccagcccctgttggcaagcacagtgttcc

SEQ ID NO: 323199 - protein, 824 aa, Artificial Sequence
  derived and/or modified sequence
MLAVQQTEHLPACPPARRWSSNFCPESTEGGPSLLGLRDMVRRGWSVCTAILLARLWCLVPTHTFLSEYPEAAEYPHPGWVYWLQMAVAPGHLRAWVMRNNVTTNIPSAFSGTLTHEEKAVLTVFTGTATAVHVQVAALASAKLESSVFVTDCVSCKIENVCDSALQGKRVPMSGLQGSSIVIMPPSNRPLASAASCTWSVQVQGGPHHLGVVAISGKVLSAAHGAGRAYGWGFPGDPMEEGYKTLLKGISGKFNSGELVAIMGPSGAGKSTLMNILAGYRETGMKGAVLINGLPRDLRCFRKVSCYIMQDDMLLPHLTVQEAMMVSAHLKLQEKDEGRREMVKEILTALGLLSCANTRTGSLSGGQRKRLAIALELVNNPPVMFFDEPTSGLDSASCFQVVSLMKGLAQGGRSIICTIHQPSAKLFELFDQLYVLSQGQCVYRGKVCNLVPYLRDLGLNCPTYHNPADFVMEVASGEYGDQNSRLVRAVREGMCDSDHKRDLGGDAEVNPFLWHRPSEEVKQTKRLKGLRKDSSSMEGCHSFSASCLTQFCILFKRTFLSIMRDSVLTHLRITSHIGIGLLIGLLYLGIGNEAKKVLSNSGFLFFSMLFLMFAALMPTVLTFPLEMGVFLREHLNYWYSLKAYYLAKTMADVPFQIMFPVAYCSIVYWMTSQPSDAVRFVLFAALGTMTSLVAQSLGLLIGAASTSLQVATFVGPVTAIPVLLFSGFFVSFDTIPTYLQWMSYISYVRYGFEGVILSIYGLDREDLHCDIDETCHFQKSEAILRELDVENAKLYLDFIVLGIFFISLRLIAYFVLRYKIRAER

SEQ ID NO: 323200 - protein, 265 aa, Artificial Sequence
  derived and/or modified sequence
MLALTVLETCVKNCGHRFHVLVASQDFVESVLVRTILPKNNPPTIVHDKVLNLIQSWADAFRSSPDLTGVVTIYEDLRRKGLEFPMTDLDMLSPIHTPQRTVFNSETQSGQDSVGTDSSQQEDSGQHAAPLPAPPILSGDTPIAPTPEQIGKLRSELEMVSGNVRVMSEMLTELVPTQAEPADLELLQELNRTCRAMQQRVLELIPQIANEQLTEELLIVNDNLNNVFLRHERDRGLTVLPRLVSNSWPQAVLPPWPPKALVLQA

SEQ ID NO: 323201 - protein, 209 aa, Artificial Sequence
  derived and/or modified sequence
MDFLLGNPFSSPVGQRIEKATDGSLQSEDWALNMEICDIINETEEGPKDALRAVKKRIVGNKNFHEVMLALTVLETCVKNCGHRFHVLVASQDFVESVLVRTILPKNNPPTIVHDKVLNLIQSWADAFRSSPDLTGVVTIYEDLRRKGLEFPMTDLDMLSPIHTPRGPCSTQRHNQDRILWALTPASKRTLASMLPLCPPRPYSPVTRP

SEQ ID NO: 323202 - DNA, 798 bp, Artificial Sequence
  derived and/or modified sequence
atgctggccctgaccgtgctggagacctgcgtgaagaactgcggccacagattccacgtgctggtggccagccaggacttcgtggagagcgtgctggtgagaaccatcctgcccaagaacaacccccccaccatcgtgcacgacaaggtgctgaacctgatccagagctgggccgacgccttcagaagcagccccgacctgaccggcgtggtgaccatctacgaggacctgagaagaaagggcctggagttccccatgaccgacctggacatgctgagccccatccacaccccccagagaaccgtgttcaacagcgagacccagagcggccaggacagcgtgggcaccgacagcagccagcaggaggacagcggccagcacgccgcccccctgcccgccccccccatcctgagcggcgacacccccatcgcccccacccccgagcagatcggcaagctgagaagcgagctggagatggtgagcggcaacgtgagagtgatgagcgagatgctgaccgagctggtgcccacccaggccgagcccgccgacctggagctgctgcaggagctgaacagaacctgcagagccatgcagcagagagtgctggagctgatcccccagatcgccaacgagcagctgaccgaggagctgctgatcgtgaacgacaacctgaacaacgtgttcctgagacacgagagagacagaggcctgaccgtgctgcccagactggtgagcaacagctggccccaggccgtgctgcccccctggccccccaaggccctggtgctgcaggcctag

SEQ ID NO: 323203 - DNA, 630 bp, Artificial Sequence
  derived and/or modified sequence
atggacttcctgctgggcaaccccttcagcagccccgtgggccagagaatcgagaaggccaccgacggcagcctgcagagcgaggactgggccctgaacatggagatctgcgacatcatcaacgagaccgaggagggccccaaggacgccctgagagccgtgaagaagagaatcgtgggcaacaagaacttccacgaggtgatgctggccctgaccgtgctggagacctgcgtgaagaactgcggccacagattccacgtgctggtggccagccaggacttcgtggagagcgtgctggtgagaaccatcctgcccaagaacaacccccccaccatcgtgcacgacaaggtgctgaacctgatccagagctgggccgacgccttcagaagcagccccgacctgaccggcgtggtgaccatctacgaggacctgagaagaaagggcctggagttccccatgaccgacctggacatgctgagccccatccacacccccagaggcccctgcagcacccagagacacaaccaggacagaatcctgtgggccctgacccccgccagcaagagaaccctggccagcatgctgcccctgtgcccccccagaccctacagccccgtgaccagaccctag

SEQ ID NO: 323204 - DNA, 1008 bp, Artificial Sequence
  derived and/or modified sequence
atggacttcctgctgggcaaccccttcagcagccccgtgggccagagaatcgagaaggccaccgacggcagcctgcagagcgaggactgggccctgaacatggagatctgcgacatcatcaacgagaccgaggagggccccaaggacgccctgagagccgtgaagaagagaatcgtgggcaacaagaacttccacgaggtgctggagacctgcgtgaagaactgcggccacagattccacgtgctggtggccagccaggacttcgtggagagcgtgctggtgagaaccatcctgcccaagaacaacccccccaccatcgtgcacgacaaggtgctgaacctgatccagagctgggccgacgccttcagaagcagccccgacctgaccggcgtggtgaccatctacgaggacctgagaagaaagggcctggagttccccatgaccgacctggacatgctgagccccatccacaccccccagagaaccgtgttcaacagcgagacccagagcggccaggacagcgtgggcaccgacagcagccagcaggaggacagcggccagcacgccgcccccctgcccgccccccccatcctgagcggcgacacccccatcgcccccacccccgagcagatcggcaagctgagaagcgagctggagatggtgagcggcaacgtgagagtgatgagcgagatgctgaccgagctggtgcccacccaggccgagcccgccgacctggagctgctgcaggagctgaacagaacctgcagagccatgcagcagagagtgctggagctgatcccccagatcgccaacgagcagctgaccgaggagctgctgatcgtgaacgacaacctgaacaacgtgttcctgagacacgagagattcgagagattcagaaccggccagaccaccaaggcccccagcgaggccgagcccgccgccgacctgatcgacatgggccccgaccccgccgccaccggcaacctgagcagccagctggccggctag

SEQ ID NO: 323205 - DNA, 798 bp, Artificial Sequence
  derived and/or modified sequence
atgcttgctttaacggttctggagacctgcgtgaaaaactgcggccatcggttccatgtattagttgcatctcaggatttcgtcgagagcgtgttagtgcgtacaatcctgcccaagaataatcctcccacgattgtccacgacaaagtgttgaatctaatccaatcttgggcagacgcctttcggagctctcctgacttgaccggagtagtgactatctatgaggatctcagacggaagggactggaattccctatgacagatttggatatgttgtcccccatccatactccacagcgaaccgtgttcaacagtgaaacccagtcaggccaggacagcgtaggaactgattcctcccagcaggaagacagcggccagcacgcagcaccgctgccagccccacccatcctctcaggagacactccaattgctccaaccccagagcagatcggaaaactgcggagtgaactcgagatggtctcgggcaacgtgcgtgtcatgagtgaaatgctcacggaactggtaccaacacaggcagagccagctgacttagagcttctgcaggaactcaacaggacttgtagagcgatgcagcagagggtccttgaacttattccccagattgccaacgaacagcttaccgaagagctgcttatcgtaaacgacaacctgaataacgtgtttttacgccatgagagggaccggggcctgacggtcttgccgcgcctggtgtccaattcctggcctcaggccgttctgcccccctggcctccaaaggcactggtcttgcaggcctag

SEQ ID NO: 323206 - DNA, 630 bp, Artificial Sequence
  derived and/or modified sequence
atggatttcctgttgggtaatccgtttagctcgcccgtggggcagcgtatcgaaaaggccacagacggaagcctgcagtcagaggactgggccctcaatatggagatctgcgacatcatcaacgagactgaggaaggtcccaaagacgcgctgagggctgttaagaaacgcatcgtgggtaataagaatttccacgaggtgatgctggccctcaccgttctcgaaacatgtgtgaagaactgcggacatcgatttcacgtgttggttgcaagtcaagattttgtcgaatcagtgctcgttaggacaattctgccaaaaaacaaccctcccactattgtccatgataaggttctaaatctgatacagagttgggctgacgccttccggagttctccggatctgacaggggtggtgactatttacgaggatttgcgacgcaaaggcctggagtttccaatgacagatttagacatgctgagtcccatccacactcctcgcgggccgtgtagtacacaaagacataaccaggatagaattctttgggctctgaccccagcaagtaagagaacgctggcatcaatgctgccattatgtccgccacgaccttatagccctgtgactaggccttag

SEQ ID NO: 323207 - DNA, 1008 bp, Artificial Sequence
  derived and/or modified sequence
atggacttcttgttgggcaatccgtttagcagccccgtcgggcagcgcatagaaaaagctaccgacggcagcctccagtcagaggactgggccctcaacatggagatctgtgatatcataaacgaaactgaagaagggcccaaagacgctcttagggccgtcaaaaaacgaattgtgggtaacaagaacttccacgaggttttggaaacctgtgtgaaaaactgcggacataggttccatgtcctggtggcttcccaagacttcgtggaatccgttctggtgagaacaatactgcctaagaataatccacctaccattgtgcacgataaagtccttaacctcatacagtcctgggccgacgcttttagatcatcacccgatctcactggcgttgttacgatttatgaggatctaaggagaaagggcttagaattccccatgaccgacctcgatatgctatcgcctatccataccccacaaagaaccgtctttaactcggagacacagtctgggcaagactcagtgggcactgacagttctcagcaggaagacagcggtcagcatgccgcacctctgcccgctccacccatcctctctggtgatactcccatcgcccccactcctgagcagatcggcaagctacgctctgaactggagatggtgtctgggaacgtgcgtgtgatgtcagagatgctgactgaactcgtgcctacgcaggctgagcccgctgacttagagctattacaggagttaaaccgaacatgcagagcaatgcaacagcgcgtactagagctgattccacagatcgctaatgaacagctcacggaggagctgctaatcgtgaatgacaatttgaacaacgtgtttcttcggcatgaacgcttcgaacggttccgcactgggcagaccacgaaagcacccagtgaagccgagcccgccgccgatctgattgacatgggcccagatcctgccgctacgggaaatctgtcaagtcagcttgccggatag

SEQ ID NO: 323208 - DNA, 798 bp, Artificial Sequence
  derived and/or modified sequence
atgctggccctgactgtgctggagacctgtgtgaagaactgtggccaccgcttccacgtgctggtggccagccaggactttgtggagagcgtgctggtgaggaccatcctgcccaagaacaacccccccaccatcgtgcatgacaaggtgctgaacctgatccagagctgggcagatgccttccgcagcagcccagacctgactggagtggtgaccatctatgaggacctgcggaggaagggcctggagttccccatgacagacctggacatgctgagccccatccacaccccccagaggacagtgttcaacagcgagacccagagcggccaggacagcgtgggcacagacagcagccagcaggaggacagcggccagcacgccgcccccctgcctgccccacccatcctgagcggggacacccccatcgcccccaccccagagcagatcggcaagctgcggtctgagctggagatggtgtctggaaatgtgcgggtgatgtctgagatgctgacagagctggtgcccacccaggccgagcctgctgacctggagctgctgcaggagctgaacagaacctgccgggccatgcagcagagggtgctggagctgatcccccagatcgccaatgagcagctgacagaggagctgctgattgtgaatgacaacctgaacaacgtgttcctgcggcatgagcgggaccggggcctgactgtgctgccccggctggtgagcaacagctggccccaggccgtgctgcccccctggccacccaaggccctggtgctgcaggcctag

SEQ ID NO: 323209 - DNA, 2583 bp, Artificial Sequence
  derived and/or modified sequence
gattcccggggttggtggcagcggcggtagcagcaatggactttctcctggggaacccgttcagctctccagtgggacagcgcatcgagaaagccacagatggctccctgcagagcgaggactgggccctcaacatggagatctgcgacatcatcaacgagacggaggaaggtgactctgctgctggaggtccaggggccacaggttgtgagtccctgctaagcaatgggctaggaagattctgatgtgatcagaacctggctggatacacaaaacagtcccaaagatgccctccgagcagtaaagaagagaatcgtggggaataagaacttccacgaggtgatgctggctctcacagtcttagaaacctgtgtcaagaactgcgggcaccgcttccacgtgctggtggccagccaggacttcgtggagagtgtgctggtgaggaccatcctgcccaagaacaacccacccaccatcgtgcatgacaaagtgctcaacctcatccagtcctgggctgacgcgttccgcagctcgcccgatctgacaggtgtggtcaccatctatgaggacctgcggaggaaaggcctggagttccccatgactgacctggacatgctgtcacccatccacacaccccagaggaccgtgttcaactcagagacacaatcaggacaggattctgtgggcactgactccagccagcaagaggactctggccagcatgctgcccctctgcccgccccgcccatactctccggtgacacgcccatagcaccaaccccggaacagattgggaagctgcgcagtgagctggagatggtgagtgggaacgtgagggtgatgtcggagatgctgacggagctggtgcccacccaggccgagcccgcagacctggagctgctgcaggagctcaaccgcacgtgccgagccatgcagcagcgggtcctggagctcatccctcagatcgccaatgagcagctgacagaggagctgctcatcgtcaatgacaatctcaacaatgtgttcctgcgccatgaacgagacaggggtctcactgtgttgcccaggctagtctcaaactcttggcctcaagcagtcctccctccttggcctccgaaagcattggtattacaggcatgagccaccacacccacctgcccaccttgtatcattctgttcaagagtcacatccccaagagagacttggattggctgagcttcattgtgcctaccagctggggtttgaacggttccgaacaggccagaccaccaaggccccaagtgaggccgagccggcagctgacctgatcgacatgggccctgacccagcagccaccggcaacctctcatcccagctggcaggaatgaacctgggctccagcagtgtgagagctggcctgcagtctctggaggcctctggtcgactggaagatgagtttgacatgtttgcgctgacacggggcagctcactggctgaccaacggaaagaggtaaaatacgaagccccccaagcaacagacggcctggctggagccctggacgcccggcagcagagcactggcgcgatcccagtcacccaggcctgcctcatggaggacatcgagcagtggctgtccactgacgtgggtaatgatgcggaagagcctaagggggtcaccagcgaagaatttgacaaattcctggaagaacgggccaaagccgcggaccgattgcccaacctctccagcccctcagctgaggggcccccgggtcccccatctggcccagcgccccggaagaagacccaggagaaagatgatgacatgctgtttgccttatgagtgtggggtctggcaccctgcagcccaggtccccactgctctcacacccttaggctgggacctccctccctcctctggtgttaaggctgctttgggggtggcttgttacccccttttcctcctctttgaagacggagctgccccagctgtggctgggggtgtggaggcagtgggatgaactgggggacaggtctgcgctgcagtgggatctggctgctctgcctcctttcccaccccagctgaccatgagactttgctgagaagtggaggccccaggacaggctggctggctggctggctgcttgacccagtgtgactctccttcactgagtgataccctgctccgggcccatgccccaaggagcccttcagagcccacactgccagtcgaggcctggctggaggctggccacagtggaaattctgccgagcctcttgtcccttccctgctctgctgcatggggccccatggctttggctggccactgagggtagggtgtggaggtgtggaggccccctgaggagctgcggcggcccaggtacgaagctgcaactctgcgcgcagtgggcgagatctcatcagccccaggctgcaggtgaggcttcaggggatgctggggccccactgcccctccgctgccttgccctccatccttcctctgttccttctggccgggcaccacagcactggggctcacctcttggttgatcctcttgtactgggagaggtgccttttgtatccccaattaaaggtagaaaacc

SEQ ID NO: 323210 - DNA, 630 bp, Artificial Sequence
  derived and/or modified sequence
atggacttcctgctgggcaaccccttcagcagccctgtgggccagagaattgagaaggccacagatggcagcctgcagagcgaggactgggccctgaacatggagatctgtgacatcatcaatgaaacagaggagggccccaaggatgccctgcgggctgtgaagaagagaattgtgggcaacaagaacttccacgaggtgatgctggccctgactgtgctggagacctgtgtgaagaactgtggccaccgcttccacgtgctggtggccagccaggactttgtggagagcgtgctggtgaggaccatcctgcccaagaacaacccccccaccatcgtgcatgacaaggtgctgaacctgatccagagctgggcagatgccttccgcagcagcccagacctgactggagtggtgaccatctatgaggacctgcggaggaagggcctggagttccccatgacagacctggacatgctgagccccatccacaccccccggggcccctgcagcacccagaggcacaaccaggaccgcatcctgtgggccctgaccccagccagcaagaggaccctggcctccatgctgcccctgtgccccccccggccctacagccctgtgacccggccctag

SEQ ID NO: 323211 - DNA, 1008 bp, Artificial Sequence
  derived and/or modified sequence
atggacttcctgctgggcaaccccttcagcagccctgtgggccagagaattgagaaggccacagatggcagcctgcagagcgaggactgggccctgaacatggagatctgtgacatcatcaatgaaacagaggagggccccaaggatgccctgcgggctgtgaagaagagaattgtgggcaacaagaacttccacgaggtgctggagacctgtgtgaagaactgtggccaccgcttccacgtgctggtggccagccaggactttgtggagagcgtgctggtgaggaccatcctgcccaagaacaacccccccaccatcgtgcatgacaaggtgctgaacctgatccagagctgggcagatgccttccgcagcagcccagacctgactggagtggtgaccatctatgaggacctgcggaggaagggcctggagttccccatgacagacctggacatgctgagccccatccacaccccccagaggacagtgttcaacagcgagacccagagcggccaggacagcgtgggcacagacagcagccagcaggaggacagcggccagcacgccgcccccctgcctgccccacccatcctgagcggggacacccccatcgcccccaccccagagcagatcggcaagctgcggtctgagctggagatggtgtctggaaatgtgcgggtgatgtctgagatgctgacagagctggtgcccacccaggccgagcctgctgacctggagctgctgcaggagctgaacagaacctgccgggccatgcagcagagggtgctggagctgatcccccagatcgccaatgagcagctgacagaggagctgctgattgtgaatgacaacctgaacaacgtgttcctgcggcatgaaagatttgagcgcttcagaacaggccagaccaccaaggcccccagcgaggccgagcctgctgctgacctgattgacatgggccctgaccctgctgccaccggcaacctgagcagccagctggccggctag

SEQ ID NO: 323212 - DNA, 798 bp, Artificial Sequence
  derived and/or modified sequence
atgctggccctgaccgtgctggagacctgcgtgaagaactgcggccaccgctttcacgtgctggtggcatcacaggatttcgtcgagagtgtactcgtgcgaaccatccttcccaaaaataacccaccaacgatcgtgcacgacaaggtgttaaatctcatacaaagctgggccgatgcttttcggtcctctcccgacctgaccggcgtggttactatctatgaagatctgagaagaaaggggctggaatttcccatgaccgatctggatatgctgagtcccatccacacaccccagcgcactgtgtttaatagcgagactcagtccggccaagattcagtcggaactgactcttctcagcaagaagattccgggcaacatgccgctccccttcccgctcctcccatattaagcggtgacactcctattgcccctacgccggagcagatcgggaagcttagatcagagctggagatggtttccggaaatgtgcgcgtgatgtctgagatgcttacggagcttgtgccgacccaagctgagccagcagacctggagcttctccaagagctgaaccggacctgtcgggctatgcaacaacgggtgcttgaactgatcccccaaatcgctaatgagcagctaaccgaggagctgctgatcgtgaacgacaacctcaacaatgtgtttctccgtcatgaacgagacaggggactcaccgtgttacccaggcttgtatcaaactcctggcctcaggcagtgctgccaccatggcctccgaaggccctggtgctacaggcctag

SEQ ID NO: 323213 - DNA, 630 bp, Artificial Sequence
  derived and/or modified sequence
atggacttcctgctgggcaaccccttcagcagccccgtgggccagcgcatcgagaaagctaccgatgggtctctacagtcagaagactgggccctgaacatggagatctgtgatataattaatgaaaccgaggaagggcccaaagacgcgttacgggctgttaagaagagaattgtggggaacaagaatttccacgaggtgatgcttgcactcaccgtgctcgagacatgtgtgaagaactgcgggcacagatttcacgttcttgtcgcttcacaagattttgtagaaagtgtgcttgtgaggaccatactcccaaaaaataacccaccaaccattgttcacgacaaagtacttaatttgatccagagctgggccgatgctttcagatcgagtccggatttgaccggcgtggtgactatttacgaggatttgcgccgcaaaggactcgaatttccaatgaccgacctcgatatgctttcccccatccacactccccggggaccctgctcaacacagaggcacaatcaagatagaattctatgggccctcactccggcctccaaacgaaccctggcttctatgctgccattgtgtcctccccggccctacagcccggtgactaggccatag

SEQ ID NO: 323214 - DNA, 1008 bp, Artificial Sequence
  derived and/or modified sequence
atggacttcctgctgggcaaccccttcagcagccccgtgggccagcgaatcgaaaaagccactgatggctctctgcagtcagaggactgggccctgaatatggagatctgcgacattattaacgagacagaagagggaccgaaggatgcgcttcgagcagtgaaaaaaagaatcgtgggaaacaaaaatttccatgaagtactggaaacctgcgttaagaattgcggtcataggttccacgtactggtggcttcgcaagactttgtagaaagcgtgttggtaaggaccatcttgcccaagaataatcctcctactattgtacatgacaaggtgctaaacctgatccagtcttgggccgatgcattccggtcttccccagacctcactggtgtggtgaccatatatgaggatctgcgcaggaagggattggaattcccgatgaccgacctggatatgctgagccccatccacactccccagaggaccgtcttcaactctgagactcagtctggacaagattctgtggggacggattctagccagcaggaggactcgggccagcatgcagctcccctgccagcaccgccgattttatcaggagatacacccatcgcccccacccccgaacaaatcggcaaactgcgcagtgagttggagatggtgagtggaaacgtgagggttatgtctgaaatgctaactgaactagttcctacccaggctgagcctgcggacctggaacttcttcaggagctgaaccggacctgcagggccatgcagcagcgggtgctcgagcttatcccccaaattgctaacgagcaactcacagaggaactgctgattgttaatgacaacctaaacaacgtgtttctgagacatgagcggttcgaaaggttccggacaggtcagaccacaaaagcacctagcgaggcagagcccgctgcagatctgattgacatgggccctgatcctgcagcaacgggcaatctcagctcccaactggctgggtag

SEQ ID NO: 323215 - DNA, 798 bp, Artificial Sequence
  derived and/or modified sequence
atgctcgctctgaccgtgttggagacatgcgtgaagaattgcggacataggttccatgtactcgtggcctctcaagacttcgtagaatcagtgcttgtgaggactattctccctaagaataaccccccaaccatagtgcatgacaaagtcttgaacctgatacagagctgggctgatgcattccgcagttccccagacctcaccggcgtggtgaccatctacgaggatttgaggagaaagggcctggagttccctatgacggatttagatatgctgtctcctattcatacccctcagcggactgtgttcaactcagaaacacaaagtgggcaggattcagtggggactgattcaagtcagcaggaagactcaggtcagcatgccgcaccgctgccagcccctccaattttgtccggcgatacccccattgcccctaccccagagcagatcggaaagttaagaagtgaacttgagatggttagtggaaacgtgagagtgatgtcggagatgctcacggagcttgttccaacccaagctgagcctgcagacttggagcttctgcaagaactcaatcggacctgccgggctatgcagcagagggtgctggagctgatacctcagatagcgaacgagcagcttactgaggagcttttgatcgtcaacgataatctgaataatgtattcctccgccatgagcgcgacagaggactgacagttctgccgcgacttgtgtccaatagttggccccaggcggtactacccccttggccccctaaagccctggtcctccaggcctag

SEQ ID NO: 323216 - DNA, 630 bp, Artificial Sequence
  derived and/or modified sequence
atggattttctgctggggaacccgttttccagtccggtggggcagcgaatcgaaaaggccactgatggctcattgcagtctgaagactgggcactgaatatggagatctgtgacatcatcaacgaaactgaggagggtccgaaagatgccttaagggctgtcaagaagaggatcgtgggcaataagaatttccatgaggtaatgctcgctctaacagtgctcgagacctgtgttaagaattgcggacatcggttccatgtcctcgtggcatcccaagacttcgttgagagtgttctcgtccgaacgatccttccaaagaacaaccccccaaccatcgtccatgacaaggtgttaaacctaattcaaagctgggctgacgcattcaggtcatcacccgatcttactggcgtggtgactatctatgaagatctgaggcgcaaaggcctcgagttccctatgacggacctggacatgctgagcccgatccataccccacggggtccctgctctacccagagacacaaccaggatagaattctctgggctctgacccccgcttcaaaacggacactggcctcgatgctccccctctgccctccacggccatactctccagttacgcgcccatag

SEQ ID NO: 323217 - DNA, 1008 bp, Artificial Sequence
  derived and/or modified sequence
atggactttctgttagggaatccattctcctctccagtgggacaacgtatcgaaaaagccactgatggctccctgcagtccgaggactgggctttaaatatggagatctgcgacatcatcaacgagaccgaagagggacctaaggatgcactgcgcgctgtgaagaagagaatagtgggaaataagaattttcatgaggtgctggaaacgtgcgtgaagaattgtgggcaccgctttcatgtccttgtggcttctcaggacttcgtggagagcgtcctggtgaggacaattctgccgaaaaataatcctcccaccatcgtacacgacaaagtcttgaatttgatacagagctgggctgacgccttccgcagctctccggatttgaccggcgttgtaaccatatatgaggacctcaggagaaaaggactagagttcccaatgaccgaccttgacatgttgtctccgatacacacacctcagaggactgttttcaattcggaaactcagtctgggcaggacagtgtcggcacggatagctcccagcaagaggactcgggccaacatgccgcacctttacctgctcccccaatcctgagcggtgatactccaatcgccccaactcccgagcagattggcaaattaagaagtgaactggaaatggtgtctggaaatgtgagggtgatgtccgaaatgctcacggaactggtgcctactcaggcggaacctgccgacctggagctgctgcaggaactcaatcggacttgtagagctatgcagcaacgcgtccttgagctgattccccagattgccaatgagcaactgactgaggaactgctgattgttaatgacaacctcaacaacgtgttcctgcgccacgagcgtttcgaacgtttcaggacagggcagaccacaaaagctccttccgaggcagaacctgctgcagacttgatcgatatgggacccgatccggctgccaccggaaacctttcatcacagctggccggatag

SEQ ID NO: 323218 - DNA, 1133 bp, Artificial Sequence
  derived and/or modified sequence
gagcttcgcggtgccaccgccccgcccacgcctcctcgccggcctccgagtgcgtcacgtgacgggtcggtggcgctggcggttgctgtcagctgattcccggggttggtggcagcggcggtagcagcaatggactttctcctggggaacccgttcagctctccagtgggacagcgcatcgagaaagccacagatggctccctgcagagcgaggactgggccctcaacatggagatctgcgacatcatcaacgagacggaggaaggtcccaaagatgccctccgagcagtaaagaagagaatcgtggggaataagaacttccacgaggtcttagaaacctgtgtcaagaactgcgggcaccgcttccacgtgctggtggccagccaggacttcgtggagagtgtgctggtgaggaccatcctgcccaagaacaacccacccaccatcgtgcatgacaaagtgctcaacctcatccagtcctgggctgacgcgttccgcagctcgcccgatctgacaggtgtggtcaccatctatgaggacctgcggaggaaaggcctggagttccccatgactgacctggacatgctgtcacccatccacacaccccagaggaccgtgttcaactcagagacacaatcaggacaggattctgtgggcactgactccagccagcaagaggactctggccagcatgctgcccctctgcccgccccgcccatactctccggtgacacgcccatagcaccaaccccggaacagattgggaagctgcgcagtgagctggagatggtgagtgggaacgtgagggtgatgtcggagatgctgacggagctggtgcccacccaggccgagcccgcagacctggagctgctgcaggagctcaaccgcacgtgccgagccatgcagcagcgggtcctggagctcatccctcagatcgccaatgagcagctgacagaggagctgctcatcgtcaatgacaatctcaacaatgtgttcctgcgccatgaacggtttgaacggttccgaacaggccagaccaccaaggccccaagtgaggccgagccggcagctgacctgatcgacatgggccctgacccagcagccaccggcaacctctcatcccagctggcagg

SEQ ID NO: 323219 - protein, 468 aa, Artificial Sequence
  derived and/or modified sequence
MAKRNAEKELTDRNWDQEDEAEEVGTFSMASEEVLKNRAIKKAKRRNVGFESDTGGAFKGFKGLVVPSGGGRFSGFGSGAGGKPLEGLSNGNNITSAPPFASAKAAADPKVAFGSLAANGPTTLVDKVSNPKTNGDSQQPSSSGLASSKACVGNAYHKQLAALNCSVRDWIVKHVNTNPLCDLTPIFKDYEKYLANIEQQHGNSGRNSESESNKVAAETQSPSLFGSTKLQQESTFLFHGNKTEDTPDKKMEVASEKKTDPSSLGATSASFNFGKKVDSSVLGSLSSVPLTGFSFSPGNSSLFGKDTTQSKPVSSPFPTKPLEGQAEGDSGECKGGDEEENDEPPKVVVTEVKEEDAFYSKKCKLFYKKDNEFKEKGIGTLHLKPTANQKTQLLVRADTNLGNILLNVLIPPNMPCTRTGKNNVLIVCVPNPPIDEKNATMPVTMLIRVKTSEDADELHKILLEKKDA

SEQ ID NO: 323220 - protein, 440 aa, Artificial Sequence
  derived and/or modified sequence
MASEEVLKNRAIKKAKRRNVGFESDTGGAFKGFKGLVVPSGGGRFSGFGSGAGGKPLEGLSNGNNITSAPPFASAKAAADPKVAFGSLAANGPTTLVDKVSNPKTNGDSQQPSSSGLASSKACVGNAYHKQLAALNCSVRDWIVKHVNTNPLCDLTPIFKDYEKYLANIEQQHGNSGRNSESESNKVAAETQSPSLFGSTKLQQESTFLFHGNKTEDTPDKKMEVASEKKTDPSSLGATSASFNFGKKVDSSVLGSLSSVPLTGFSFSPGNSSLFGKDTTQSKPVSSPFPTKPLEGQAEGDSGECKGGDEEENDEPPKVVVTEVKEEDAFYSKKCKLFYKKDNEFKEKGIGTLHLKPTANQKTQLLVRADTNLGNILLNVLIPPNMPCTRTGKNNVLIVCVPNPPIDEKNATMPVTMLIRVKTSEDADELHKILLEKKDA

SEQ ID NO: 323221 - protein, 178 aa, Artificial Sequence
  derived and/or modified sequence
MAKRNAEKELTDRNWDQEDEAEEVGTFSMASEEVLKNRAIKKAKRRNVGFESDTGGAFKGFKGLVVPSGGGRFSGFGSGAGGKPLEGLSNGNNITSAPPFASAKAAADPKVAFGGDEEENDEPPKVVVTEVKEEDAFYSKKCKLFYKKDNEFKEKGIGTLHLKPTANQKTQLLVRADT

SEQ ID NO: 323222 - protein, 45 aa, Artificial Sequence
  derived and/or modified sequence
MAKRNAEKELTDRNWDQEDEAEEVGTFSMASEEVLKNRAIKKAKR

SEQ ID NO: 323223 - protein, 218 aa, Artificial Sequence
  derived and/or modified sequence
MEVASEKKTDPSSLGATSASFNFGKKVDSSVLGSLSSVPLTGFSFSPGNSSLFGKDTTQSKPVSSPFPTKPLEGQAEGDSGECKGGDEEENDEPPKVVVTEVKEEDAFYSKKCKLFYKKDNEFKEKGIGTLHLKPTANQKTQLLVRADTNLGNILLNVLIPPNMPCTRTGKNNVLIVCVPNPPIDEKNATMPVTMLIRVKTSEDADELHKILLEKKDA

SEQ ID NO: 323224 - protein, 76 aa, Artificial Sequence
  derived and/or modified sequence
MAKRNAEKELTDRNWDQEDEAEEVGTFSMASEEVLKNRAIKKAKRRNVGFEVLLLQMALPPWLIKFQIPKLMGTVS

SEQ ID NO: 323225 - DNA, 1407 bp, Artificial Sequence
  derived and/or modified sequence
atggcgaaacgcaatgctgaaaaagaactgacagaccgcaactgggatcaagaggatgaggccgaagaggtagggacctttagcatggcctccgaagaagtcctgaagaatagagcgatcaagaaggcaaagagacggaacgtagggtttgaaagcgacactggcggggctttcaagggttttaaagggttagtggtcccctcaggcgggggacgcttttccggcttcgggagcggggcaggcggcaagccactcgagggattgtccaacggcaacaacattacgagcgcaccccctttcgctagcgcgaaagccgctgcagaccccaaagtggccttcggcagcctagccgctaatggtcccacgacccttgtggacaaagtgagcaacccaaagactaacggggactctcaacaaccatcctccagtggactcgccagtagcaaggcgtgtgttggcaacgcataccataagcagctagccgcgctcaactgttctgtaagagattggatcgttaagcacgtaaacaccaatccactttgtgacctaacccccatcttcaaagactacgagaagtacctcgcgaacattgaacaacagcatggcaattcaggtaggaatagtgagagcgaatcaaacaaggtcgccgcggagactcagtctccaagccttttcggatctaccaagctgcaacaagaatctacattcctgtttcacgggaataagaccgaggacacccccgacaaaaagatggaagtggcctcagaaaaaaaaacagatccctcatctctaggggctacatccgcgtcatttaactttgggaagaaagtagacagctccgtcctagggtccctttcctccgtgccactgacaggctttagcttcagcccgggaaattctagtttgttcgggaaagacaccacccagagcaaacctgtctcttctcctttccctactaagcctttagaaggccaggcggagggggacagtggggaatgtaaaggaggagacgaagaggagaacgacgagcctccgaaggtcgtagtgacagaggtgaaagaggaggatgcattttactctaagaaatgcaagctattttacaaaaaggataacgaatttaaggaaaagggcattggaaccctgcacctcaaacctactgcgaatcaaaagacacagttattggtacgcgctgataccaatctggggaacatcttgcttaatgtgcttataccacctaatatgccctgcacccgtacgggtaaaaacaatgtgttgatcgtatgtgtgcccaacccaccaatcgacgagaagaatgctaccatgccagtgaccatgctgatcagggttaagacctctgaggacgcagacgagctgcataagatacttctggaaaaaaaggatgcatag

SEQ ID NO: 323226 - DNA, 537 bp, Artificial Sequence
  derived and/or modified sequence
atggccaagcgtaacgcagagaaggagctgacggaccgtaactgggaccaggaagacgaggccgaggaggtgggcaccttttcgatggcctctgaagaggtactgaagaacagggccattaaaaaagcgaagaggaggaacgtggggtttgaatctgatactggcggggcttttaaaggattcaaaggcctagttgtccctagtggcggggggcgattctcggggtttggcagtggggccggtggcaagccactggaagggctgtcaaatggaaacaatatcacctccgcccctccgtttgcctcggccaaagctgctgcagatcccaaggtcgcatttggtggtgatgaagaggagaatgatgaacccccaaaggtagttgtgaccgaggttaaagaagaagacgcgttctactcgaaaaagtgtaagttattttacaagaaagataatgaatttaaagaaaaaggaattggtaccctgcatctcaagccaaccgccaaccagaaaacccagctactggtcagagccgatacctag

SEQ ID NO: 323227 - DNA, 138 bp, Artificial Sequence
  derived and/or modified sequence
atggcaaaacggaacgctgagaaggagctgacagatcgcaactgggatcaagaggacgaggctgaggaggtcggcacattctccatggcttccgaggaagtcctaaaaaaccgtgccattaaaaaggccaagcggtag

SEQ ID NO: 323228 - DNA, 231 bp, Artificial Sequence
  derived and/or modified sequence
atggccaaaagaaatgctgaaaaggaacttactgatcggaactgggatcaggaggatgaagcggaagaagtggggactttttcgatggcctccgaggaggttctcaagaacagggccataaagaaagccaaacggcggaatgtgggattcgaagtgttgctcctgcaaatggccctccctccttggctgattaaattccagattccgaaactgatgggtactgtctcctag

SEQ ID NO: 323229 - DNA, 33 bp, Artificial Sequence
  derived and/or modified sequence
atggctaagcggaacgccgaaaaagaactgtag

SEQ ID NO: 323230 - DNA, 1407 bp, Artificial Sequence
  derived and/or modified sequence
atggccaagagaaatgctgagaaggagctgacagacaggaactgggaccaggaggatgaagctgaggaggtgggcaccttctccatggccagcgaggaggtgctgaagaacagagccatcaagaaggccaagagaagaaatgtgggctttgaaagtgacaccggcggggccttcaagggcttcaagggcctggtggtgcccagcggcggcggccgcttcagcggcttcggcagcggggccggcggcaagcccctggagggcctgagcaatggaaacaacatcaccagcgcccccccatttgccagcgccaaggctgctgctgaccccaaggtggccttcggcagcctggccgccaacggccccaccaccctggtggacaaggtgagcaaccccaagaccaacggggacagccagcagcccagcagcagcggcctggccagcagcaaggcctgtgtgggcaatgcctaccacaagcagctggccgccctgaactgcagcgtgcgggactggatcgtgaagcacgtgaacaccaaccccctgtgtgacctgacccccatcttcaaggactatgagaagtacctggccaacatcgagcagcagcacggcaacagcggcaggaacagcgagagcgagagcaacaaggtggccgctgagacccagagccccagcctgtttggcagcaccaagctgcagcaggagagcaccttcctgttccacggcaacaagacagaggacaccccagacaagaagatggaggtggccagcgagaagaagacagaccccagcagcctgggcgccaccagcgccagcttcaactttgggaagaaggtggacagctctgtgctgggcagcctgagctctgtgcccctgaccggcttctccttcagccctggcaacagcagcctgtttgggaaggacaccacccagagcaagcctgtgagcagccccttccccaccaagcccctggagggccaggccgagggggacagcggggagtgcaagggaggagatgaggaggagaatgatgagccccccaaggtggtggtgacagaggtgaaggaggaggatgccttctacagcaagaagtgcaagctgttctacaagaaggacaatgagttcaaggagaagggcatcggcaccctgcacctgaagcccacagccaaccagaagacccagctgctggtgcgggctgacaccaacctgggcaacatcctgctgaatgtgctgatcccccccaacatgccctgcaccaggacaggcaagaacaacgtgctgattgtgtgtgtgcccaacccccccattgatgagaagaatgccaccatgcctgtgaccatgctgatccgggtgaagaccagtgaagatgctgatgagctgcacaagatcctgctggagaagaaggatgcctag

SEQ ID NO: 323231 - DNA, 537 bp, Artificial Sequence
  derived and/or modified sequence
atggccaagagaaatgctgagaaggagctgacagacaggaactgggaccaggaggatgaagctgaggaggtgggcaccttctccatggccagcgaggaggtgctgaagaacagagccatcaagaaggccaagagaagaaatgtgggctttgaaagtgacaccggcggggccttcaagggcttcaagggcctggtggtgcccagcggcggcggccgcttcagcggcttcggcagcggggccggcggcaagcccctggagggcctgagcaatggaaacaacatcaccagcgcccccccatttgccagcgccaaggctgctgctgaccccaaggtggcctttggaggagatgaggaggagaatgatgagccccccaaggtggtggtgacagaggtgaaggaggaggatgccttctacagcaagaagtgcaagctgttctacaagaaggacaatgagttcaaggagaagggcatcggcaccctgcacctgaagcccacagccaaccagaagacccagctgctggtgcgggctgacacctag

SEQ ID NO: 323232 - DNA, 138 bp, Artificial Sequence
  derived and/or modified sequence
atggccaagagaaatgctgagaaggagctgacagacaggaactgggaccaggaggatgaagctgaggaggtgggcaccttctccatggccagcgaggaggtgctgaagaacagagccatcaagaaggccaagaggtag

SEQ ID NO: 323233 - DNA, 231 bp, Artificial Sequence
  derived and/or modified sequence
atggccaagagaaatgctgagaaggagctgacagacaggaactgggaccaggaggatgaagctgaggaggtgggcaccttctccatggccagcgaggaggtgctgaagaacagagccatcaagaaggccaagagaagaaatgtgggctttgaggtgctgctgctgcagatggccctgcccccctggctgatcaagttccagatccccaagctgatgggcaccgtgtcctag

SEQ ID NO: 323234 - DNA, 33 bp, Artificial Sequence
  derived and/or modified sequence
atggccaagagaaatgctgagaaggagctgtag

SEQ ID NO: 323235 - DNA, 1407 bp, Artificial Sequence
  derived and/or modified sequence
atggccaagcggaacgccgagaaggagctgaccgaccggaactgggatcaggaagatgaggccgaggaggtcggaacattcagcatggcgtcagaggaagtcttgaaaaatcgggccatcaagaaagcgaagcgcagaaacgtaggcttcgaaagcgacactggaggggctttcaaagggtttaaggggcttgtggtacccagtggaggcggacgtttttcagggttcggctctggtgccgggggtaagcccctcgagggcctatccaacgggaacaacatcacttcagccccacctttcgccagcgccaaggctgctgctgacccgaaggtggcgtttggctccctagccgctaatgggccaactaccctggtggacaaggtgagtaacccaaagacaaatggagattcacagcagccgtcttcttcgggtcttgcatcatcaaaagcatgcgtgggaaatgcgtatcataaacagctcgcggctctcaactgctccgtgcgagattggattgttaaacatgtaaacacaaaccctttgtgcgatctgacccccatattcaaggactacgagaagtatctagccaatattgaacaacaacatggtaactcagggcggaactcagagagcgagtctaataaagtggccgccgagacacagtcccccagcctattcgggagtactaagctgcagcaagagagtaccttcctcttccatggcaataagacagaggatacacccgacaagaaaatggaggtcgcatccgaaaagaagaccgacccatcgagccttggagctaccagcgcttcttttaactttgggaaaaaagtagatagcagcgtgcttggcagtctcagctcagttcctctgaccggcttctccttctcacccgggaacagttcactgttcggaaaggacacaacccagtctaagcccgtgtcaagcccattccctactaagccattggagggccaggccgagggtgactccggagaatgcaaaggcggcgatgaggaggagaacgatgagccacccaaggtggttgtgaccgaggtgaaagaagaggacgcattctatagtaagaagtgcaagctcttttataaaaaagacaatgaatttaaagagaaagggatcggcactctgcatcttaagccaacagccaatcagaagacccaattactcgtgagagccgacacaaatcttggaaacatcctgttgaacgtccttatccccccaaacatgccctgtacgcggacagggaagaacaatgtgctgatagtatgtgtccccaaccccccgattgacgaaaagaatgccacgatgcctgttactatgttaatcagggtgaaaacatcggaggacgccgacgagttgcacaagatacttctggagaaaaaagacgcttag

SEQ ID NO: 323236 - DNA, 537 bp, Artificial Sequence
  derived and/or modified sequence
atggccaagcggaacgccgagaaggagctgaccgaccggaactgggaccaggaggacgaggcggaagaagttggtacttttagcatggcttccgaggaggtcctcaagaatcgggccattaaaaaggcaaagcgtcggaatgtaggcttcgaatcagacactggcggagctttcaaaggttttaaagggctggtcgtccccagcgggggaggaagattcagtgggtttggttctggcgcaggcggtaagccgttggaagggctgtccaacggtaacaacatcactagcgcaccgccgttcgcatccgccaaagccgccgccgaccctaaggtcgcgttcggcggcgatgaggaggagaatgatgagccacctaaagtggtggtcactgaagtgaaggaggaggacgctttctattcgaagaaatgtaaactgttctataagaaggacaacgagttcaaggagaagggaatcggcacccttcatctcaagccaactgctaatcaaaaaacccagctgctggtgagagccgacacatag

SEQ ID NO: 323237 - DNA, 138 bp, Artificial Sequence
  derived and/or modified sequence
atggccaagcggaacgccgagaaggagctgaccgaccggaactgggatcaggaggatgaggccgaggaagtagggactttttcgatggcatccgaggaggtattaaagaacagagccatcaaaaaggcaaagagatag

SEQ ID NO: 323238 - DNA, 231 bp, Artificial Sequence
  derived and/or modified sequence
atggccaagcggaacgccgagaaggagctgaccgaccggaactgggaccaggaggacgaggccgaggaagtgggcaccttctcaatggcttctgaagaagtgttgaagaatcgggccatcaaaaaggccaagagacggaacgtgggctttgaagttctcctgctgcagatggctctgcctccctggctgattaagtttcaaattcccaagctaatgggtacagtgtcatag

SEQ ID NO: 323239 - DNA, 33 bp, Artificial Sequence
  derived and/or modified sequence
atggccaagcggaacgccgagaaggagctgtag

SEQ ID NO: 323240 - DNA, 5229 bp, Artificial Sequence
  derived and/or modified sequence
agccccgcgccggtttccagggagctgggcgcatgcgccgcgtaaggggcccggccggcggaaggaggtgctactgccggaagcgccggcgcgcttgcgcagtagctgaacgcgggcgtttctttcctccctttttttcgaattggttttgggggtagattcgagttacaaaatggccgcccggagcgtgttcggcgcggttcccccagctgtctctggctgaaccggcgctctcgcctccctgccgaacacagcgtgaggagcccccccagggatatggtgtttgagtctctgggcttgccgagcactaagtcctctgagttccgcagcgcagcaccggaagcggccgagcgcgctcagcccggcgacccctgcgggctccagacccctgcgccgctgcgccccgggtttcgccgcaaccaagacccagcgagtgcagcggcggccgccgaggaggttcgaaaacatggccaaaagaaatgccgagaaggaactgacagataggaattgggatcaagaagatgaagctgaagaggtgggaacattctccatggccagtgaggaagtcttgaagaatagagccataaagaaagcaaagcgcagaaatgttggatttgaatctgacactggaggagcctttaaaggttttaaaggtttggtggtaccttctggaggaggacgcttttctggatttggtagtggcgctggagggaagcctttggaaggactgtcgaatggaaacaacataaccagtgcccctcccttcgccagtgcaaaggcagcggcagatcccaaggtagcctttggttctcttgctgcaaatggccctaccaccttggttgataaagtttcaaatcccaaaactaatggggacagtcagcagccctcctcctctggccttgcttccagtaaagcttgtgtcggaaatgcctatcacaagcagttggccgccttgaactgctccgtgcgggattggatagtgaagcacgtgaatacaaaccccctctgtgatctgacacctatctttaaagactatgagaaatatttagcaaacattgaacagcaacacgggaacagtggcaggaattctgaaagtgaatctaacaaagtggcagctgaaacacagtctccttccctttttggctcaacaaaattacagcaagagtcaacgtttttgtttcatggcaacaaaactgaagatacacctgacaagaagatggaggtggcatctgaaaagaaaacggacccatcatcactaggagcgacaagtgcctcatttaatttcggcaagaaagttgatagctctgttttgggctcattaagctctgtccccctgactggattttctttctcccctggaaactccagtttatttggcaaagatactacccagagtaaaccagtctcttcaccatttcccactaaaccattggagggccaagcagaaggtgacagtggtgaatgcaaaggtggagatgaagaagagaatgatgagccacccaaagtagtagttaccgaagtaaaagaagaagatgctttttactccaaaaagtgtaaactgttttacaagaaagacaatgagtttaaagagaaaggcataggtactctgcatttaaaacctacagcaaatcagaagacacagcttttggtgcgggcagacaccaatttaggcaacatattgctgaacgttctgattccacccaatatgccatgtacgcgaacagggaagaataacgttcttatcgtctgtgttccaaatccaccaattgacgagaagaatgccaccatgccagtcaccatgttgattcgggtaaaaaccagcgaggatgcagacgagttgcacaaaattttactggagaaaaaggatgcctgaacacgcaaagtcggctgcagaattattgccaagttgctgctgcttccaccgccccttaaagttagtcagtttttcttctcttctttgacattctaagaacttatagataacttaaaacttttgtgaggaagattaatgtggccaataaaacctttaaatgttaagtgtcaagaaactgcactctcccttcttaagaactgcctaaagtgtaaaatacatttgaatgcaatttttggaagattttttaatgttcgtttattaaactaaccctaagtgatttcttcaaggactgcaatcagggtatcaatttgctttcccaaaggctcttccaacccgtgggttttggggtccaccgccaccacgagagaggcttttgaacaggtgcctggctgtgttcagaaggaagctggcctgtgtgcttctctccggtgggctcagccgacgtgtgagacttgttctgttaccaaatgaaccgggctgccacgctgtgacaggcgtttgtcctctgctttatttttactttgaagctcaaatgcgagtactaagtgttcacctcagcgttcgaatcattggcctgtaaccctgtgggctgcttcacgagaattcaggacctgcattttcattctaaaaagaaatgaacagcttgtgaaggagttttttggcttcatagtttctattcatgaggtagtgttacttctttatccccctaaagacaaaatgaagataaagggggattgccaggaatgggtttaaaagcacaaatgtggtagcttatcatctacaccatggagagtgaacccttacgaaatgaaagtcaaatgagaccatccgagaaaaagatgcgcataggcatttgtaccatgatcaaccccacgcacatgaaaactgtgaccaagtgacgtgcctgggagctttgacacacgagccgtgtgaattcactaggaaacatgtaataaagtcatggaagagaaaatcgtgtgtaaactttgcctttaactttagaccgcagtatattataatacatttgatatctgaaatatctttacttttttaagagtaagattccatatgtctgtctggaagggagccatggttattcacacgaatatccctgtcacttctccagaggtgtcaggtaactaacacgagcattctttgaagactctgggcacatgaatgatacacagaattgaatgtttaaatttccactgagtcctcatgaatcatttgagactagtaccagctgatcttgtgtacaggctcagggtcagtgcccaagggctcccgcgtgtgtgttctgatcttcagtgcgtagcacattctccatttagaaaagagtggtcagaataattgtggacggtacagtggctttttaaaactacagtctttaggtgtaaggtttggcgccgggagcaattttatgatcaaatatgatgaactcctaagtcactgaggtgtgattgggccaatgttggcatgaggttcttgctctacttccagtgttttgattccactgggagaatttggcctagtgtgtggctttggatgaatccgtgtagagagaggtgagcttgtcctgttacagatgctgtcagacatagcgatagtaggcacctagggaggaagtggccgttagttttacactgactttttaagaatggagaatgcacgtgggtttctgttgcggatgattcatagtaagcaagcggttgatgctgttaataccggccccacccgattgacattaagtttattcagcttttaaaaagatgaagaactaaggggaacaaatttaagtttgttgcaacttagccacacatgcttccctggtaccagctggaatcagcagctcacaggcatcttcaggacacttcagtgtatatgacacagtactttgttagcgtctgcgtgtgtatggaaagttgacaaaaaatggcatgaaaagatcatgattggattttcttttaaacctgcccttctgtaaaaaatagtttatatatttttaaattagtaggtatgtgtggcttccttttttcctaacattcccagcaaatttttgctgctaagactatcactgttaaagtgaaaattacagggaaaaatgtgatgaatataccgtaactcaaaatgtgatattttcttaaaatcactcttttatgctttaggaactggttggtctccactttgattattagtgtaaagagcctgagtatacgtggatttcattgtaaaatttaactccttgtcttttacttggggcacggggcccctggagggcttccctactttccccactatgttaacaggtaattctgatttatgcgtttagtttgacttatttttaacaaaatattagaagttatgctttaaaatgtttaatgtggactgaaattttcatcttttgtttgagaatctatgaagtgtatcatatacgtggcctaaagcaaggtgtgtattttgttattctgaaattgttttgcatctggacaaatactaaatatcccagtggcctttttttttttttttttaaaacctgtgtatccatctcatccttttgcgcattcctagtaagcaaaaaaatttgttatgccatcttcattattcgaattacagactgaaaaaatatggccagtttttaaagaagtttagattatgttttccatggaaggacaagtctgactgttcataggctgattttctttaagaggattattctgttttacaatttcaattctagatcacattttatatatgctgcatgccaaaaaaaaaaaaaagagaaaactgccttttctggtgtggaggggaagaaaaactaatattctaccttactagtagagttcaaaacaagttttcactgagagccttttcagtaaaagttaaacaagtttgttttttgagcatttgtcagttattctatttcagaagagtcaaaattcaagcacgatacattttgaaggctttgcaaactcctaaacccctgatgagtcctctcattctggaagtgggaatttgagtagatactgatttgtcccgtagtatggcagatgacagggaggtcttttccaagcaggcactcagaacacaggtcaccgtatgttctcagccagtaacaatcatactgaggacgaaggactctccgtttgatgcagacacaattgtaatggagatgtaaaacttcttagcaatcagatggataaattgtttgctttttactttaaataggaaattgttttctaaaactaaaatacttgaattgtcagacaatataatctcagcttgtattagtttttgaatgctcccatcgaggaagtgtaacaatccatgaaatgtgaataaatgaaaagtaaacaaaa

SEQ ID NO: 323241 - DNA, 1895 bp, Artificial Sequence
  derived and/or modified sequence
ggggtgggatgacagcggcgacgcagccccggctgtttttgaagcggggcccgggccccaccgggctgcggcgtccgactcgagtgagactctcccctgcggccccgccggaggttcgaaaacatggccaaaagaaatgccgagaaggaactgacagataggaattgggatcaagaagatgaagctgaagagggtaaaagaagggctataaactaaagccgaagatattcagcagctttctgacgtggacatcagaagtgtggacatgagtgtgctttgagcgcactgtggaagagcagtggttgtccagcaaggtcctaggtgcctccgtggcctttcgtacagtgggcaagttgggcaggactcatcttaaaaatcatgtgtgggaacattctccatggccagtgaggaagtcttgaagaatagagccataaagaaagcaaagcgcagaaatgttggatttgaatctgacactggaggagcctttaaaggttttaaaggtttggtggtaccttctggaggaggacgcttttctggatttggtagtggcgctggagggaagcctttggaaggactgtcgaatggaaacaacataaccagtgcccctcccttcgccagtgcaaaggcagcggcagatcccaaggtagcctttggttctcttgctgcaaatggccctaccaccttggttgataaagtttcaaatcccaaaactaatggggacagtcagcagccctcctcctctggccttgcttccagtaaagcttgtgtcggaaatgcctatcacaagcagttggccgccttgaactgctccgtgcgggattggatagtgaagcacgtgaatacaaaccccctctgtgatctgacacctatctttaaagactatgagaaatatttagcaaacattgaacagcaacacgggaacagtggcaggaattctgaaagtgaatctaacaaagtggcagctgaaacacagtctccttccctttttggctcaacaaaattacagcaagagtcaacgtttttgtttcatggcaacaaaactgaagatacacctgacaagaagatggaggtggcatctgaaaagaaaacggacccatcatcactaggagcgacaagtgcctcatttaatttcggcaagaaagttgatagctctgttttgggctcattaagctctgtccccctgactggattttctttctcccctggaaactccagtttatttggcaaagatactacccagagtaaaccagtctcttcaccatttcccactaaaccattggagggccaagcagaaggtgacagtggtgaatgcaaaggtggagatgaagaagagaatgatgagccacccaaagtagtagttaccgaagtaaaagaagaagatgctttttactccaaaaagtgtaaactgttttacaagaaagacaatgagtttaaagagaaaggcataggtactctgcatttaaaacctacagcaaatcagaagacacagcttttggtgcgggcagacaccaatttaggcaacatattgctgaacgttctgattccacccaatatgccatgtacgcgaacagggaagaataacgttcttatcgtctgtgttccaaatccaccaattgacgagaagaatgccaccatgccagtcaccatgttgattcgggtaaaaaccagcgaggatgcagacgagttgcacaaaattttactggagaaaaaggatgcctgaacacgcaaagtcggctgcagaattattgccaagttgctgctgcttccaccgccccttaaagttagtcagtttttcttctcttctttgacattctaagaacttatagataacttaaaacttttgtgaggaagattaatgtggccaataaaacctttaaatgttaagtgtcaagaaa

SEQ ID NO: 323242 - DNA, 2059 bp, Artificial Sequence
  derived and/or modified sequence
gttttgggggtagattcgagttacaaaatggccgcccggagcgtgttcggcgcggttcccccagctgtctctggctgaaccggcgctctcgcctccctgccgaacacagcgtgaggagcccccccagggatatggtgtttgagtctctgggcttgccgagcactaagtcctctgagttccgcagcgcagcaccggaagcggccgagcgcgctcagcccggcgacccctgcgggctccagacccctgcgccgctgcgccccgggtttcgccgcaaccaagacccagcgagtgcagcggcggccgccgaggaggttcgaaaacatggccaaaagaaatgccgagaaggaactgacagataggaattgggatcaagaagatgaagctgaagagggtaaaagaagggctataaactaaagccgaagatattcagcagctttctgacgtggacatcagaagtgtggacatgagtgtgctttgagcgcactgtggaagagcagtggttgtccagcaaggtcctaggtgcctccgtggcctttcgtacagtgggtgggaacattctccatggccagtgaggaagtcttgaagaatagagccataaagaaagcaaagcgcagaaatgttggatttgaatctgacactggaggagcctttaaaggttttaaaggtttggtggtaccttctggaggaggacgcttttctggatttggtagtggcgctggagggaagcctttggaaggactgtcgaatggaaacaacataaccagtgcccctcccttcgccagtgcaaaggcagcggcagatcccaaggtagcctttggttctcttgctgcaaatggccctaccaccttggttgataaagtttcaaatcccaaaactaatggggacagtcagcagccctcctcctctggccttgcttccagtaaagcttgtgtcggaaatgcctatcacaagcagttggccgccttgaactgctccgtgcgggattggatagtgaagcacgtgaatacaaaccccctctgtgatctgacacctatctttaaagactatgagaaatatttagcaaacattgaacagcaacacgggaacagtggcaggaattctgaaagtgaatctaacaaagtggcagctgaaacacagtctccttccctttttggctcaacaaaattacagcaagagtcaacgtttttgtttcatggcaacaaaactgaagatacacctgacaagaagatggaggtggcatctgaaaagaaaacggacccatcatcactaggagcgacaagtgcctcatttaatttcggcaagaaagttgatagctctgttttgggctcattaagctctgtccccctgactggattttctttctcccctggaaactccagtttatttggcaaagatactacccagagtaaaccagtctcttcaccatttcccactaaaccattggagggccaagcagaaggtgacagtggtgaatgcaaaggtggagatgaagaagagaatgatgagccacccaaagtagtagttaccgaagtaaaagaagaagatgctttttactccaaaaagtgtaaactgttttacaagaaagacaatgagtttaaagagaaaggcataggtactctgcatttaaaacctacagcaaatcagaagacacagcttttggtgcgggcagacaccaatttaggcaacatattgctgaacgttctgattccacccaatatgccatgtacgcgaacagggaagaataacgttcttatcgtctgtgttccaaatccaccaattgacgagaagaatgccaccatgccagtcaccatgttgattcgggtaaaaaccagcgaggatgcagacgagttgcacaaaattttactggagaaaaaggatgcctgaacacgcaaagtcggctgcagaattattgccaagttgctgctgcttccaccgccccttaaagttagtcagtttttcttctcttctttgacattctaagaacttatagataacttaaaacttttgtgaggaagattaatgtggccaataaaacctttaaatgttaagtgtcaagaaa

SEQ ID NO: 323243 - DNA, 584 bp, Artificial Sequence
  derived and/or modified sequence
agattcgagttacaaaatggccgcccggagcgtgttcggcgcggttcccccagctgtctctggctgaaccggcgctctcgcctccctgccgaacacagcgtgaggagcccccccagggatatggtgtttgagtctctgggcttgccgagcactaagtcctctgagttccgcagcgcagcaccggaagcggccgagcgcgctcagcccggcgacccctgcgggctccagacccctgcgccgctgcgccccgggtttcgccgcaaccaagacccagcgagtgcagcggcggccgccgaggaggttcgaaaacatggccaaaagaaatgccgagaaggaactgacagataggaattgggatcaagaagatgaagctgaagagggtaaaagaagggctataaactaaagccgaagatattcagcagctttctgacgtggacatcagaagtgtggacatgagtgtgctttgagcgcactgtggaagagcagtggttgtccagcaaggtcctaggtgcctccgtggcctttcgtacagtgggcaagttgggtgggaacattctccatggccagtgaggaagtcttgaaga

SEQ ID NO: 323244 - DNA, 543 bp, Artificial Sequence
  derived and/or modified sequence
cgaaaacatggccaaaagaaatgccgagaaggaactgacagataggaattgggatcaagaagatgaagctgaagaggtgggaacattctccatggccagtgaggaagtcttgaagaatagagccataaagaaagcaaagcgcagaaatgttggatttgaatctgacactggaggagcctttaaaggttttaaaggtttggtggtaccttctggaggaggacgcttttctggatttggtagtggcgctggagggaagcctttggaaggactgtcgaatggaaacaacataaccagtgcccctcccttcgccagtgcaaaggcagcggcagatcccaaggtagcctttggtggagatgaagaagagaatgatgagccacccaaagtagtagttaccgaagtaaaagaagaagatgctttttactccaaaaagtgtaaactgttttacaagaaagacaatgagtttaaagagaaaggcataggtactctgcatttaaaacctacagcaaatcagaagacacagcttttggtgcgggcagacaccaa

SEQ ID NO: 323245 - DNA, 579 bp, Artificial Sequence
  derived and/or modified sequence
ttttgggggtagattcgagttacaaaatggccgcccggagcgtgttcggcgcggttcccccagctgtctctggctgaaccggcgctctcgcctccctgccgaacacagcgtgaggagcccccccagggatatggtgtttgagtctctgggcttgccgagcactaagtcctctgagttccgcagcgcagcaccggaagcggccgagcgcgctcagcccggcgacccctgcgggctccagacccctgcgccgctgcgccccgggtttcgccgcaaccaagacccagcgagtgcagcggcggccgccgaggagatggagtcttgctctgtcacataggctggagtgcattggcgcgatctcagctcactgcaacctccacctcctgggttcaagagattctcctgcctcagcctccggagtagctgggattacaggttcgaaaacatggccaaaagaaatgccgagaaggaactgacagataggaattgggatcaagaagatgaagctgaagaggtgggaacattctccatggccagtgaggaagtcttgaagaatagagccataaagaaagcaaagcgcag

SEQ ID NO: 323246 - DNA, 537 bp, Artificial Sequence
  derived and/or modified sequence
ttcgagttacaaaatggccgcccggagcgtgttcggcgcggttcccccagctgtctctggctgaaccggcgctctcgcctccctgccgaacacagcgtgaggagcccccccagggatatggtgtttgagtctctgggcttgccgagcactaagtcctctgagttccgcagcgcagcaccggaagcggccgagcgcgctcagcccggcgacccctgcgggctccagacccctgcgccgctgcgccccgggtttcgccgcaaccaagacccagcgagtgcagcggcggccgccgaggaggttcgaaaacatggccaaaagaaatgccgagaaggaactgacagataggaattgggatcaagaagatgaagctgaagaggtgggaacattctccatggccagtgaggaagtcttgaagaatagagccataaagaaagcaaagcgcagaaatgttggatttgaagttctcttgctgcaaatggccctaccaccttggttgataaagtttcaaatcccaaaactaatggggacagtcagcag

SEQ ID NO: 323247 - DNA, 1407 bp, Artificial Sequence
  derived and/or modified sequence
atggcgaaacgcaatgccgagaaggagctgactgatagaaactgggatcaggaagatgaggcggaggaagtcggtacctttagcatggcaagcgaagaggtcttaaaaaatagagctatcaaaaaggctaagcgtaggaatgttgggttcgagagcgacactggaggagccttcaaagggttcaagggtcttgtagtaccatcgggaggcggtcggtttagcggattcggaagcggggcaggagggaagcctctggaggggctgtccaatggcaacaacatcacctccgcccctcccttcgcctcggcaaaggccgctgccgatcccaaggtggcctttggctcactggcagcaaacggccctactacactggtggacaaagtgagcaatcccaaaacgaacggagactctcaacagccaagctccagcggccttgcaagtagtaaggcctgcgtggggaatgcctaccacaagcaactggctgcccttaattgcagtgtccgggactggattgttaagcacgtgaacaccaaccccctatgcgatctaactccaatcttcaaggactacgagaagtacctagccaacatagagcagcagcacggtaattctgggaggaattcagaaagtgaaagcaataaggtggcagccgagacccaatctcctagtctcttcggcagcaccaagctccaacaggagtctacctttctcttccatggcaataagacagaggacactcccgataagaaaatggaagtggcttcggaaaaaaagactgatccgtcctcccttggcgctacctccgccagctttaacttcgggaaaaaggtggattctagcgttttgggtagcctgtcatcagttccgctgacgggtttttccttctcacctggcaactccagtctgttcggcaaggacacaacgcagagtaagcctgtgtcatctcccttccctactaagccactcgaggggcaggcagagggagattctggagagtgtaagggaggcgacgaagaggaaaatgacgaaccaccaaaggtcgtagtgacggaggtgaaggaggaggacgccttctattcaaaaaaatgcaagttattctataagaaggacaatgaattcaaggaaaaaggcattggaactttacatcttaagccaacggccaaccagaagacccagctgttggtgcgcgctgatacaaacctgggaaatattcttctgaatgtcctgatcccccctaacatgccctgtactagaaccggaaagaataatgtcttaattgtgtgcgtgccgaatcctcctatagatgagaaaaatgcaactatgccagtaacgatgcttattcgggtgaaaacaagcgaagatgccgacgaactgcataagattctgctcgaaaagaaagatgcctag

SEQ ID NO: 323248 - DNA, 537 bp, Artificial Sequence
  derived and/or modified sequence
atggccaaacggaacgctgagaaggaactcaccgacagaaactgggaccaggaggatgaagccgaggaagtgggcacatttagtatggctagcgaggaagtgctgaaaaacagagctattaagaaagctaagcgacggaatgtgggctttgaaagtgacaccggaggagcctttaagggatttaaagggctggttgttcctagtggcggaggcaggtttagcggtttcggcagtggagctgggggaaagccactagaggggctgagcaatgggaacaacatcacatctgcaccaccattcgctagcgctaaggcagccgcagatccaaaggttgcctttggaggggacgaagaagagaacgacgaaccccctaaggtggtggtcactgaggtaaaagaggaggatgcgttctattccaagaaatgtaaactattttacaagaaggataatgagttcaaagagaaaggtatcggcacgttgcatctcaaacctactgccaaccagaaaacccagctcctcgttcgggcagacacgtag

SEQ ID NO: 323249 - DNA, 138 bp, Artificial Sequence
  derived and/or modified sequence
atggcaaaaaggaatgccgagaaggaattaacagaccggaattgggaccaagaagacgaggctgaagaggtgggaacattttccatggcatccgaagaggtcttgaagaatcgagctataaaaaaggcgaagcgctag

SEQ ID NO: 323250 - DNA, 231 bp, Artificial Sequence
  derived and/or modified sequence
atggcaaagaggaatgcagagaaagagctgaccgaccgcaactgggatcaggaggatgaggccgaagaagtagggacatttagcatggccagtgaagaagtgctgaaaaatcgagctattaaaaaggcaaagcgacgtaatgtgggtttcgaagtcttgctactccaaatggccctccccccttggctgataaaattccaaattcctaaattgatgggcacggtttcatag

SEQ ID NO: 323251 - DNA, 33 bp, Artificial Sequence
  derived and/or modified sequence
atggcaaaacgaaacgcggaaaaagagctatag

SEQ ID NO: 323252 - DNA, 1407 bp, Artificial Sequence
  derived and/or modified sequence
atggccaagagaaacgccgagaaggagctgaccgacagaaactgggaccaggaggacgaggccgaggaggtgggcaccttcagcatggccagcgaggaggtgctgaagaacagagccatcaagaaggccaagagaagaaacgtgggcttcgagagcgacaccggcggcgccttcaagggcttcaagggcctggtggtgcccagcggcggcggcagattcagcggcttcggcagcggcgccggcggcaagcccctggagggcctgagcaacggcaacaacatcaccagcgccccccccttcgccagcgccaaggccgccgccgaccccaaggtggccttcggcagcctggccgccaacggccccaccaccctggtggacaaggtgagcaaccccaagaccaacggcgacagccagcagcccagcagcagcggcctggccagcagcaaggcctgcgtgggcaacgcctaccacaagcagctggccgccctgaactgcagcgtgagagactggatcgtgaagcacgtgaacaccaaccccctgtgcgacctgacccccatcttcaaggactacgagaagtacctggccaacatcgagcagcagcacggcaacagcggcagaaacagcgagagcgagagcaacaaggtggccgccgagacccagagccccagcctgttcggcagcaccaagctgcagcaggagagcaccttcctgttccacggcaacaagaccgaggacacccccgacaagaagatggaggtggccagcgagaagaagaccgaccccagcagcctgggcgccaccagcgccagcttcaacttcggcaagaaggtggacagcagcgtgctgggcagcctgagcagcgtgcccctgaccggcttcagcttcagccccggcaacagcagcctgttcggcaaggacaccacccagagcaagcccgtgagcagccccttccccaccaagcccctggagggccaggccgagggcgacagcggcgagtgcaagggcggcgacgaggaggagaacgacgagccccccaaggtggtggtgaccgaggtgaaggaggaggacgccttctacagcaagaagtgcaagctgttctacaagaaggacaacgagttcaaggagaagggcatcggcaccctgcacctgaagcccaccgccaaccagaagacccagctgctggtgagagccgacaccaacctgggcaacatcctgctgaacgtgctgatcccccccaacatgccctgcaccagaaccggcaagaacaacgtgctgatcgtgtgcgtgcccaacccccccatcgacgagaagaacgccaccatgcccgtgaccatgctgatcagagtgaagaccagcgaggacgccgacgagctgcacaagatcctgctggagaagaaggacgcctag

SEQ ID NO: 323253 - DNA, 537 bp, Artificial Sequence
  derived and/or modified sequence
atggccaagagaaacgccgagaaggagctgaccgacagaaactgggaccaggaggacgaggccgaggaggtgggcaccttcagcatggccagcgaggaggtgctgaagaacagagccatcaagaaggccaagagaagaaacgtgggcttcgagagcgacaccggcggcgccttcaagggcttcaagggcctggtggtgcccagcggcggcggcagattcagcggcttcggcagcggcgccggcggcaagcccctggagggcctgagcaacggcaacaacatcaccagcgccccccccttcgccagcgccaaggccgccgccgaccccaaggtggccttcggcggcgacgaggaggagaacgacgagccccccaaggtggtggtgaccgaggtgaaggaggaggacgccttctacagcaagaagtgcaagctgttctacaagaaggacaacgagttcaaggagaagggcatcggcaccctgcacctgaagcccaccgccaaccagaagacccagctgctggtgagagccgacacctag

SEQ ID NO: 323254 - DNA, 138 bp, Artificial Sequence
  derived and/or modified sequence
atggccaagagaaacgccgagaaggagctgaccgacagaaactgggaccaggaggacgaggccgaggaggtgggcaccttcagcatggccagcgaggaggtgctgaagaacagagccatcaagaaggccaagagatag

SEQ ID NO: 323255 - DNA, 231 bp, Artificial Sequence
  derived and/or modified sequence
atggccaagagaaacgccgagaaggagctgaccgacagaaactgggaccaggaggacgaggccgaggaggtgggcaccttcagcatggccagcgaggaggtgctgaagaacagagccatcaagaaggccaagagaagaaacgtgggcttcgaggtgctgctgctgcagatggccctgcccccctggctgatcaagttccagatccccaagctgatgggcaccgtgagctag

SEQ ID NO: 323256 - DNA, 33 bp, Artificial Sequence
  derived and/or modified sequence
atggccaagagaaacgccgagaaggagctgtag

SEQ ID NO: 323257 - protein, 165 aa, Artificial Sequence
  derived and/or modified sequence
MKEDQVVAEEPGFQDEEESLFQDIDLLQKHGINVADIKKLKSVGICTIKGIQMTTRRALCNVKGLSEAKVDKIKEAANKLIEPGFLTAFEYSEKRKMVFHITTGSQEFDKLLGGGIESMAITEAFGEFRTGKTQLSHTLCVTAQLPGAGGYPGGKIIFIDTENTL

SEQ ID NO: 323258 - protein, 586 aa, Artificial Sequence
  derived and/or modified sequence
MSRESDVEAQQSHGSSACSQPHGSVTQSQGSSSQSQGISSSSTSTMPNSSQSSHSSSGTLSSLETVSTQELYSIPEDQEPEDQEPEEPTPAPWARLWALQDGFANLETESGHVTQSDLELLLSSDPPASASQSAGIRGVRHHPRPVCSLKCVNDNYWFGRDKSCEYCFDEPLLKRTDKYRTYSKKHFRIFREVGPKNSYIAYIEDHSGNGTFVNTELVGKGKRRPLNNNSEIALSLSRNKVFVFFDLTVDDQSVYPKALRDEYIMSKTLGSGACGEVKLAFERKTCKKVAIKIISKRKFAIGSAREADPALNVETEIEILKKLNHPCIIKIKNFFDAEDYYIVLELMEGGELFDKVVGNKRLKEATCKLYFYQMLLAVQYLHENGIIHRDLKPENVLLSSQEEDCLIKITDFGHSKILGETSLMRTLCGTPTYLAPEVLVSVGTAGYNRAVDCWSLGVILFICLSGYPPFSEHRTQVSLKDQITSGKYNFIPEVWAEVSEKALDLVKKLLVVDPKARFTTEEALRHPWLQDEDMKRKFQDLLSEENESTALPQVLAQPSTSRKRPREGEAEGAETTKRPAVCAAVL

SEQ ID NO: 323259 - protein, 322 aa, Artificial Sequence
  derived and/or modified sequence
MSKTLGSGACGEVKLAFERKTCKKVAIKIISKRKFAIGSAREADPALNVETEIEILKKLNHPCIIKIKNFFDAEDYYIVLELMEGGELFDKVVGNKRLKEATCKLYFYQMLLAVQYLHENGIIHRDLKPENVLLSSQEEDCLIKITDFGHSKILGETSLMRTLCGTPTYLAPEVLVSVGTAGYNRAVDCWSLGVILFICLSGYPPFSEHRTQVSLKDQITSGKYNFIPEVWAEVSEKALDLVKKLLVVDPKARFTTEEALRHPWLQDEDMKRKFQDLLSEENESTALPQVLAQPSTSRKRPREGEAEGAETTKRPAVCAAVL

SEQ ID NO: 323260 - DNA, 1761 bp, Artificial Sequence
  derived and/or modified sequence
atgagcagagagagcgacgtggaggcccagcagagccacggcagcagcgcctgcagccagccccacggcagcgtgacccagagccagggcagcagcagccagagccagggcatcagcagcagcagcaccagcaccatgcccaacagcagccagagcagccacagcagcagcggcaccctgagcagcctggagaccgtgagcacccaggagctgtacagcatccccgaggaccaggagcccgaggaccaggagcccgaggagcccacccccgccccctgggccagactgtgggccctgcaggacggcttcgccaacctggagaccgagagcggccacgtgacccagagcgacctggagctgctgctgagcagcgacccccccgccagcgccagccagagcgccggcatcagaggcgtgagacaccaccccagacccgtgtgcagcctgaagtgcgtgaacgacaactactggttcggcagagacaagagctgcgagtactgcttcgacgagcccctgctgaagagaaccgacaagtacagaacctacagcaagaagcacttcagaatcttcagagaggtgggccccaagaacagctacatcgcctacatcgaggaccacagcggcaacggcaccttcgtgaacaccgagctggtgggcaagggcaagagaagacccctgaacaacaacagcgagatcgccctgagcctgagcagaaacaaggtgttcgtgttcttcgacctgaccgtggacgaccagagcgtgtaccccaaggccctgagagacgagtacatcatgagcaagaccctgggcagcggcgcctgcggcgaggtgaagctggccttcgagagaaagacctgcaagaaggtggccatcaagatcatcagcaagagaaagttcgccatcggcagcgccagagaggccgaccccgccctgaacgtggagaccgagatcgagatcctgaagaagctgaaccacccctgcatcatcaagatcaagaacttcttcgacgccgaggactactacatcgtgctggagctgatggagggcggcgagctgttcgacaaggtggtgggcaacaagagactgaaggaggccacctgcaagctgtacttctaccagatgctgctggccgtgcagtacctgcacgagaacggcatcatccacagagacctgaagcccgagaacgtgctgctgagcagccaggaggaggactgcctgatcaagatcaccgacttcggccacagcaagatcctgggcgagaccagcctgatgagaaccctgtgcggcacccccacctacctggcccccgaggtgctggtgagcgtgggcaccgccggctacaacagagccgtggactgctggagcctgggcgtgatcctgttcatctgcctgagcggctacccccccttcagcgagcacagaacccaggtgagcctgaaggaccagatcaccagcggcaagtacaacttcatccccgaggtgtgggccgaggtgagcgagaaggccctggacctggtgaagaagctgctggtggtggaccccaaggccagattcaccaccgaggaggccctgagacacccctggctgcaggacgaggacatgaagagaaagttccaggacctgctgagcgaggagaacgagagcaccgccctgccccaggtgctggcccagcccagcaccagcagaaagagacccagagagggcgaggccgagggcgccgagaccaccaagagacccgccgtgtgcgccgccgtgctgtag

SEQ ID NO: 323261 - DNA, 1971 bp, Artificial Sequence
  derived and/or modified sequence
atctgcaggtttagcgccactctgctggctgaggctgcggagagtgtgcggctccaggtgggctcacgcggtcgtgatgtctcgggagtcggatgttgaggctcagcagtctcatggcagcagtgcctgttcacagccccatggcagcgttacccagtcccaaggctcctcctcacagtcccagggcatatccagctcctctaccagcacgatgccaaactccagccagtcctctcactccagctctgggacactgagctccttagagacagtgtccactcaggaactctattctattcctgaggaccaagaacctgaggaccaagaacctgaggagcctacccctgccccctgggctcgattatgggcccttcaggatggatttgccaatcttgagacagagtctggccatgttacccaatctgatcttgaactcctgctgtcatctgatcctcctgcctcagcctcccaaagtgctgggataagaggtgtgaggcaccatccccggccagtttgcagtctaaaatgtgtgaatgacaactactggtttgggagggacaaaagctgtgaatattgctttgatgaaccactgctgaaaagaacagataaataccgaacatacagcaagaaacactttcggattttcagggaagtgggtcctaaaaactcttacattgcatacatagaagatcacagtggcaatggaacctttgtaaatacagagcttgtagggaaaggaaaacgccgtcctttgaataacaattctgaaattgcactgtcactaagcagaaataaagtttttgtcttttttgatctgactgtagatgatcagtcagtttatcctaaggcattaagagatgaatacatcatgtcaaaaactcttggaagtggtgcctgtggagaggtaaagctggctttcgagaggaaaacatgtaagaaagtagccataaagatcatcagcaaaaggaagtttgctattggttcagcaagagaggcagacccagctctcaatgttgaaacagaaatagaaattttgaaaaagctaaatcatccttgcatcatcaagattaaaaacttttttgatgcagaagattattatattgttttggaattgatggaagggggagagctgtttgacaaagtggtggggaataaacgcctgaaagaagctacctgcaagctctatttttaccagatgctcttggctgtgcagtaccttcatgaaaacggtattatacaccgtgacttaaagccagagaatgttttactgtcatctcaagaagaggactgtcttataaagattactgattttgggcactccaagattttgggagagacctctctcatgagaaccttatgtggaacccccacctacttggcgcctgaagttcttgtttctgttgggactgctgggtataaccgtgctgtggactgctggagtttaggagttattctttttatctgccttagtgggtatccacctttctctgagcataggactcaagtgtcactgaaggatcagatcaccagtggaaaatacaacttcattcctgaagtctgggcagaagtctcagagaaagctctggaccttgtcaagaagttgttggtagtggatccaaaggcacgttttacgacagaagaagccttaagacacccgtggcttcaggatgaagacatgaagagaaagtttcaagatcttctgtctgaggaaaatgaatccacagctctaccccaggttctagcccagccttctactagtcgaaagcggccccgtgaaggggaagccgagggtgccgagaccacaaagcgcccagctgtgtgtgctgctgtgttgtgaactccgtggtttgaacacgaaagaaatgtaccttctttcactctgtcatctttcttttctttgagtctgtttttttatagtttgtattttaattatgggaataattgctttttcacagtcactgatgtacaatt

SEQ ID NO: 323262 - DNA, 1761 bp, Artificial Sequence
  derived and/or modified sequence
atgtcacgggaatccgatgtggaagcacaacagtctcacgggagttcagcgtgctcacaaccccatgggtccgtcacgcagagccaggggtcctcatcgcagagccagggaatcagctcctccagcacaagcacgatgcccaatagttcacaaagcagccattcctcctcaggaacactgtcctcgttggagacagtttctactcaagagttatacagtattcccgaggaccaggaacctgaagatcaggaaccggaagaacctactcccgccccttgggcccggctctgggctttgcaggacggttttgcaaacctcgaaacagagagcggtcacgtaacccagagcgacctcgagctgcttttgagctctgaccctccggcttccgcctcacagagtgcaggaattaggggagtgagacatcacccccgccctgtttgctcactcaagtgtgtgaatgacaattattggttcgggcgagataaaagttgcgaatactgtttcgacgaacccctcctcaagaggactgacaagtaccgaacctattcaaagaagcatttcaggatattccgggaggtaggccctaaaaactcttatattgcatatatagaggaccacagcggcaacggaacatttgtcaacactgaactggtgggcaaagggaagcggcgcccactcaacaacaattcagaaatcgcattatccctttctcgtaacaaggtgttcgtgttcttcgacttgaccgtagatgatcagtccgtgtatcctaaggcccttcgagatgagtatatcatgtcaaaaacccttggttctggagcctgcggggaagtgaagctcgcatttgagaggaagacgtgtaagaaggttgccatcaaaattatatctaagcggaaattcgccatcgggtctgcgagggaggctgaccccgctttgaacgtggagactgaaatagagatattaaaaaaactgaatcatccgtgcattattaaaatcaaaaacttctttgatgctgaggactattatattgtgctagaactcatggaaggaggagaattgtttgacaaagtcgtgggaaataaaagattgaaggaggccacctgtaaactgtatttttatcagatgctgctggctgttcagtacctgcacgaaaacggcatcatccatagagacttgaaaccagagaatgttttgttaagttcacaagaggaggactgcttaattaagataactgatttcgggcacagcaagatcctgggcgaaacctcactcatgcggactctctgtgggacacctacctatctggcccccgaagtgcttgtgagcgtgggcactgctggctacaatcgggctgttgattgctggagcctgggagtcattctgtttatctgtctctctggataccctcctttttccgaacatcggacacaggtgagcttgaaggaccaaataacttctggcaaatataatttcatcccagaggtctgggctgaggtgtctgagaaggcgctcgatctggtgaagaaattgcttgttgttgacccaaaggccagatttacaaccgaagaggcactccgccatccatggttgcaggacgaagacatgaagaggaaattccaggatctgctttccgaagaaaatgaaagtacggctctgcctcaggttctcgcccagccctcaaccagccgaaagcgcccaagggagggggaagctgaaggcgccgagacaacaaaaaggcccgccgtgtgcgctgcggtgctgtag

SEQ ID NO: 323263 - DNA, 1761 bp, Artificial Sequence
  derived and/or modified sequence
atgagccgggagagtgatgtggaggcccagcagagccacggcagcagcgcctgcagccagccccacggctctgtgacccagagccagggcagcagcagccagagccagggcatcagcagcagcagcaccagcaccatgcccaacagcagccagagcagccacagcagcagcggcaccctgagcagcctggagaccgtgtccacccaggagctgtacagcatccctgaggaccaggagcctgaggaccaggagcctgaggagcccaccccagccccctgggcccggctgtgggccctgcaggacggctttgccaacctggagacagagagcggccacgtgacccagagcgacctggagctgctgctgagcagtgaccccccagccagcgccagccagagcgctggcatccggggcgtgcgccaccaccccaggcctgtgtgcagcctgaagtgtgtgaatgacaactactggtttggccgggacaagagctgtgagtactgctttgatgagcccctgctgaagaggacagacaagtaccgcacctacagcaagaagcacttccgcatcttccgggaggtgggccccaagaacagctacatcgcctacatcgaggaccacagcggaaatggcacctttgtgaacacagagctggtgggcaagggcaagagaagacccctgaacaacaacagcgagatcgccctgagcctgagcaggaacaaggtgtttgtgttctttgacctgactgtggatgaccagagcgtgtaccccaaggccctgagagatgagtacatcatgagcaagaccctgggcagcggggcctgtggggaggtgaagctggcctttgagaggaagacctgcaagaaggtggccatcaagatcatcagcaagaggaagtttgccatcggcagcgcccgggaggccgaccctgccctgaatgtggagacagaaattgagatcctgaagaagctgaaccacccctgcatcatcaagatcaagaacttctttgatgctgaggactactacatcgtgctggagctgatggagggcggggagctgtttgacaaggtggtgggcaacaagaggctgaaggaggccacctgcaagctgtacttctaccagatgctgctggccgtgcagtacctgcatgaaaatggcatcatccaccgggacctgaagccagaaaatgtgctgctgagcagccaggaggaggactgcctgatcaagatcacagactttggccacagcaagatcctgggggagaccagcctgatgaggaccctgtgtggcacccccacctacctggcccctgaggtgctggtgtctgtgggcacagctggctacaacagagctgtggactgctggagcctgggcgtcatcctcttcatctgcctgagcggctacccacccttcagcgagcacaggacccaggtgtccctgaaggaccagatcaccagcggcaagtacaacttcatccctgaggtgtgggccgaggtgtctgagaaggccctggacctggtgaagaagctgctggtggtggaccccaaggcccgcttcaccacagaggaggccctgcggcacccctggctgcaggatgaggacatgaagaggaagttccaggacctgctgtctgaagaaaatgaaagcacagccctgccccaggtgctggcccagcccagcaccagcaggaagaggccccgggagggggaggccgagggcgctgagaccaccaagaggcctgctgtgtgtgccgctgtgctgtag

SEQ ID NO: 323264 - DNA, 1761 bp, Artificial Sequence
  derived and/or modified sequence
atgagccgggagagcgacgtggaggcccagcagagccacggcagctccgcttgcagtcagcctcacgggtctgtgacgcagagccaggggagttcctcccagtcccaaggcatttcaagctcctcaacatcaaccatgcccaactcaagccaatcctcacatagttccagtggaaccctttcatctctggagactgtgtctacacaggaattatactctattcccgaggaccaggagcctgaggatcaagaaccggaggaacccacacccgcaccatgggccaggctctgggctctgcaagatggattcgccaacctcgaaaccgaatctggtcacgtgactcagagcgacctggagctgctcttaagcagtgaccctcccgcttccgcgagccaatctgccggcatccggggtgtcagacatcatccccgccctgtttgctccctgaagtgcgtgaatgataactactggtttgggcgagataaaagctgtgagtactgctttgacgaaccacttctgaagagaacagacaagtatagaacctattctaaaaagcattttaggattttcagggaagtgggacccaagaatagctacattgcttacattgaggatcatagtggtaacggcactttcgtaaataccgagctggtggggaaagggaagaggagacccctgaataacaattctgaaatagctctttcattatctcgtaataaggtctttgtgtttttcgacctgacagtggacgaccaaagtgtgtatcctaaagccttacgggatgagtacataatgtccaaaaccctcgggagtggggcgtgcggcgaagtcaaactggcattcgagagaaagacctgtaagaaggtcgcaattaaaattatctcgaaacggaagtttgctatcggcagtgccagggaggctgatccggcactgaatgtggagaccgaaatcgagattttgaagaagctcaatcacccatgcatcatcaagatcaagaatttcttcgatgccgaggattattacatcgtgctggagctgatggaaggaggagaactgtttgataaagttgtcggtaataagcgcctgaaagaggccacgtgcaaattgtatttttaccaaatgttactggcagtgcagtatctccacgagaacggcattatccatagagacctcaaacccgaaaacgtactgctctctagtcaggaggaggattgcctgataaagatcaccgatttcggtcatagcaaaattttaggtgagacatctttaatgcggacgctgtgcggcactcctacttatctggcacctgaagtccttgtgtccgtaggcactgcagggtacaatcgcgccgtggactgctggtcgctaggcgtcatactgtttatctgtctctcaggctacccaccattttctgagcaccgtactcaggtctcacttaaagatcagatcacgtccggcaagtataatttcattcctgaagtgtgggcagaggtgagcgaaaaggccctggacttagtgaaaaaactgcttgtggtggatcctaaagcaaggttcaccaccgaggaggcgctaagacatccttggctgcaggatgaagatatgaagcgaaagttccaggacttactgtcagaagaaaacgagtccaccgctttacctcaagtcctggctcaacccagcacgagtaggaaacgcccacgggagggagaggcagagggcgcagaaaccactaagagaccagccgtctgcgcagctgtactgtag

SEQ ID NO: 323265 - DNA, 1761 bp, Artificial Sequence
  derived and/or modified sequence
atgagtagggagtctgatgtcgaggcgcaacagagtcacgggagctcggcctgctctcagccacatggatccgtaacccagtcccagggcagctcttcccagagtcagggtatctcaagctcctctacttcgactatgccaaacagctcacagagcagtcattcatcaagcggaaccttgtcttccctcgagaccgtctccacccaggaactgtactccatccccgaggaccaggagcccgaggaccaggagccggaggagcccaccccagctccttgggctaggctttgggcgctgcaagacggctttgccaacctggagaccgagtccggccacgtaacccagagtgatctggaattgctgttgtcctccgatcccccagcgagtgcaagccagtccgctgggatcagaggtgtccgccaccaccctcgtccagtctgtagcctcaagtgtgtaaatgataattactggtttggccgagacaaaagctgtgaatactgtttcgatgagccactgcttaagcgaactgacaagtaccgcacctattccaagaaacacttcagaatctttagagaagttgggccaaaaaattcctacatcgcctatatcgaagatcactccgggaacggcactttcgtgaataccgaactggttgggaaggggaaacgcaggcctctcaataataactccgaaatcgccctgagcctctcacggaacaaggtgttcgtttttttcgatctgacagtggatgaccagagtgtctacccaaaggcccttagggacgagtatatcatgagtaagaccctgggttcgggcgcttgtggggaggttaagcttgccttcgagcggaaaacttgcaagaaggtagccatcaagatcatctcaaagcggaaattcgctattggcagcgcaagagaggctgatcctgcgctgaacgtggaaacggagatagagatcctgaagaagctgaaccatccttgtatcatcaaaattaagaattttttcgatgcagaagactactacatcgttctggagcttatggagggaggggaactgttcgacaaggtcgttggaaacaaacgcctcaaggaggcaacctgtaaattgtacttttaccagatgttacttgcagttcagtatctgcatgaaaatgggattatccatcgcgaccttaaaccggagaatgtgctcttgtcttcccaggaggaggactgcctgatcaaaatcactgacttcggacattcaaaaattcttggcgagacgtccctgatgcgaacattatgcggcaccccgacatatttggccccagaagtcctggtttcagtgggtactgctggctataaccgcgctgtagactgttggagtctgggtgtgatactgttcatctgcctttccggctaccctcctttttccgagcaccgcacccaggtaagcctcaaggaccaaataaccagcggaaaatataacttcataccagaggtgtgggccgaagtgtcagaaaaggctctcgaccttgtgaagaagctgctggtggtggaccccaaggccaggttcaccacagaagaggctctcagacacccgtggctgcaggatgaagatatgaagaggaagtttcaggacctacttagcgaagagaatgagagcacggctctgccccaggtcctcgcgcagccctccacaagccgaaagcgcccaagagagggcgaagccgaaggagcagagactacaaagcgtcctgccgtttgtgccgcagtgctgtag

SEQ ID NO: 323266 - protein, 452 aa, Artificial Sequence
  derived and/or modified sequence
MSRESDVEAQQSHGSSACSQPHGSVTQSQGSSSQSQGISSSSTSTMPNSSQSSHSSSGTLSSLETVSTQELYSIPEDQEPEDQEPEEPTPAPWARLWALQDGFANLVFVFFDLTVDDQSVYPKALRDEYIMSKTLGSGACGEVKLAFERKTCKKVAIKIISKRKFAIGSAREADPALNVETEIEILKKLNHPCIIKIKNFFDAEDYYIVLELMEGGELFDKVVGNKRLKEATCKLYFYQMLLAVQYLHENGIIHRDLKPENVLLSSQEEDCLIKITDFGHSKILGETSLMRTLCGTPTYLAPEVLVSVGTAGYNRAVDCWSLGVILFICLSGYPPFSEHRTQVSLKDQITSGKYNFIPEVWAEVSEKALDLVKKLLVVDPKARFTTEEALRHPWLQDEDMKRKFQDLLSEENESTALPQVLAQPSTSRKRPREGEAEGAETTKRPAVCAAVL

SEQ ID NO: 323267 - DNA, 1585 bp, Artificial Sequence
  derived and/or modified sequence
gcaggtttagcgccactctgctggctgaggctgcggagagtgtgcggctccaggtgggctcacgcggtcgtgatgtctcgggagtcggatgttgaggctcagcagtctcatggcagcagtgcctgttcacagccccatggcagcgttacccagtcccaaggctcctcctcacagtcccagggcatatccagctcctctaccagcacgatgccaaactccagccagtcctctcactccagctctgggacactgagctccttagagacagtgtccactcaggaactctattctattcctgaggaccaagaacctgaggaccaagaacctgaggagcctacccctgccccctgggctcgattatgggcccttcaggatggatttgccaatcttgtttttgtcttttttgatctgactgtagatgatcagtcagtttatcctaaggcattaagagatgaatacatcatgtcaaaaactcttggaagtggtgcctgtggagaggtaaagctggctttcgagaggaaaacatgtaagaaagtagccataaagatcatcagcaaaaggaagtttgctattggttcagcaagagaggcagacccagctctcaatgttgaaacagaaatagaaattttgaaaaagctaaatcatccttgcatcatcaagattaaaaacttttttgatgcagaagattattatattgttttggaattgatggaagggggagagctgtttgacaaagtggtggggaataaacgcctgaaagaagctacctgcaagctctatttttaccagatgctcttggctgtgcagtaccttcatgaaaacggtattatacaccgtgacttaaagccagagaatgttttactgtcatctcaagaagaggactgtcttataaagattactgattttgggcactccaagattttgggagagacctctctcatgagaaccttatgtggaacccccacctacttggcgcctgaagttcttgtttctgttgggactgctgggtataaccgtgctgtggactgctggagtttaggagttattctttttatctgccttagtgggtatccacctttctctgagcataggactcaagtgtcactgaaggatcagatcaccagtggaaaatacaacttcattcctgaagtctgggcagaagtctcagagaaagctctggaccttgtcaagaagttgttggtagtggatccaaaggcacgttttacgacagaagaagccttaagacacccgtggcttcaggatgaagacatgaagagaaagtttcaagatcttctgtctgaggaaaatgaatccacagctctaccccaggttctagcccagccttctactagtcgaaagcggccccgtgaaggggaagccgagggtgccgagaccacaaagcgcccagctgtgtgtgctgctgtgttgtgaactccgtggtttgaacacgaaagaaatgtaccttctttcactctgtcatctttcttttctttgagtctgtttttttatagtttgtattttaattatgggaataattgctttttcacagtcactgatgtacaattaaaaacctgatggaacctgg

SEQ ID NO: 323268 - protein, 163 aa, Artificial Sequence
  derived and/or modified sequence
MSRESDVEAQQSHGSSACSQPHGSVTQSQGSSSQSQGISSSSTSTMPNSSQSSHSSSGTLSSLETVSTQELYSIPEDQEPEDQEPEEPTPAPWARLWALQDGFANLGDEDMKRKFQDLLSEENESTALPQVLAQPSTSRKRPREGEAEGAETTKRPAVCAAVL

SEQ ID NO: 323269 - DNA, 507 bp, Artificial Sequence
  derived and/or modified sequence
agagagggagcttcgccatgtttctcaggctgatctcgaatttctgacctcaagtaatccgcccgcctcggcctcagaagtgctgagattaggggcttgagccaccgcacccgaccttcttttaaatttaaattagatggccagaggtggggcaaatgcataaataccctaaaaaggatttaaggaagagagttctgaggtgtttattctgaacttagaactaacgtttctacagcatttgctttcgtccgcctctacctccaccacggaaggataagaactagactttgacaagttttctgagtttaaccagtaatgccattcagttgccaatctcaagcaaagcaaacataagccagttttaatctactttttaagaaaagtggtagtccttttcacagtgcctgacgtaactgtatcagagggtgaggtataagctcacagaattcagataaatcatcatgaagttatatgtatttctggttaacactggaactactctaacat

SEQ ID NO: 323270 - protein, 155 aa, Artificial Sequence
  derived and/or modified sequence
MSVTYDDSVGVEVSSDSFWEVGNYKRTVKRIDDGHRLCSDLMNCLHERARIEKAYAQQLTEWARRWRQLVEKGPQYGTVEKAWMAFMSEAERVSELHLEVKASLMNDDFEKIKNWQKEAFHKQMMGGFKETKEAEDGFRKAQKPWAKKLKEVHLS

SEQ ID NO: 323271 - DNA, 102 bp, Artificial Sequence
  derived and/or modified sequence
atgagcgtgacctacgacgacagcgtgggcgtggaggtgagcagcgacagcttctgggaggtgggcaactacaagagaaccgtgaagagaatcgacgactag

SEQ ID NO: 323272 - DNA, 102 bp, Artificial Sequence
  derived and/or modified sequence
atgtctgtcacctacgacgatagcgtgggcgtcgaagtttcgtcagactcgttttgggaggtgggcaattacaagagaacagtgaagcggattgacgattag

SEQ ID NO: 323273 - DNA, 102 bp, Artificial Sequence
  derived and/or modified sequence
atgtctgtgacctatgatgacagcgtgggcgtggaggtgtccagtgacagcttctgggaggtgggcaactacaagaggacagtgaagagaattgatgactag

SEQ ID NO: 323274 - DNA, 102 bp, Artificial Sequence
  derived and/or modified sequence
atgagcgtgacctacgacgacagcgtgggcgtggaggtgagcagcgattccttttgggaggtggggaactacaaacggacagtcaagcgcatcgacgactag

SEQ ID NO: 323275 - DNA, 102 bp, Artificial Sequence
  derived and/or modified sequence
atgagtgtgacttatgacgacagcgtgggcgtagaggtgtccagcgattcattctgggaggtgggcaattataagcgtactgtaaagcgcatagatgactag

SEQ ID NO: 323276 - protein, 154 aa, Artificial Sequence
  derived and/or modified sequence
MSVGTSLEQAQMSTLTCPLFIPTVGRKTALHSGEDFQTLLFERVFVNLDGCFDMATGQFAAPLRGIYFFSLNVHSWNYKETYVHIMHNQKEAVILYAQPSERSIMQSQSVMLDLAYGDRVWVRLFKRQRENAIYSNDFDTYITFSGHLIKAEDD

SEQ ID NO: 323277 - DNA, 465 bp, Artificial Sequence
  derived and/or modified sequence
atgtctgtcggaacaagtctggagcaggctcagatgtcaaccctcacatgcccactattcattcctacagttggccgaaagacggcactgcacagtggggaagactttcaaacgctactcttcgagcgggtgttcgtcaacttggatggatgctttgatatggccaccggccagtttgctgcccctttgcggggtatttatttcttcagtctgaacgttcacagttggaattacaaagaaacctacgtgcatatcatgcacaaccaaaaggaggcagtgattctgtacgcacagccatccgaacgcagcatcatgcagtctcaatccgtgatgttggatctcgcctacggtgacagagtgtgggtgaggttattcaagcgacagagggagaacgccatatactccaatgactttgacacctatatcacattttccggccatttgattaaagcggaagacgactag

SEQ ID NO: 323278 - DNA, 465 bp, Artificial Sequence
  derived and/or modified sequence
atgtctgtgggtacatcacttgaacaggctcagatgtctacattgacctgcccactgttcattccgacggttggccgcaaaacagccttacattccggtgaagatttccaaactctactcttcgaacgggtttttgttaacctcgacggatgtttcgacatggccaccggacagttcgccgctccattaaggggcatctattttttttctctcaatgtacactcatggaactataaggaaacctatgtacacatcatgcataaccagaaagaagctgtgattttgtacgcccagccctcagaacggagtatcatgcagagccaatctgtgatgctcgatctggcttacggggacagagtttgggtgaggttatttaagcgtcagcgcgagaacgcaatatattccaatgatttcgatacatacatcactttctctggccatctgatcaaggctgaagacgactag

SEQ ID NO: 323279 - DNA, 465 bp, Artificial Sequence
  derived and/or modified sequence
atgtcagtgggcacaagcctagagcaagcccagatgagcactttaacctgccccttatttattccgaccgtgggaagaaagaccgccctgcatagtggtgaggacttccagaccctgctctttgagagggtgttcgtcaatttggatggctgctttgatatggccacaggccaattcgccgccccattacgaggaatctactttttctccctcaatgttcactcctggaactataaagaaacgtacgttcacatcatgcataatcagaaagaagctgtgatcctgtatgcccaaccctccgagagatctataatgcaaagccagtctgttatgcttgacctcgcctatggagatagagtgtgggtgagattgttcaaaagacagcgcgagaacgcgatatatagcaatgactttgacacttacattacattcagtggtcacctcataaaagccgaagacgattag

SEQ ID NO: 323280 - DNA, 563 bp, Artificial Sequence
  derived and/or modified sequence
atgagtgtgggcacctccttggagcaggctcagatgtccaccctgacttgtcccctttttatccccacagtgggccgcaagacggccctgcacagcggcgaggacttccagacgctgctcttcgaaagggtctttgtgaaccttgatgggtgctttgacatggcgaccggccagtttgctgctcccctgcgtggcatctacttcttcagcctcaatgtgcacagctggaattacaaggagacgtacgtgcacattatgcataaccagaaagaggctgtcatcctgtacgcgcagcccagcgagcgcagcatcatgcagagccagagtgtgatgctggacctggcctacggggaccgcgtctgggtgcggctcttcaagcgccagcgcgagaacgccatctacagcaacgacttcgacacctacatcaccttcagcggccacctcatcaaggccgaggacgactgagggcctctgggccaccctcccggctggagagctcaggtgctggtcccgtcccctgcagggctcagtttgcactgctgtgaagcaggaaggccagggag

SEQ ID NO: 323281 - DNA, 465 bp, Artificial Sequence
  derived and/or modified sequence
atgagcgtgggcaccagcctggagcaggcccagatgagcaccctgacctgccccctgttcatccccaccgtgggcagaaagaccgccctgcacagcggcgaggacttccagaccctgctgttcgagagagtgttcgtgaacctggacggctgcttcgacatggccaccggccagttcgccgcccccctgagaggcatctacttcttcagcctgaacgtgcacagctggaactacaaggagacctacgtgcacatcatgcacaaccagaaggaggccgtgatcctgtacgcccagcccagcgagagaagcatcatgcagagccagagcgtgatgctggacctggcctacggcgacagagtgtgggtgagactgttcaagagacagagagagaacgccatctacagcaacgacttcgacacctacatcaccttcagcggccacctgatcaaggccgaggacgactag

SEQ ID NO: 323282 - DNA, 465 bp, Artificial Sequence
  derived and/or modified sequence
atgtccgtgggaaccagtttggagcaagctcagatgtcaactctgacatgccccctttttatccctacagtagggcgcaagactgcattgcacagcggtgaggacttccaaactcttcttttcgagcgcgtattcgtgaacctagatgggtgctttgacatggcaacaggccagttcgctgcaccactcagaggcatttatttttttagcctcaacgttcattcctggaactacaaggaaacctatgtgcatataatgcacaaccagaaggaggccgtcatcctctatgcacagccctctgaaaggagcataatgcagtcgcaatccgtcatgctggatttagcatacggagatcgtgtttgggtgaggcttttcaagagacaacgcgagaacgccatctacagtaacgattttgatacatatataacgttttccggccatctcatcaaagcagaagatgattag

SEQ ID NO: 323283 - DNA, 465 bp, Artificial Sequence
  derived and/or modified sequence
atgtctgtgggcaccagcctggagcaggcccagatgagcaccctgacctgccccctcttcatccccaccgtgggcaggaagacagccctgcacagcggggaggacttccagaccctgctgtttgagcgggtgtttgtgaacctggatggctgctttgacatggccaccggccagtttgctgcccccctgcggggcatctacttcttcagcctgaatgtgcacagctggaactacaaggagacctacgtgcacatcatgcacaaccagaaggaggccgtcatcctgtatgcccagcccagcgagaggagcatcatgcagagccagagcgtgatgctggacctggcctacggggacagagtgtgggtgcggctcttcaagaggcagcgggagaatgccatctacagcaatgactttgacacctacatcaccttcagcggccacctgatcaaggccgaggatgactag

SEQ ID NO: 323284 - DNA, 465 bp, Artificial Sequence
  derived and/or modified sequence
atgagcgtgggcaccagcctggagcaggcccagatgagcaccctgacatgccccctcttcattccgactgtggggcggaagaccgccctccactctggcgaggacttccaaactctgctgtttgaacgggtcttcgtgaacctggacgggtgcttcgacatggcaactggacaattcgcagctccactcaggggcatctatttcttttcactgaatgttcattcttggaattataaggagacatacgtgcacatcatgcataatcagaaagaagccgtcattctgtacgctcagccatcagagcggtcaatcatgcagagccaatcagtgatgcttgacctcgcctacggggatagagtgtgggtgagactttttaagcgacaacgagaaaatgccatttatagcaacgactttgatacatacataacgttttccggccacttaattaaggccgaggatgattag

SEQ ID NO: 323285 - RNA, 465 nt, Artificial Sequence
  derived and/or modified sequence
augucuguggguacaucacuugaacaggcucagaugucuacauugaccugcccacuguucauuccgacgguuggccgcaaaacagccuuacauuccggugaagauuuccaaacucuacucuucgaacggguuuuuguuaaccucgacggauguuucgacauggccaccggacaguucgccgcuccauuaaggggcaucuauuuuuuuucucucaauguacacucauggaacuauaaggaaaccuauguacacaucaugcauaaccagaaagaagcugugauuuuguacgcccagcccucagaacggaguaucaugcagagccaaucugugaugcucgaucuggcuuacggggacagaguuugggugagguuauuuaagcgucagcgcgagaacgcaauauauuccaaugauuucgauacauacaucacuuucucuggccaucugaucaaggcugaagacgacuag

SEQ ID NO: 323286 - RNA, 465 nt, Artificial Sequence
  derived and/or modified sequence
augucagugggcacaagccuagagcaagcccagaugagcacuuuaaccugccccuuauuuauuccgaccgugggaagaaagaccgcccugcauaguggugaggacuuccagacccugcucuuugagaggguguucgucaauuuggauggcugcuuugauauggccacaggccaauucgccgccccauuacgaggaaucuacuuuuucucccucaauguucacuccuggaacuauaaagaaacguacguucacaucaugcauaaucagaaagaagcugugauccuguaugcccaacccuccgagagaucuauaaugcaaagccagucuguuaugcuugaccucgccuauggagauagagugugggugagauuguucaaaagacagcgcgagaacgcgauauauagcaaugacuuugacacuuacauuacauucaguggucaccucauaaaagccgaagacgauuag

SEQ ID NO: 323287 - DNA, 2437 bp, Artificial Sequence
  derived and/or modified sequence
cggggacaccctggccaccgccgcgcggacaccctcacgaggacaccccggccgcgcggacacctaccgcggggacgccccgaccccatcctacctgctgcgccccgcgccgcgccccgcaccccgcccgccacggcctgcgtccgccaccggaagcgccctcctaatccccgcagcgccaccgccattgccgccatcgtcgtggggcttctggggcagctagggctgcccgccgcgctgcctgcgccggaccggggcgggtccagtcccgggcgggccgtcgcgggagagaaataacatctgctttgctgccgagctcagaggagaccccagacccctcccgcagccagagggctggagcctgctcagaggtgctttgaagatgccggaggccccgcctctgctgttggcagctgtgttgctgggcctggtgctgctggtggtgctgctgctgcttctgaggcactggggctggggcctgtgccttatcggctggaacgagttcatcctgcagcccatccacaacctgctcatgggtgacaccaaggagcagcgcatcctgaaccacgtgctgcagcatgcggagcccgggaacgcacagagcgtgctggaggccattgacacctactgcgagcagaaggagtgggccatgaacgtgggcgacaagaaaggcaagatcgtggacgccgtgattcaggagcaccagccctccgtgctgctggagctgggggcctactgtggctactcagctgtgcgcatggcccgcctgctgtcaccaggggcgaggctcatcaccatcgagatcaaccccgactgtgccgccatcacccagcggatggtggatttcgctggcgtgaaggacaaggtcacccttgtggttggagcgtcccaggacatcatcccccagctgaagaagaagtatgatgtggacacactggacatggtcttcctcgaccactggaaggaccggtacctgccggacacgcttctcttggaggaatgtggcctgctgcggaaggggacagtgctactggctgacaacgtgatctgcccaggtgcgccagacttcctagcacacgtgcgcgggagcagctgctttgagtgcacacactaccaatcgttcctggaatacagggaggtggtggacggcctggagaaggccatctacaagggcccaggcagcgaagcagggccctgactgcccccccggcccccctctcgggctctctcacccagcctggtactgaaggtgccagacgtgctcctgctgaccttctgcggctccgggctgtgtcctaaatgcaaagcacacctcggccgaggcctgcgccctgacatgctaacctctctgaactgcaacactggattgttcttttttaagactcaatcatgacttctttactaacactggctagctatattatcttatatactaatatcatgttttaaaaatataaaatagaaattaagaatctaaatatttagatataactcgacttagtacatccttctcaactgccattcccctgctgcccttgacttgggcaccaaacattcaaagctccccttgacggacgctaacgctaagggcggggcccctagctggctgggttctgggtggcacgcctggcccactggcctcccagccacagtggtgcagaggtcagccctcctgcagctaggccaggggcacctgttagccccatggggacgactgccggcctgggaaacgaagaggagtcagccagcattcacacctttctgaccaagcaggcgctggggacaggtggaccccgcagcagcaccagcccctctgggccccatgtggcacagagtggaagcatctccttccctactccccactgggccttgcttacagaagaggcaatggctcagaccagctcccgcatccctgtagttgcctccctggcccatgagtgaggatgcagtgctggtttctgcccacctacacctagagctgtccccatctcctccaaggggtcagactgctagccacctcagaggctccaagggcccagttcccaggcccaggacaggaatcaaccctgtgctagctgagttcacctgcaccgagaccagcccctagccaagattctactcctgggctcaaggcctggctagcccccagccagcccactcctatggatagacagaccagtgagcccaagtggacaagtttggggccacccagggaccagaaacagagcctctgcaggacacagcagatgggcacctgggaccacctccacccagggccctgccccagacgcgcagaggcccgacacaagggagaagccagccacttgtgccagacctgagtggcagaaagcaaaaagttcctttgctgctttaatttttaaattttcttacaaaaatttaggtgtttaccaatagtcttattttggcttatttttaa

SEQ ID NO: 323288 - DNA, 1339 bp, Artificial Sequence
  derived and/or modified sequence
cccgcatgagcaggcagagtggagataacacggatcgctgtgtacactgtgtgctccggttgttgcatccgagggttgatcggatggtggttcccatccagatccaagtcctggcccctgatcacagagaaacacagctggacattaaagtgaaataacatctgctttgctgccgagctcagaggagaccccagacccctcccgcagccagagggctggagcctgctcagaggtgctttgaagatgccggaggccccgcctctgctgttggcagctgtgttgctgggcctggtgctgctggtggtgctgctgctgcttctgaggcactggggctggggcctgtgccttatcggctggaacgagttcatcctgcagcccatccacaacctgctcatgggtgacaccaaggagcagcgcatcctgaaccacgtgctgcagcatgcggagcccgggaacgcacagagcgtgctggaggccattgacacctactgcgagcagaaggagtgggccatgaacgtgggcgacaagaaaggcaagatcgtggacgccgtgattcaggagcaccagccctccgtgctgctggagctgggggcctactgtggctactcagctgtgcgcatggcccgcctgctgtcaccaggggcgaggctcatcaccatcgagatcaaccccgactgtgccgccatcacccagcggatggtggatttcgctggcgtgaaggacaaggtcacccttgtggttggagcgtcccaggacatcatcccccagctgaagaagaagtatgatgtggacacactggacatggtcttcctcgaccactggaaggaccggtacctgccggacacgcttctcttggaggaatgtggcctgctgcggaaggggacagtgctactggctgacaacgtgatctgcccaggtgcgccagacttcctagcacacgtgcgcgggagcagctgctttgagtgcacacactaccaatcgttcctggaatacagggaggtggtggacggcctggagaaggccatctacaagggcccaggcagcgaagcagggccctgactgcccccccggcccccctctcgggctctctcacccagcctggtactgaaggtgccagacgtgctcctgctgaccttctgcggctccgggctgtgtcctaaatgcaaagcacacctcggccgaggcctgcgccctgacatgctaacctctctgaactgcaacactggattgttcttttttaagactcaatcatgacttctttactaacactggctagctatattatcttatatactaatatcatgttttaaaaatataaaatagaaattaagaatctaaa

SEQ ID NO: 323289 - DNA, 871 bp, Artificial Sequence
  derived and/or modified sequence
acgggaggagcaagaacacagaacagagggggcaagacagctccaccaggagtcaggagtgaatcccctctgggaacgaggcactaggaagaagaacttccagcccaggagaaataacatctgctttgctgccgagctcagaggagaccccagacccctcccgcagccagagggctggagcctgctcagaggtgctttgaagatgccggaggccccgcctctgctgttggcagctgtgttgctgggcctggtgctgctggtggtgctgctgctgcttctgaggcactggggctggggcctgtgccttatcggctggaacgagttcatcctgcagcccatccacaacctgctcatgggtgacaccaaggagcagcgcatcctgaaccacgtgctgcagcatgcggagcccgggaacgcacagagcgtgctggaggccattgacacctactgcgagcagaaggagtgggccatgaacgtgggcgacaagaaaggcaagatcgtggacgccgtgattcaggagcaccagccctccgtgctgctggagctgggggcctactgtggctactcagctgtgcgcatggcccgcctgctgtcaccaggggcgaggctcatcaccatcgagatcaaccccgactgtgccgccatcacccagcggatggtggatttcgctggcgtgaaggacaaggtcacccttgtggttggagcgtcccaggacatcatcccccagctgaagaagaagtatgatgtggacacactggacatggtcttcctcgaccactggaaggaccggtacctgccggacacgcttctcttggaggaatgtggcctgctgcggaaggggacagtgctactggctgacaacgtgatctgc

SEQ ID NO: 323290 - protein, 196 aa, Artificial Sequence
  derived and/or modified sequence
MTLQCTKSAGPWKMVVWDEDGFQGRRHEFTAECPSVLELGFETVRSLKVLSGAWVGFEHAGFQGQQYILERGEYPSWDAWGGNTAYPAERLTSFRPAACANHRDSRLTIFEQENFLGKKGELSDDYPSLQAMGWEGNEVGSFHVHSGAWVCSQFPGYRGFQYVLECDHHSGDYKHFREWGSHAPTFQVQSIRRIQQ

SEQ ID NO: 323291 - DNA, 811 bp, Artificial Sequence
  derived and/or modified sequence
acatgttccctgggcctatctcggaaggggccacaatgaccctgcaatgcacaaagtcagcgggaccctggaagatggtggtgtgggatgaggacggcttccagggccggcggcacgagttcacggccgagtgccccagcgtgctggagcttggcttcgagactgtgcgatctttgaaagtgctgagtggagcgtgggtgggctttgagcatgctggcttccaagggcagcagtacattctggaacgaggcgaatatccaagctgggatgcctggggcggcaacacggcctaccccgccgagaggctcacctccttccggcctgcggcctgtgctaaccaccgtgactcgaggctgacaatcttcgagcaagagaacttcctgggcaagaaaggagagctgagcgatgactatccttccctccaggccatgggatgggaaggcaatgaagtagggtccttccacgtccactctggggcctgggtttgctcccagtttccgggctaccgaggatttcagtatgtgctggaatgcgatcaccattccggtgactacaaacatttccgggagtggggctctcatgccccgaccttccaggtgcagagcatccgcaggatccagcagtgaacaggggtgcggcacggaggagcgcatgcgtgcttatctgcaatggaggcgctctggaggctgtggtgtgttctctccttctgcctccccctgtaacctgtgtgaacccagcacccatgtgaactggtccgtgcacagtcagcacaaaaaactcaaacgaataaaaaagagaaagtctggtatta

SEQ ID NO: 323292 - protein, 211 aa, Artificial Sequence
  derived and/or modified sequence
MAEQHGAPEQAAAGKSHGDLGGSYKVILYELENFQGKRCELSAECPSLTDSLLEKVGSIQVESGPWLAFESRAFRGEQFVLEKGDYPRWDAWSNSRDSDSLLSLRPLNIDSPHHKLHLFENPAFSGRKMEIVDDDVPSLWAHGFQDRVASVRAINGTWVGYEFPGYRGRQYVFERGEYRHWNEWDASQPQLQSVRRIRDQKWHKRGRFPSS

SEQ ID NO: 323293 - DNA, 867 bp, Artificial Sequence
  derived and/or modified sequence
agacaggcgagtctgcagacggccgtggctcctctgttcttcccgaggctacagcaacagccagaggtgttcctggggagatggcggaacagcacggagcacccgaacaggctgcagctggcaagagccatggagaccttgggggcagctacaaggtgatcttgtacgaactagagaacttccaaggcaaacgctgcgagctctcggccgagtgccccagcctgaccgacagcctgctggagaaggtgggctccatccaagtggagtccgggccgtggctggcatttgagtccagggccttccgcggggagcagtttgttctggagaagggggattatcctcgctgggatgcctggtccaacagccgtgatagtgacagccttctgtccctccggcctctgaatattgatagtccacatcacaagctgcatctgtttgagaacccagctttcagtggccgcaagatggagatagtggatgatgacgtgcccagcctgtgggctcatggcttccaggaccgtgtggcgagtgtccgtgccatcaacgggacgtgggttggctatgagttccccggctaccgtgggcgccagtacgtgtttgagcggggcgagtaccgccactggaatgagtgggacgccagccagccgcagctgcagtctgtgcgccgcatccgtgaccagaagtggcacaagcggggccgcttccccagcagctgaaaggcacccagacttcaaggacccagacccaccctggggggctgcaagggcaagaagaggaggctccagggttggggcgagggccgacctgtccacccttccctggaatctgctcaataaagcctggggttggtcccccacccgccacgtt

SEQ ID NO: 323294 - protein, 229 aa, Artificial Sequence
  derived and/or modified sequence
MPWSACPHPRCVPRRCVIPCQSFVVTDVDYFSFQPDRPLGTRLTVTLTQHVQPPEPRDLQISTDQDHFLLTWSVALGSPQSHWLSPGDLEFEVVYKRLQDSWEDAAILLSNTSQATLGPEHLMPSSTYVARVRTRLAPGSRLSGRPSKWSPEVCWDSQPGDEAQPQNLECFFDGAAVLSCSWEVRKEVASSVSFGLFYKPSPDAGEEECSPVLREGLGSLHTRHHCQIP

SEQ ID NO: 323295 - DNA, 690 bp, Artificial Sequence
  derived and/or modified sequence
atgccctggagcgcatgtccacatcctcggtgcgttccgcgaaggtgcgtaatcccgtgtcagtcttttgtagttacagacgttgattacttctcttttcagccagaccgccccctgggcacccgacttaccgttacattgacacagcacgtccagcccccagaacctcgcgatcttcagatctctacagatcaggatcacttccttctgacctggtctgtagcactggggtctccacagtcccactggctgtccccaggagacttggaattcgaagtggtgtataaaagattacaggacagctgggaagacgctgccattttgctcagcaacacctctcaggctaccttgggacctgagcacctcatgccctcaagcacatacgtcgctcgcgttcgcacccgcctcgcgcctggctcccgattgagtgggcgaccatcaaagtggagccccgaagtgtgttgggattcccagccgggcgacgaagctcagccccagaatctcgaatgttttttcgacggagccgctgttctctcttgcagttgggaggtgagaaaggaggttgcaagctctgtctcattcggtttgttttacaagccatcacctgatgcaggggaagaggagtgctcccccgtgctgagggagggcctgggttctttgcataccaggcaccactgtcagattccttag

SEQ ID NO: 323296 - DNA, 690 bp, Artificial Sequence
  derived and/or modified sequence
atgccctggagcgcctgcccccacccccgctgtgtgccccggcgctgcgtcatcccctgccagagctttgtggtgacagatgtggactacttctccttccagcctgaccggcccctgggcacccggctgactgtgaccctgacccagcacgtgcagcccccagagccccgggacctgcagatcagcacagaccaggaccacttcctgctgacctggagcgtggccctgggcagcccccagagccactggctgagccctggggacctggagtttgaggtggtgtacaagaggctgcaggacagctgggaggatgctgccatcctgctgagcaacaccagccaggccaccctgggccctgagcacctgatgcccagcagcacctacgtggcccgggtgaggacccggctggcccctggcagccggctgagcggccggcccagcaagtggagccctgaggtgtgctgggacagccagcctggagatgaggcccagccccagaacctggagtgcttctttgatggagctgctgtgctgagctgctcctgggaggtgaggaaggaggtggccagctctgtgtcctttggcctcttctacaagcccagcccagatgctggggaggaggagtgcagccctgtgctgcgggagggcctgggcagcctgcacaccaggcaccactgccagatcccctag

SEQ ID NO: 323297 - DNA, 690 bp, Artificial Sequence
  derived and/or modified sequence
atgccctggagcgcctgcccccacccccggtgcgtgccccggcggtgtgtcattccatgtcagagctttgtagtgactgatgtggattacttctcttttcagcctgaccgacctcttggaactcgcttgaccgtcacactgacacagcatgtacagcccccagagcctagagatttacagatttctactgaccaggatcatttcctattaacatggtcggtagccctcgggtcacctcaatcccattggctgagtcccggagatctagaattcgaggtggtgtataagcgtctgcaggactcctgggaagatgccgctatactcttgagcaacaccagccaggcgactcttggccctgaacatttgatgcccagttcaacgtacgtagcaagagtccgaaccaggctggcaccgggtagcagactttcaggtagaccttccaaatggtctccagaggtttgctgggactcacagcccggggacgaggcccagcctcagaatttagaatgtttttttgacggagccgctgttctaagttgctcctgggaggttaggaaggaggtggctagctctgtctcgtttggcctgttttacaaaccttcacctgatgcaggcgaggaggaatgctctccggtgttgagggagggactgggcagcctgcacacgcgccaccactgtcaaattccctag

SEQ ID NO: 323298 - DNA, 690 bp, Artificial Sequence
  derived and/or modified sequence
atgccttggtctgcctgtccacaccccaggtgtgttccacgcagatgcgtcattccttgccagagttttgtcgttaccgacgtcgattactttagcttccagcctgaccgccctttagggactaggttgacagtgactctgacccagcacgtccaacctcctgagccccgagacttgcagatcagtaccgaccaggatcactttctgctgacttggagtgtcgcactgggctctcctcaaagccactggctcagccccggagatctggagttcgaagtggtatacaaacgcctccaggactcatgggaggacgcagccattctgctcagcaatacttctcaggctaccctggggcctgagcacctgatgccatcgagcacttatgtcgctcgagtgcgcacccgccttgcaccgggttcacgtctctccggcaggccgagcaagtggagtcctgaggtctgctgggattctcagccgggtgatgaggctcaaccccagaacctcgagtgcttttttgacggtgctgccgtgctcagttgtagttgggaggtgcggaaggaggtggccagttccgtgtcatttgggttattttataaaccatccccggacgccggagaagaggaatgctcacctgtgctacgtgagggacttggctctctgcataccagacatcattgccagattccatag

SEQ ID NO: 323299 - DNA, 969 bp, Artificial Sequence
  derived and/or modified sequence
ggttcccacctccgggactttgctcctgcagggccttggctggggttctctccctgcttcagccgctagcaccctccttgtgcctgaagcccgcactgggatgctcctgggctcttgagaaaccatcccgctgcagaccctgcgctgctacaacgactacaccagccacatcacctgcaggtgggcagacacccaggatgcccagcggctcgtcaacgtgaccctcattcgccgggtgaatgaggacctcctggagccagtgtcctgtgacctcagtgatgacatgccctggtcagcctgcccccatccccgctgcgtgcccaggagatgtgtcattccctgccagagttttgtcgtcactgacgttgactacttctcattccaaccagacaggcctctgggcacccggctcaccgtcactctgacccagcatgtccagcctcctgagcccagggacctgcagatcagcaccgaccaggaccacttcctgctgacctggagtgtggcccttgggagtccccagagccactggttgtccccaggggatctggagtttgaggtggtctacaagcggcttcaggactcttgggaggacgcagccatcctcctctccaacacctcccaggccaccctggggccagagcacctcatgcccagcagcacctacgtggcccgagtacggacccgcctggccccaggttctcggctctcaggacgtcccagcaagtggagcccagaggtttgctgggactcccagccaggggatgaggcccagccccagaacctggagtgcttctttgacggggccgccgtgctcagctgctcctgggaggtgaggaaggaggtggccagctcggtctcctttggcctattctacaagcccagcccagatgcaggggaggaagagtgctccccagtgctgagggaggggctcggcagcctccacaccaggcaccactgccagattcc

SEQ ID NO: 323300 - DNA, 690 bp, Artificial Sequence
  derived and/or modified sequence
atgccctggagcgcctgcccccaccccagatgcgtgcccagaagatgcgtgatcccctgccagagcttcgtggtgaccgacgtggactacttcagcttccagcccgacagacccctgggcaccagactgaccgtgaccctgacccagcacgtgcagccccccgagcccagagacctgcagatcagcaccgaccaggaccacttcctgctgacctggagcgtggccctgggcagcccccagagccactggctgagccccggcgacctggagttcgaggtggtgtacaagagactgcaggacagctgggaggacgccgccatcctgctgagcaacaccagccaggccaccctgggccccgagcacctgatgcccagcagcacctacgtggccagagtgagaaccagactggcccccggcagcagactgagcggcagacccagcaagtggagccccgaggtgtgctgggacagccagcccggcgacgaggcccagccccagaacctggagtgcttcttcgacggcgccgccgtgctgagctgcagctgggaggtgagaaaggaggtggccagcagcgtgagcttcggcctgttctacaagcccagccccgacgccggcgaggaggagtgcagccccgtgctgagagagggcctgggcagcctgcacaccagacaccactgccagatcccctag

SEQ ID NO: 323301 - protein, 149 aa, Artificial Sequence
  derived and/or modified sequence
MSRPRMRLVVTADDFGYCPRRDEGIVEAFLAGAVTSVSLLVNGAATESAAELARRHSIPTGLHANLSEGRPVGPARRGASSLLGPEGFFLGKMGFREAVAAGDVDLPQVREELEAQLSCFRELLGRAPTHADGHQHVHVLPGGQTPSWA

SEQ ID NO: 323302 - DNA, 450 bp, Artificial Sequence
  derived and/or modified sequence
atgagcagacccagaatgagactggtggtgaccgccgacgacttcggctactgccccagaagagacgagggcatcgtggaggccttcctggccggcgccgtgaccagcgtgagcctgctggtgaacggcgccgccaccgagagcgccgccgagctggccagaagacacagcatccccaccggcctgcacgccaacctgagcgagggcagacccgtgggccccgccagaagaggcgccagcagcctgctgggccccgagggcttcttcctgggcaagatgggcttcagagaggccgtggccgccggcgacgtggacctgccccaggtgagagaggagctggaggcccagctgagctgcttcagagagctgctgggcagagcccccacccacgccgacggccaccagcacgtgcacgtgctgcccggcggccagacccccagctgggcctag

SEQ ID NO: 323303 - DNA, 450 bp, Artificial Sequence
  derived and/or modified sequence
atgtcaagaccaaggatgcgtttggtggtcactgctgacgacttcggttactgccccaggagggatgaagggatcgtggaggcctttctggcaggagctgtgacttccgtctctctgctcgtgaacggagcggccacagagtctgccgccgagctggcccgccgacatagtatccctaccggtctgcacgccaatttgagtgaggggagaccggtggggccagcccgtcgaggtgcctcctccctgctgggtcccgagggcttctttctcggcaagatgggcttccgcgaggccgtcgcggcaggggacgttgatctgccgcaggttcgagaggagctggaggcgcagctgtcctgctttcgggagcttctcgggcgggcgcctacacacgcagatggacatcagcacgtacatgtgctgccgggcgggcagactccttcatgggcgtag

SEQ ID NO: 323304 - DNA, 450 bp, Artificial Sequence
  derived and/or modified sequence
atgagccggcccaggatgaggctggtggtgacagcagatgactttggctactgccccaggagagatgagggcatcgtggaggccttcctggccggggctgtgacctctgtgtccctgctggtgaatggagctgccacagagagcgctgctgagctggcccggcggcacagcatccccaccggcctgcacgccaacctgtctgagggccggcctgtgggccctgcccggcggggggccagcagcctgctgggccctgagggcttcttcctgggcaagatgggcttccgggaggccgtggccgctggagatgtggacctgccccaggtgcgggaggagctggaggcccagctgagctgcttccgggagctgctgggccgggcccccacccatgctgatggccaccagcacgtgcacgtgctgcccggcggccagacccccagctgggcctag

SEQ ID NO: 323305 - DNA, 450 bp, Artificial Sequence
  derived and/or modified sequence
atgagccggccccggatgcggctggtggtgaccgccgacgacttcggatattgcccgcgtagggatgagggcattgtcgaagcatttctcgccggcgccgttacctcagtttctctcctagtgaacggagcagctactgagagtgctgccgagctggcccgccgccattccattccaacagggcttcatgcgaacctcagcgaaggtcgcccagtgggacctgctcgaaggggtgcatctagcctgcttggccccgagggtttctttctcggaaagatgggatttagagaggctgtggccgcaggcgatgtggacctgccgcaggtgagagaagagcttgaggctcagctgtcctgtttccgggagctgttagggagggccccgacccatgccgatggacatcagcatgtgcatgtgttgcctggaggtcagaccccaagctgggcatag

SEQ ID NO: 323306 - DNA, 450 bp, Artificial Sequence
  derived and/or modified sequence
atgtccagaccaagaatgagactggttgtcacagccgacgactttggttactgtcccagacgagatgaaggcatcgtcgaagccttccttgccggtgcagtaacatcagtgagtttgctagtaaatggggctgcaactgagagcgcggctgagctcgcaaggcggcactccataccaaccgggctacacgccaatctcagcgaaggccgtcccgtcgggcctgctcggagaggagctagcagtctgctgggccctgagggcttcttcctcgggaagatggggttcagagaggctgtggcagccggagacgtggatctgcctcaggtaagagaagaattagaggctcagctgtcttgcttccgggagctcttgggcagggccccaacccacgcagatggacatcagcatgtgcacgtactgccagggggacagacaccatcttgggcatag

SEQ ID NO: 323307 - DNA, 1142 bp, Artificial Sequence
  derived and/or modified sequence
cgagcggtggacccaggcggccatgtcccgccctcgcatgcgcctggtggtcaccgcggacgactttggttactgcccgcgacgcgatgagggtatcgtggaggcctttctggccggggctgtgaccagcgtgtccctgctggtcaacggtgcggccacggagagcgcggcggagctggcccgcaggcacagcatccccacgggcctccacgccaacctgtccgagggccgccccgtgggtccggcccgccgtggcgcctcatcgctgctcggcccggaaggcttcttccttggcaagatgggattccgggaggcggtggcggccggagacgtggatttgcctcaggtgcgggaggagctcgaggcccaactaagctgcttccgggagctgctgggcagggcccccacgcacgcggacgggcaccagcacgtgcacgtgctcccaggtggacagacgccttcgtgggcctgagcacttgcggccggcacatgtccgctcaccgcgtgtccggggccctggcgcgggtcctggaaggtaccctagcgggccacaccctgacagccgagctgatggcgcaccccggctaccccagtgtgcctcccaccggcggctgcggtgaaggccccgacgctttctcttgctcttgggagcggctgcatgagctgcgcgtcctcaccgcgcccacgctgcgggcccagcttgcccaggatggcgtgcagctttgcgccctcgacgacctggactccaagaggccaggggaggaggtcccctgtgagcccactctggaacccttcctggaaccctccctactctgaccccctacagacaaccaagcactaatccccttagtaccaagaaaggggagccaggatttagtcctggcccagcccagagctgggacctggagcacgatctgttgacttccctgggtaggacactgccacctctgggctcaggtcctcatgcctccaaatggcatctagagtttgagcagccttcttggctgcaggcaggcctagcctgtggcagcgggctagggcccgcagagcatttggtgcccctccatgttgcaatgcaaacaccttcaccactggggcagtggggagagatggctatattaataaaataacgtgtgtctttc

SEQ ID NO: 323308 - protein, 607 aa, Artificial Sequence
  derived and/or modified sequence
MCLNLLSAPEKTGPPSKEELSAVSELLQHGLPQISSRSPESLAFLSDRQYMEGAARQRQYCILLLFYLAYIHEDRFVSEAELFEAVQSFLLSLQDQGERPPLVVFKASIYLLAICQDKDNTLRETMVSAIRKFLEGIPDLQLVYTHHPLLLRFFLLYPELMSRYGHRVLELWFFWEESSYEELDDVTSAGQPALPASLVVLFQLLRSIPSILLILLDLIYSSPVDTAHKVLISLRTFLRRNEDIQVGGLIRGHFLLILQRLLVEHGASPSGVSKLCGKCSPTDVDILQPSFNFLYWSLHQTTPSSQKRAAAVLLSSTGLMELLEKMLALTLAKADSPRTALLCSAWLLTASFSAQQHKGSLQVHQTLSVEMDQVLKALSFPKKKAALLSAAILCFLRTALRQSFSSALVALVPSGAQPLPATKDTVLAPLRMSQVRSLVIGLQNLLVQKDPLLSQACVGCLEALLDYLDARSPDIALHVASQPWNRFLLFTLLDAGENSFLRPEILRLMTLFMRYRSSSVLSHEEVGDVLQGVALADLSTLSNTTLQALHGFFQQLQSMGHLADHSMAQTLQASLEGLPPSTSSGQPPLQDMLCLGGVAVSLSHIRN

SEQ ID NO: 323309 - DNA, 1824 bp, Artificial Sequence
  derived and/or modified sequence
atgtgcctgaacctgctgagcgcccccgagaagaccggcccccccagcaaggaggagctgagcgccgtgagcgagctgctgcagcacggcctgccccagatcagcagcagaagccccgagagcctggccttcctgagcgacagacagtacatggagggcgccgccagacagagacagtactgcatcctgctgctgttctacctggcctacatccacgaggacagattcgtgagcgaggccgagctgttcgaggccgtgcagagcttcctgctgagcctgcaggaccagggcgagagaccccccctggtggtgttcaaggccagcatctacctgctggccatctgccaggacaaggacaacaccctgagagagaccatggtgagcgccatcagaaagttcctggagggcatccccgacctgcagctggtgtacacccaccaccccctgctgctgagattcttcctgctgtaccccgagctgatgagcagatacggccacagagtgctggagctgtggttcttctgggaggagagcagctacgaggagctggacgacgtgaccagcgccggccagcccgccctgcccgccagcctggtggtgctgttccagctgctgagaagcatccccagcatcctgctgatcctgctggacctgatctacagcagccccgtggacaccgcccacaaggtgctgatcagcctgagaaccttcctgagaagaaacgaggacatccaggtgggcggcctgatcagaggccacttcctgctgatcctgcagagactgctggtggagcacggcgccagccccagcggcgtgagcaagctgtgcggcaagtgcagccccaccgacgtggacatcctgcagcccagcttcaacttcctgtactggagcctgcaccagaccacccccagcagccagaagagagccgccgccgtgctgctgagcagcaccggcctgatggagctgctggagaagatgctggccctgaccctggccaaggccgacagccccagaaccgccctgctgtgcagcgcctggctgctgaccgccagcttcagcgcccagcagcacaagggcagcctgcaggtgcaccagaccctgagcgtggagatggaccaggtgctgaaggccctgagcttccccaagaagaaggccgccctgctgagcgccgccatcctgtgcttcctgagaaccgccctgagacagagcttcagcagcgccctggtggccctggtgcccagcggcgcccagcccctgcccgccaccaaggacaccgtgctggcccccctgagaatgagccaggtgagaagcctggtgatcggcctgcagaacctgctggtgcagaaggaccccctgctgagccaggcctgcgtgggctgcctggaggccctgctggactacctggacgccagaagccccgacatcgccctgcacgtggccagccagccctggaacagattcctgctgttcaccctgctggacgccggcgagaacagcttcctgagacccgagatcctgagactgatgaccctgttcatgagatacagaagcagcagcgtgctgagccacgaggaggtgggcgacgtgctgcagggcgtggccctggccgacctgagcaccctgagcaacaccaccctgcaggccctgcacggcttcttccagcagctgcagagcatgggccacctggccgaccacagcatggcccagaccctgcaggccagcctggagggcctgccccccagcaccagcagcggccagccccccctgcaggacatgctgtgcctgggcggcgtggccgtgagcctgagccacatcagaaactag

SEQ ID NO: 323310 - DNA, 1824 bp, Artificial Sequence
  derived and/or modified sequence
atgtgtttaaatctgttatctgcccccgagaagactggaccaccatccaaagaggagctctctgccgtgagcgagctgcttcagcatgggctgccgcaaatctcctcgcgaagccccgagtctctggcatttctctcagatcgtcagtacatggagggcgcggccaggcagaggcaatattgtatcctcttgttgttctatcttgcatacatccatgaggatcgcttcgtgtctgaagcagagctgtttgaagccgtgcagtcgtttttactgagtctgcaggatcagggcgaaagacccccgcttgtcgtgtttaaggcgtcaatatacttgctagctatctgccaggataaggacaataccctgcgtgagaccatggtctcggccatccgaaagttcctcgagggtattccagatctacaactcgtctatacgcaccaccccttgctgctccgttttttcctcctttacccggagctaatgagccgctatggacatcgcgtgttggagctctggtttttctgggaggaatccagctacgaggaactggatgacgtcacttctgcgggacaacccgccctgcctgccagcctggtagtattgttccagttgctgcgctcgatcccgtcaatcctgttaatcctgctggatctaatctattcatcacccgtggatactgctcataaggtccttatcagcctcaggacgtttttacggagaaatgaggatattcaggtgggtgggctgatccgtggacatttccttctaatattacagaggttgctggtggaacatggcgcctctccttccggggtgagtaagctgtgtgggaagtgttccccaacagacgtggatatccttcagcctagctttaattttctgtattggtccctccaccagacaacaccgtccagccagaagcgcgccgccgctgtcctgctgtctagcacggggctgatggaattgctggagaagatgttggcactgacccttgccaaggccgattctcccaggacagcgctcctgtgctctgcctggttactcacagcttccttttctgctcagcagcataaaggatcccttcaagtccatcaaaccctctcagtagagatggatcaggtgctgaaagccttatcatttccgaagaaaaaagctgctctgctctcagcggcgatactgtgcttcttgcggaccgctctgcggcagtccttcagtagtgcactggtggctttggtgccatccggagcccagcccctgcccgccacgaaggacactgttctcgcaccccttcgcatgagtcaggtcagaagtttggttatcgggctccagaatctgctggtgcagaaggatccactactgagccaggcctgcgtgggttgtctggaggctcttctggactatcttgacgccagaagtcctgatatcgcgcttcatgtggcctcccagccttggaatagattcctcctcttcacccttctggatgctggagagaattcctttctaagacctgaaatcttgcgactgatgacgctgtttatgcgatacaggagctccagcgtcctttcccacgaagaggttggggatgtgttgcagggtgtcgccttagcggatctatcaaccctgtctaacactaccctccaagctttacatggattcttccaacagctccagagtatggggcatctggcagaccattcaatggcccaaactctgcaagcctcccttgaaggcctccctcctagtacttcttctgggcaaccccccctgcaggacatgctatgcctgggcggtgtggctgtcagcttatcgcacattaggaattag

SEQ ID NO: 323311 - DNA, 1824 bp, Artificial Sequence
  derived and/or modified sequence
atgtgcctgaacctgctgagcgcccctgagaagacaggcccccccagcaaggaggagctgtctgctgtgtctgagctgctgcagcacggcctgccccagatcagcagccgcagccctgagagcctggccttcctgagtgaccggcagtacatggagggcgccgcccggcagaggcagtactgcatcctgctgctcttctacctggcctacatccatgaagatagatttgtgtctgaggccgagctgtttgaagctgtgcagagcttcctgctgagcctgcaggaccagggcgagcggccccccctggtggtgttcaaggccagcatctacctgctggccatctgccaggacaaggacaacaccctgcgggagaccatggtgtctgccatcaggaagttcctggagggcatcccagacctgcagctggtgtacacccaccaccccctgctgctgcgcttcttcctgctgtacccagagctgatgagccgctatggccaccgggtgctggagctgtggttcttctgggaggagagcagctatgaggagctggatgatgtgaccagcgctggccagcctgccctgcctgccagcctggtggtgctcttccagctgctgcggagcatccccagcatcctgctgatcctgctggacctgatctacagcagccctgtggacacagcccacaaggtgctgatcagcctgcggaccttcctgcggagaaatgaagacatccaggtgggcggcctcatccggggccacttcctgctgatcctgcagaggctgctggtggagcacggggccagccccagcggcgtgtccaagctgtgtgggaagtgcagccccacagatgtggacatcctgcagcccagcttcaacttcctgtactggagcctgcaccagaccacccccagcagccagaagagagctgctgctgtgctgctgagcagcacaggcctgatggagctgctggagaagatgctggccctgaccctggccaaggctgacagccccaggacagccctgctgtgcagcgcctggctgctgacagccagcttcagcgcccagcagcacaagggcagcctgcaggtgcaccagaccctgtctgtggagatggaccaggtgctgaaggccctgtccttccccaagaagaaggccgccctgctgtctgctgccatcctgtgcttcctgaggacagccctgcggcagagcttcagcagcgccctggtggccctggtgcccagcggggcccagcccctgcctgccaccaaggacacagtgctggcccccctgaggatgagccaggtgcgcagcctggtgattggcctgcagaacctgctggtgcagaaggaccccctgctgagccaggcctgtgtgggctgcctggaggccctgctggactacctggatgcccggagcccagacatcgccctgcacgtggccagccagccctggaaccgcttcctgctcttcaccctgctggatgctggagaaaattccttcctgcggcctgagatcctgcggctgatgaccctcttcatgagataccgcagcagctctgtgctgagccatgaggaggtgggagatgtgctgcagggcgtggccctggccgacctgagcaccctgagcaacaccaccctgcaggccctgcacggcttcttccagcagctgcagagcatgggccacctggccgaccacagcatggcccagaccctgcaggccagcctggagggcctgccccccagcaccagcagcggccagccccccctgcaggacatgctgtgcctgggcggcgtggccgtgtccctgagccacatccggaactag

SEQ ID NO: 323312 - DNA, 1824 bp, Artificial Sequence
  derived and/or modified sequence
atgtgcctgaacctgctgagcgcccccgagaagaccggccccccctccaaggaggaactgagtgctgtatcagaattgctgcagcacggcctgccccagatttccagtaggtcccccgagagtctggcctttctgtcagacagacagtacatggagggggccgctagacagcgccaatactgcatcctgttattattctatctggcttatatacacgaggacaggtttgttagtgaagcagagctgtttgaagccgtgcagtcatttttgttgtcgctgcaggaccagggcgaacggcccccgctcgtggtgttcaaagcttctatttatctcttagctatctgccaggacaaagataatactctcagagagaccatggtgtcggcaataaggaagttcctggaggggattcccgatctgcagctggtctacactcaccatcccttgctgttgcgattctttcttctttacccagaactgatgtcccgctatggtcaccgggtcctggagctgtggtttttttgggaagagtcctcctacgaggaactggatgatgtgaccagcgcaggccagccagccctgcccgcttctctggtggtgctgtttcagctccttcgttccatcccttcgatcctcctcattctgcttgatttaatctattcttctccggtagatacagcccacaaagttcttatcagcctccggaccttcctgcgccggaatgaggatatacaggtggggggtcttatccgcgggcacttcttgctgatactccagaggctgttagtggagcatggagcctcaccctccggcgtctcaaagttatgcggtaaatgttcaccaactgatgtggacatcctgcagccaagtttcaacttcctgtattggagcctccaccaaacaacaccttcgagccaaaagcgagccgcagcagtgctcctttcttcaaccgggctgatggagctgcttgagaagatgttggcccttaccctggccaaagcggattcacctcgcactgctctactgtgctccgcctggctcctgacagccagttttagcgcgcagcaacataagggaagtctacaggtgcaccagaccctttcggtggagatggatcaggttctaaaggccctgagttttccaaaaaagaaagccgccctactgtccgcagccatcctttgcttcctgagaactgctctgagacagtcgttttcctcggccctggtggccctagtcccctctggtgcgcagcctctgccagcaaccaaggacacagttctggcccctctgcggatgagccaggtaagaagcctcgttattgggctccagaacttgcttgttcagaaagaccccctgctgtctcaggcttgtgttggctgtttggaagctttgttagactatctggatgcaaggagtccagatatcgctcttcacgttgctagccaaccttggaaccggtttttgctgtttactctgctggacgccggagaaaattccttcctacggcccgagatcctgagactcatgaccctctttatgcgataccgctccagctcagtactgtcacatgaagaggttggagatgtgctccagggggtggctctcgcagatttgagtacattatctaatactacactccaggcactgcacggttttttccagcagttgcagtcaatgggacatctagctgatcacagcatggcccagacacttcaggcctccctggagggacttcccccctccacatcgagcggccagcctcccctgcaggatatgctttgcttgggaggagtggcagtatccctcagccatattagaaattag

SEQ ID NO: 323313 - DNA, 3901 bp, Artificial Sequence
  derived and/or modified sequence
gcctcagctgagggcaagcgaggagatggctgtgaggcaggcggcgacggcgggcactcccgggcccaggagagaggaagaggcggcgcttctattcgagagggcccattaccggcacgacccgcgctggctgctgcccgtgaccccccgcctgtgcctggcctgcgcgctggagctgctgccggaccccggcgtgtcgttagtgcgcaagaagcacatgttgtcctgcttccaagatgcccttgtgaggcatacctccctggtcacgcaactggtgtctcaggatcagagagtctgcatccacttcataagtgtgctttttggactattatgcagcatggaagatgggagtgtgacagacctctgtattgaagtccttattcagatcacaacgcagctgaagctggagcagactatccgttgcctgctggatgagtgccacaaagagctgtgtaacatgccctccatgcgaggcagcctggccaccctgacccttcttggcaagttggtggatgccatccctgctctggcagacgagcttgtaatggagcatggcaacctgatggagcatctgttgagaggcttagtataccccagtgagggcatacaagcttctgtctgttacctttatgggaagctatactcctcaccagtggcagctgagatgctttcaggacacttccgtgagaagctttttcccctcttcctttccatcctggatggtgcccagacaaaggagctgcagattaactgcttgggtttgctgaggcagctgttgaagtatgatctctttgtgtccatgatcatgaaccaggatggactgggagaaagtgctaagaatatcgaagggtcatcaggaaatacctcactgcctttggtgctcaaaaagcttctcctctctagagatgaaaccctgcaggtggccagtgctcactgtataactgcggtgcttgtccactccccagcaaagcatgcgtcagccttcatccacgctgacatcccagagttcctctttgagcatctttcttcttccagtgaagtgctcgtctggtccagctgtaactgcttgacactcctggtagaagagccactctttttttccaagtgccacacggtgtatgggatcgaggcagtggtgaggagcctgcagggaagcctgaagatgaacaacatagagctgcacaagcagggcctgctgcttttcgctgaaatcctgacccggcagccagaggagatcaagctgttcacaagctcagccatgtgcagagatgctggccgtgccctccaagaagcagttagcagccctgtgctggaggtggctgctgaggccttgaaggccacttctgcttttctgaggaaggaccatcagagcactccacctgtgcagtatggggaactgcaggctttgctagaagccatgctaaaccgatgtgcggagttttcccagaccttgctgagcaggaggcccctgggccatgcctccagtagagattcagagaaggccattcttcaaaggggaaagttcctcctcagcactctggagggatttagaagtgcctgcaggttggctatagaattccagagtgagccttcagcccaggagaatccattcacagctcccagcgccaagaaggaagacaccttggaggccttctcagaatttcttctcagtgcctgtgactcgctgtgtatccccatggtgatgagacacttggagcagaccacccacccagctttgatggaagttttcctctcaattctacataacctctttgtcatcgttccccacatgaaggagaagttttccaagaagcttgcttcctcatccttcatacgactgaccctggagctgaaggccaggttttgcagtggtctgagtcactcagccctaaaccaggtgtgttccaatttcctctactatatgtgcctcaaccttctctcagctccagagaagacaggaccaccttccaaagaagaactctctgcagtgtctgagctcctgcagcatgggctgccccagataagcagcaggagccctgaaagccttgccttcctgtctgatcgccagtacatggagggagctgctcgccagagacagtactgcatcctgctcctcttctacttggcctacatccatgaagacaggtttgtctcagaggcagagttatttgaggctgtgcaaagcttcctcctgtcgctgcaggaccagggcgagcgccccccactggtggtcttcaaagcctccatctatctgcttgcaatctgccaggacaaagacaatacactacgtgagactatggtcagtgcaatcagaaaattcctagaaggcatcccagacctgcagctagtctatactcaccatccgctcctgctcaggttctttctgttgtatccagagctcatgagtaggtatgggcaccgtgtcctggaactttggttcttctgggaagagagcagctatgaggaactggatgatgtcacctctgctgggcagcccgcccttcctgccagcttagtagtcctgttccagttgctcagaagcatccccagcatcctgctcatcttgctggacctcatctattccagcccagtggacacagctcacaaggtactgattagcctgaggaccttcctgaggaggaatgaggatatccaagtgggcggtcttatccgaggccacttcctgctgatcctgcagcgtctgctagtggagcatggggcatccccatcaggagtaagcaagctgtgtgggaagtgcagccccactgacgtggacatcctgcagccctccttcaacttcctgtattggagccttcatcagaccacacccagcagtcagaaaagagctgctgcagtgctcctgagcagcacaggcctgatggagcttctggagaagatgctggccctcaccttggcaaaggcagattctcccaggactgcactcctctgctctgcctggctgctcactgcctccttctctgcccagcagcacaagggcagtttgcaggttcaccagacactctctgtggaaatggaccaagtattgaaggctctcagctttccaaagaaaaaggctgcactactctcagctgccatcttatgcttcctgcggacagccctgcgacaaagcttttcctctgccctggtagccctggtgccctcaggggcccagccactgccagccaccaaggacactgtcctagctccactgcgaatgtcgcaagtccggtccctggtcattgggctgcagaacctcctggtgcagaaggaccctctattgtcccaggcctgtgttggctgcctggaggccttgcttgactacctggatgcccggagcccagacattgctctccacgtggcctcccagccttggaatcggtttttgctgtttaccctcttggatgctggagagaattccttcctcagacctgagattttgaggctcatgaccctgtttatgcggtaccggagtagcagtgtcctctctcatgaagaggtgggtgatgttctgcaaggtgtggctttggctgacctgtctaccctctcgaacaccacactccaggccctgcatggcttcttccagcagctccagagcatgggacacctggctgaccacagcatggcccagaccctgcaggcctccttggagggccttccccctagcacctcctcaggccagccacccctgcaggacatgctctgcctgggaggggtggctgtatccctgtcccacatcagaaactgatcctcaggacttgaaggcccagaagtggagagagaatgagacctggagacaaagggcataattgttggggaaatggatgacagctgaagctattcatatggagccatatactctattgttgaaatagaataaggaaataaaatgatacactcacat

SEQ ID NO: 323314 - DNA, 6731 bp, Artificial Sequence
  derived and/or modified sequence
aagagaggataagttgtgggtgcacatttactaattcattcagaatctgtatctattctttgtccagtgatgagtgaaaggaagtgtcaggcagccccatatttacttttcatagccaccttaagacctcctctgccacggccatggctagaatttcactagcctctggcacaaagcagtggtgcccaggcatatggcagggataatgctctcccagccaaagtagcaatgtcatctcttctattctttcttcttctccctctaagtcactcagccctaaaccaggtgtgttccaatttcctctactatatgtgcctcaaccttctctcagctccagagaagacaggaccaccttccaaagaaggtaagatgctacaatttgaccactcatgtggcctgtgctggtctttagagtctgggtgccttgctgattgactagatagtgagttagtacagccacgagatttctttgcctgaggctgcccagaggaatcggagtgatgcaattataggttgattcctagggatatgaagtaatagaactggaaaatgatggaacccaaggctcctggcaccttagagttgagaaggatcctaatgttcatcaagtccagttccttcttcctgacagtctcctctgcaacatccccataccataggcctcaggagtccagtgttcactatagcattaatagtgtgttctatttcttcattcattcaagtagtgtttcttttttctttttctttttctttttgtttttcttttattttaagacagtctcgctctgttgcccaggctggagtgcagtggcatgatctcagctcactgcaacctctgccttccaggttcaagtgagtctcctgcctcagcctcccaagtagctgggattacaggctcctgccaccacgcctggctaatttttgcatttttagtagagacgggccttcaccatgttggccatgctggtttcaaactcctgacctcaggtaatctgcctcggcctcccaaagtgctgagattacagatgtgagctaccgtgcccagccaagaggtgtttcttgagcacctgttgtgtgtcagactccattccaggtgctggtgaaagagccagggatacaaagccctgctgtcataaattgaaacaggcaggcaataagcaaatgcatactatgtcagagatccataggcactatgaagaaaataaaactgggcaaaaggatagagagtgatagaaggaggagagagacatgttagatagggtggtcagggaaggcctccatgtggaagtggtatgtgagcagaggtctgagtcaagtaaaggaaagccatgcagaatctaggcaggaggaacagcagctgcagggctgagagctggaagtttttcctcttgttgaacattcattgagcttctgctacctgccaggggaggcctaggtactgctgtggatagagcgattataacagtatgttatttgccctgaggggttcctctatcttagacctgtctcctgatataatagaaaacagtttaataattgtttcatcattcattcaacaaatatacctctgtgggtaagacctagttctggctcttttcccccttattatatttgtgaagattctgtgtcctctcccccactctctacacctgctgctctcttttatctttcccagacatcatgctgagagggagcaaagcccaggtgagcatttttattgcttccaacatagcttggctactggttctctcactatgctggctactcctttctgcaatctccctgttaaggcatgatctggcctgcagagagaatagcatgatttctgccatgtagcctaagactattggcagtcacatcaccatcacctctcatgctcataagtgcctgctccactgcttctggcagttcccttgcttgtcaaaccaaggggagccccacacatctcctgccttaaacactggggcttcttaaatctcattgtgccaggaaatgcagcacatctctcataacattcagactgctttcttttatatatcaggagaaaggcaggtggatgtgtgtggctgaaggatatttgtttcattattattatattgatgagagcatgctttggtggacaagcactgaacttggaattaggagagctgacctggctctgctaccaaattgctgtgggacatgcgctatcctcaccctctgcttgcccaggacttggccctggcaggatggattctttcggttgaccttcaactgaggtcctgtctttcaatctctcatccactcactgctggaaggattatctgaaaacaaagtcttaacatcttaactcccctggctttcagctgtggtctccacacatcagtctgtggagtagtgtcaaatagtgatgaagttttctctggtccatggtgaaatgtggaacataaggataaagttgactttatttaggtttttttgtttgttttgttttttgaggcagagtctcagtctgttgcccaggctggagttgagtgatgtcagctcactgcaacctccacctcccagattcaagtgattcttgtgtctcagcctcacgaatagctgggactacaagcatatgtcaccatgcccaggtgatttttttgtatttttagtagagatggggttttgccatgttggccaggctggtcttgaactcctggcctcaaacaatctacctgccttggactccaaagtgctaggattacaggtgtgagccaccgcacctggcctttattcaaattttaaactctgaagtcagtctttttctttcctttttttttgttttgggacagcgtcttgttctgttgcccaggctggagtgcagtggcgtgatctcggctcattgcaacctccacctcccgggttcaagcaattctcctgcgtcagcttcctgagtagctaggactacaggcacttgccaccacgcttgtctaatttttgtatttttaatagagacagggttttgccatgttggccaggctggtctcgaactcctgacctcaggtgatccacctgccttggtttcccaaagtgctggcattaccggcttgagccaccacgcctatccttctttcctgttcttttggtattaaaatattctttcttttatgaaaccgttttcgtaagaaatctagaagtctctgccctcaggatgaagtcccaattccttaagtggcatttgcttaaaggtctttcacagtccaactgcagattacatcacatagttccccagcttctgacaccccacatctattcactgactatccagtgacactgaatggaaacatggcatgtcttctcatgccttcaggcctctgaacaccttgcttccttttctcttttctcctgtcgctgcctcttttctcctcaccctccacagtttgtttctttctttctttctttttttgagacggagtctcgctctgtcgcccatgctggagtgcagtgacatgatctcggctcactgcaggctccgccttctgggttcacgccattctcctgcctcagcctcccaagtagctgggactacaggggcccgccacctcgcctggctatttttttgtatttttagtagagacgggttttcaccgtgttagccaggatggtcttgatctcgtgacctcgtgatccgccagcctcggcctcccaaagcttgctttcttttttctgagatggagtttcgcgcttgtcattcaggctggagtgcaatggtgccatctcagctcactgcaacctctgcctcccaggttcaagcgattctcccacctcagcctcccaagtagctgggattacaggcgcccgccatcatagccggctaatttttgtatttttgtagggacggggtttcactatgttggccaagctggtcttgaactcctgacctcaggtgatataccctcctcagcctcccaaagtgctgggattacagcctggcccacagtttcttcctctttgacctttccttccccatgccaggcagcctgagtcactccctcctcaatatagcgctgatcacatgtcctgcaattgcctgtctcattatgtgtctcttcccatcagctgccagttcctggaggtagggcctgggtctcacagcctgtcctgagtagtagccactcaatgaacatatgtcaaatgaatgaaagaatgaatgtttttgggaggccaaggtgggtgaatcacctgaggtcaggagtttgagaccagcctggccaacatggcaaaaccctgcctctactaaaaatacaaaaaattagctgggcgtggtggtgggtgcctgtaatcacagctacttgggaggctgaggcaggagaattgcttgaacccagaacggggaggttgcagtgagccgagatcatgccattgcactccagcatgggcaacagagcgagactctgtcaaaagaaaaacaaaacaaaaaaggaatgaacgttaatttttgagacatatccatgtccttctgcttgtgaagtttagtctttcccggtaggttgaaccttgctcaaaggaagaggagcctctgatttccttatttcccactatactgcatttacccttgctgccctgtgcagtactctgcatgtagtaggtactaatgtgctgattacctgttcttctatgttctctgtgtggctttcctctacttattccctccctagaactctctgcagtgtctgagctcctgcagcatgggctgccccagataagcagcaggagccctgaaagccttgccttcctgtctgatcgccagtacatggagggagctgctcgccagagacagtactgcatcctgctcctcttctacttggcctacatccatgaagacaggtttgtctcagaggcagagttatttgaggctgtgcaaagcttcctcctgtcgctgcaggaccagggcgagcgccccccactggtggtcttcaaagcctccatctatctgcttgcaatctgccaggacaaagacaatacactacgtgagactatggtcagtgcaatcagaaaattcctagaaggcatcccagacctgcagctagtctatactcaccatccgctcctgctcaggttctttctgttgtatccagagctcatgagtaggtatgggcaccgtgtcctggaactttggttcttctgggaagagagcagctatgaggaactggatgatgtcacctctgctgggcagcccgcccttcctgccagcttagtagtcctgttccagttgctcagaagcatccccagcatcctgctcatcttgctggacctcatctattccagcccagtggacacagctcacaaggtactgattagcctgaggaccttcctgaggaggaatgaggatatccaagtgggcggtcttatccgaggccacttcctgctgatcctgcagcgtctgctagtggagcatggggcatccccatcaggagtcctccttgttcttcacagcctcggggaacctaccattgctgctgagcctcctctccctgatgcagctcaggaatgtgtcagagcaagaactggacagcgtggccatgaagctccttcaccaagtaagcaagctgtgtgggaagtgcagccccactgacgtggacatcctgcagccctccttcaacttcctgtattggagccttcatcagaccacacccagcagtcagaaaagagctgctgcagtgctcctgagcagcacaggcctgatggagcttctggagaagatgctggccctcaccttggcaaaggcagattctcccaggactgcactcctctgctctgcctggctgctcactgcctccttctctgcccagcagcacaagggcagtttgcaggttcaccagacactctctgtggaaatggaccaagtattgaaggctctcagctttccaaagaaaaaggctgcactactctcagctgccatcttatgcttcctgcggacagccctgcgacaaagcttttcctctgccctggtagccctggtgccctcaggggcccagccactgccagccaccaaggacactgtcctagctccactgcgaatgtcgcaagtccggtccctggtcattgggctgcagaacctcctggtgcagaaggaccctctattgtcccaggcctgtgttggctgcctggaggccttgcttgactacctggatgcccggagcccagacattgctctccacgtggcctcccagccttggaatcggtttttgctgtttaccctcttggatgctggagagaattccttcctcagacctgagattttgaggctcatgaccctgtttatgcggtaccggagtagcagtgtcctctctcatgaagaggtgggtgatgttctgcaaggtgtggctttggctgacctgtctaccctctcgaacaccacactccaggccctgcatggcttcttccagcagctccagagcatgggacacctggctgaccacagcatggcccagaccctgcaggcctccttggagggccttccccctagcacctcctcaggccagccacccctgcaggacatgctctgcctgggaggggtggctgtatccctgtcccacatcagaaactgatcctcaggacttgaaggcccagaagtggagagagaatgagacctggagacaaagggcataattgttggggaaatggatgacagctgaagctattcatatggagccatatactctattgttgaaatagaataaggaaataaaatgatacactcacat

SEQ ID NO: 323315 - DNA, 1824 bp, Artificial Sequence
  derived and/or modified sequence
atgtgccttaacctcctttcagcccctgaaaaaacagggcctcccagtaaggaggagttgtctgcggtctccgaactgctgcaacacgggctcccacagattagctctagatctccggagtccctggctttcctctccgatcgccagtatatggaaggcgctgccagacagcgtcagtactgcattctccttttgttttacctggcatatatacacgaagatcggttcgtctcagaagccgagctattcgaggcagtccaatcatttcttctgtctttacaggaccagggggagaggcctcctctagtcgtgttcaaggcttcgatatacctgttggcaatttgtcaagataaggataacactttgagggaaacgatggtttcagccattcgaaaatttctggaaggcatcccagacttgcagctggtctacactcatcacccactgctcttgcgctttttcttgctctatcctgaactgatgtcccggtacgggcaccgggtgctggaactttggttcttttgggaggaatcatcttacgaagagcttgatgatgtgacctcagccggacaaccagctctgcccgctagcctggttgtcctgtttcaacttcttaggagcatccccagtattctgttgattctgttagatttgatttacagttccccagtcgacaccgcccataaagtactcattagtttgagaaccttcttacgtagaaatgaggacatccaggtcggaggcctgataagagggcatttcctgttaatcttgcaacgcctgctcgtcgaacatggggctagcccttccggtgtatccaagctctgcggtaagtgctcacccacagacgtcgatattcttcagcccagtttcaatttcttatattggtctctgcaccaaacgacaccctcatcccagaagagggctgctgctgtgctgcttagtagcactggacttatggaactgcttgaaaaaatgctcgctcttacactggcgaaggctgatagtccacgcaccgcgctgttgtgctcggcatggctgctcacggccagcttcagcgctcagcagcacaagggctcattgcaggtccaccagacactgtccgtggagatggatcaagtgctcaaagcactctcatttcccaagaagaaagccgcattgctgagtgctgccattctgtgttttctcagaaccgcactgcgccaaagcttcagtagcgccttggtggccctggtcccatccggagcccagcccctgcccgcaaccaaggatacggtgttagctccgttgcggatgtctcaagttaggtcactcgtgatcgggttacaaaacctgctcgtgcaaaaggatccactacttagccaagcctgcgtaggctgcctggaggctctgttggattatcttgatgccaggtcccctgatatagctcttcacgtggcttcacagccttggaatcgctttctgctgtttaccctgttagacgccggtgaaaacagttttctgcgccctgagattcttaggctaatgacattgtttatgagatacagaagcagctccgtgctctctcacgaagaggtcggagatgttttacagggcgtcgcgctcgctgatctctctacactgagcaatacgaccttacaggctctccatgggttttttcagcagcttcaaagcatgggacacttggccgatcacagcatggctcagacacttcaggctagccttgaggggcttccacctagcacctcttctggccagccacctctacaagatatgctatgcttgggcggagtggccgtctctttatcccacattcgtaactag

SEQ ID NO: 323316 - protein, 238 aa, Artificial Sequence
  derived and/or modified sequence
MLALTLAKADSPRTALLCSAWLLTASFSAQQHKGSLQVHQTLSVEMDQVLKALSFPKKKAALLSAAILCFLRTALRQSFSSALVALVPSGAQPLPATKDTVLAPLRMSQVRSLVIGLQNLLVQKDPLLSQACVGCLEALLDYLDARSPDIALHVASQPWNRFLLFTLLDAGENSFLRPEILRLMTLLQSMGHLADHSMAQTLQASLEGLPPSTSSGQPPLQDMLCLGGVAVSLSHIRN

SEQ ID NO: 323317 - DNA, 717 bp, Artificial Sequence
  derived and/or modified sequence
atgctggccctgaccctggccaaggccgacagccccagaaccgccctgctgtgcagcgcctggctgctgaccgccagcttcagcgcccagcagcacaagggcagcctgcaggtgcaccagaccctgagcgtggagatggaccaggtgctgaaggccctgagcttccccaagaagaaggccgccctgctgagcgccgccatcctgtgcttcctgagaaccgccctgagacagagcttcagcagcgccctggtggccctggtgcccagcggcgcccagcccctgcccgccaccaaggacaccgtgctggcccccctgagaatgagccaggtgagaagcctggtgatcggcctgcagaacctgctggtgcagaaggaccccctgctgagccaggcctgcgtgggctgcctggaggccctgctggactacctggacgccagaagccccgacatcgccctgcacgtggccagccagccctggaacagattcctgctgttcaccctgctggacgccggcgagaacagcttcctgagacccgagatcctgagactgatgaccctgctgcagagcatgggccacctggccgaccacagcatggcccagaccctgcaggccagcctggagggcctgccccccagcaccagcagcggccagccccccctgcaggacatgctgtgcctgggcggcgtggccgtgagcctgagccacatcagaaactag

SEQ ID NO: 323318 - DNA, 717 bp, Artificial Sequence
  derived and/or modified sequence
atgctggccctcacactggccaaggcagacagcccgagaaccgctctgctgtgtagtgcttggctgctgacggctagcttctcggcccaacagcacaaggggagcctgcaggtccatcaaaccctcagtgtggaaatggaccaagtgctgaaagctttaagttttcccaaaaaaaaagcagccctgctgtctgcagctatcttatgtttcttaaggaccgctctccggcagtcgttcagcagcgctctggtggcattagtgccatctggtgcccagcctttgcccgccacaaaggatacagtccttgctcccctaagaatgagtcaagtcaggtctctggtgatcggcctgcagaatcttctcgtccagaaagaccccttgctgtctcaggcctgcgttggatgcctggaggccctgctcgactacctggacgcccggagccccgacatagctctgcacgttgcctcacagccatggaatcggtttctcctgttcaccctcctggatgctggtgagaatagtttcctgaggcctgaaatcctgcgtttaatgacactccttcagagcatgggccatctcgcggaccactccatggcacaaacactgcaggcctcgctagaagggctacctccctccacgagctctgggcagcctcctctacaagatatgttgtgtctcggcggagtggcggtgagtttaagccatataaggaactag

SEQ ID NO: 323319 - DNA, 717 bp, Artificial Sequence
  derived and/or modified sequence
atgctggccctgaccctggccaaggctgacagccccaggacagccctgctgtgcagcgcctggctgctgacagccagcttcagcgcccagcagcacaagggcagcctgcaggtgcaccagaccctgtctgtggagatggaccaggtgctgaaggccctgtccttccccaagaagaaggccgccctgctgtctgctgccatcctgtgcttcctgaggacagccctgcggcagagcttcagcagcgccctggtggccctggtgcccagcggggcccagcccctgcctgccaccaaggacacagtgctggcccccctgaggatgagccaggtgcgcagcctggtgattggcctgcagaacctgctggtgcagaaggaccccctgctgagccaggcctgtgtgggctgcctggaggccctgctggactacctggatgcccggagcccagacatcgccctgcacgtggccagccagccctggaaccgcttcctgctcttcaccctgctggatgctggggagaacagcttcctgcggcctgagatcctgcggctgatgaccctgctgcagagcatgggccacctggccgaccacagcatggcccagaccctgcaggccagcctggagggcctgccccccagcaccagcagcggccagccccccctgcaggacatgctgtgcctgggcggcgtggccgtgtccctgagccacatcagaaattag

SEQ ID NO: 323320 - DNA, 3874 bp, Artificial Sequence
  derived and/or modified sequence
gcctcagctgagggcaagcgaggagatggctgtgaggcaggcggcgacggcgggcactcccgggcccaggagagaggaagaggcggcgcttctattcgagagggcccattaccggcacgacccgcgctggctgctgcccgtgaccccccgcctgtgcctggcctgcgcgctggagctgctgccggaccccggcgtgtcgttagtgcgcaagaagcacatgttgtcctgcttccaagatgcccttgtgaggcatacctccctggtcacgcaactggtgtctcaggatcagagagtctgcatccacttcataagtgtgctttttggactattatgcagcatggaagatgggagtgtgacagacctctgtattgaagtccttattcagatcacaacgcagctgaagctggagcagactatccgttgcctgctggatgagtgccacaaagagctgtgtaacatgccctccatgcgaggcagcctggccaccctgacccttcttggcaagttggtggatgccatccctgctctggcagacgagcttgtaatggagcatggcaacctgatggagcatctgttgagaggcttagtataccccagtgagggcatacaagcttctgtctgttacctttatgggaagctatactcctcaccagtggcagctgagatgctttcaggacacttccgtgagaagctttttcccctcttcctttccatcctggatggtgcccagacaaaggagctgcagattaactgcttgggtttgctgaggcagctgttgaagtatgatctctttgtgtccatgatcatgaaccaggatggactgggagaaagtgctaagaatatcgaagggtcatcaggaaatacctcactgcctttggtgctcaaaaagcttctcctctctagagatgaaaccctgcaggtggccagtgctcactgtataactgcggtgcttgtccactccccagcaaagcatgcgtcagccttcatccacgctgacatcccagagttcctctttgagcatctttcttcttccagtgaagtgctcgtctggtccagctgtaactgcttgacactcctggtagaagagccactctttttttccaagtgccacacggtgtatgggatcgaggcagtggtgaggagcctgcagggaagcctgaagatgaacaacatagagctgcacaagcagggcctgctgcttttcgctgaaatcctgacccggcagccagaggagatcaagctgttcacaagctcagccatgtgcagagatgctggccgtgccctccaagaagcagttagcagccctgtgctggaggtggctgctgaggccttgaaggccacttctgcttttctgaggaaggaccatcagagcactccacctgtgcagtatggggaactgcaggctttgctagaagccatgctaaaccgatgtgcggagttttcccagaccttgctgagcaggaggcccctgggccatgcctccagtagagattcagagaaggccattcttcaaaggggaaagttcctcctcagcactctggagggatttagaagtgcctgcaggttggctatagaattccagagtgagccttcagcccaggagaatccattcacagctcccagcgccaagaaggaagacaccttggaggccttctcagaatttcttctcagtgcctgtgactcgctgtgtatccccatggtgatgagacacttggagcagaccacccacccagctttgatggaagttttcctctcaattctacataacctctttgtcatcgttccccacatgaaggagaagttttccaagaagcttgcttcctcatccttcatacgactgaccctggagctgaaggccaggttttgcagtggtctgagtcactcagccctaaaccaggtgtgttccaatttcctctactatatgtgcctcaaccttctctcagctccagagaagacaggaccaccttccaaagaagaactctctgcagtgtctgagctcctgcagcatgggctgccccagataagcagcaggagccctgaaagccttgccttcctgtctgatcgccagtacatggagggagctgctcgccagagacagtactgcatcctgctcctcttctacttggcctacatccatgaagacaggtttgtctcagaggcagagttatttgaggctgtgcaaagcttcctcctgtcgctgcaggaccagggcgagcgccccccactggtggtcttcaaagcctccatctatctgcttgcaatctgccaggacaaagacaatacactacgtgagactatggtcagtgcaatcagaaaattcctagaaggcatcccagacctgcagctagtctatactcaccatccgctcctgctcaggttctttctgttgtatccagagctcatgagtaggtatgggcaccgtgtcctggaactttggttcttctgggaagagagcagctatgaggaactggatgatgtcacctctgctgggcagcccgcccttcctgccagcttagtagtcctgttccagttgctcagaagcatccccagcatcctgctcatcttgctggacctcatctattccagcccagtggacacagctcacaaggtactgattagcctgaggaccttcctgaggaggaatgaggatatccaagtgggcggtcttatccgaggccacttcctgctgatcctgcagcgtctgctagtggagcatggggcatccccatcaggagcctcggggaacctaccattgctgctgagcctcctctccctgatgcagctcaggaatgtgtcagagcaagaactggacagcgtggccatgaagctccttcaccaagtaagcaagctgtgtgggaagtgcagccccactgacgtggacatcctgcagccctccttcaacttcctgtattggagccttcatcagaccacacccagcagtcagaaaagagctgctgcagtgctcctgagcagcacaggcctgatggagcttctggagaagatgctggccctcaccttggcaaaggcagattctcccaggactgcactcctctgctctgcctggctgctcactgcctccttctctgcccagcagcacaagggcagtttgcaggttcaccagacactctctgtggaaatggaccaagtattgaaggctctcagctttccaaagaaaaaggctgcactactctcagctgccatcttatgcttcctgcggacagccctgcgacaaagcttttcctctgccctggtagccctggtgccctcaggggcccagccactgccagccaccaaggacactgtcctagctccactgcgaatgtcgcaagtccggtccctggtcattgggctgcagaacctcctggtgcagaaggaccctctattgtcccaggcctgtgttggctgcctggaggccttgcttgactacctggatgcccggagcccagacattgctctccacgtggcctcccagccttggaatcggtttttgctgtttaccctcttggatgctggagagaattccttcctcagacctgagattttgaggctcatgaccctgctccagagcatgggacacctggctgaccacagcatggcccagaccctgcaggcctccttggagggccttccccctagcacctcctcaggccagccacccctgcaggacatgctctgcctgggaggggtggctgtatccctgtcccacatcagaaactgatcctcaggacttgaaggcccagaagtggagagagaatgagacctggagacaaagggcataattgttggggaaatggatgacagctgaagctattcatatggagccatatactctattgttgaaatagaataaggaaataaaatgatacactcacat

SEQ ID NO: 323321 - DNA, 717 bp, Artificial Sequence
  derived and/or modified sequence
atgctggccctgaccctggccaaggccgacagcccccggaccgccctcctgtgctcggcttggctgcttacagctagcttttccgcccaacagcataaaggctcgctccaagtgcaccagacactaagtgttgagatggaccaggtgttgaaagccctgtcattcccgaaaaaaaaggcagctctgctgtcagcagccatcttatgtttcctgcggaccgccctgagacagagcttttcctccgcactggtagcgctcgttccatccggagcccagcccctaccggccaccaaagataccgtgctggcccccctgagaatgtcccaggtgagatcattggtaattggtctacaaaatttgttagttcagaaagaccccctgctcagccaagcatgcgtaggatgtctggaggctctcctcgactatctcgacgcacggtcccccgacatcgcattgcatgtggccagtcagccatggaacagattcctgctcttcaccctgctggacgcaggggagaatagtttccttagacccgagatactacgcctgatgaccttgctgcagagcatggggcacctggcggatcattccatggcccagaccctccaagcctcattggaggggttacctccttcaacatcgagcggtcagccacctcttcaggacatgctatgtctggggggggtggctgtaagtctgtcacatattaggaactag

SEQ ID NO: 323322 - DNA, 717 bp, Artificial Sequence
  derived and/or modified sequence
atgctggccttaactctggctaaagccgactcccctagaacagccttgctgtgttctgcatggctgctaaccgccagcttctctgctcagcagcacaaaggaagcctccaggttcaccagaccctgtctgtggagatggaccaggtgctgaaggccctgtcgttcccaaaaaaaaaggcggctctgctctctgcagccatcctgtgttttttaagaaccgccttgcgccagagcttttcctccgcactggtggccctggttccttctggagctcagccactgcctgccacaaaggacacagtcctggctccactgcggatgagccaagtgaggtccctggtcatcggcctccagaacttgctggtccagaaggacccactgctaagccaggcatgtgtgggatgtctggaggcactcttagactacctcgacgcacgaagccctgatatcgccctccacgtcgcatcgcagccgtggaaccggtttctcttgtttacacttctggacgcgggagagaactctttcctgaggcccgagattctgaggctgatgacactcctccagtcgatgggtcacctggcagaccattcaatggcgcaaactttacaggcctctctcgaaggcctgcctccttctaccagtagcggacaacctcccctccaggacatgctctgtctagggggagtcgcagtatccctgagccatattcggaattag

SEQ ID NO: 323323 - protein, 269 aa, Artificial Sequence
  derived and/or modified sequence
MEGAARQRQYCILLLFYLAYIHEDRFVSEAELFEAVQSFLLSLQDQGERPPLVVFKASIYLLAICQDKDNTLRETMVSAIRKFLEGIPDLQLVYTHHPLLLRFFLLYPELMSRYGHRVLELWFFWEESSYEELDDVTSAGQPALPASLVVLFQLLRSIPSILLILLDLIYSSPVDTAHKVLISLRTFLRRNEDIQVGGLIRGHFLLILQRLLVEHGASPSGVLLVLHSLGEPTIAAEPPLPDAAQECVRARTGQRGHEAPSPRCPGCLG

SEQ ID NO: 323324 - DNA, 810 bp, Artificial Sequence
  derived and/or modified sequence
atggagggcgccgccagacagagacagtactgcatcctgctgctgttctacctggcctacatccacgaggacagattcgtgagcgaggccgagctgttcgaggccgtgcagagcttcctgctgagcctgcaggaccagggcgagagaccccccctggtggtgttcaaggccagcatctacctgctggccatctgccaggacaaggacaacaccctgagagagaccatggtgagcgccatcagaaagttcctggagggcatccccgacctgcagctggtgtacacccaccaccccctgctgctgagattcttcctgctgtaccccgagctgatgagcagatacggccacagagtgctggagctgtggttcttctgggaggagagcagctacgaggagctggacgacgtgaccagcgccggccagcccgccctgcccgccagcctggtggtgctgttccagctgctgagaagcatccccagcatcctgctgatcctgctggacctgatctacagcagccccgtggacaccgcccacaaggtgctgatcagcctgagaaccttcctgagaagaaacgaggacatccaggtgggcggcctgatcagaggccacttcctgctgatcctgcagagactgctggtggagcacggcgccagccccagcggcgtgctgctggtgctgcacagcctgggcgagcccaccatcgccgccgagccccccctgcccgacgccgcccaggagtgcgtgagagccagaaccggccagagaggccacgaggcccccagccccagatgccccggctgcctgggctag

SEQ ID NO: 323325 - DNA, 810 bp, Artificial Sequence
  derived and/or modified sequence
atggaaggtgctgctcgacagagacagtactgtatcttgctgctgttttacctcgcctatatccacgaggaccgatttgtgagtgaggccgaactcttcgaggcagtccagtcctttcttctgagcttacaagatcagggtgagagacctcctctggtggtatttaaggcctctatttaccttctggctatttgtcaggataaggataacacgctccgggaaacgatggtgagtgcaataagaaaatttctggagggcatcccggacttgcagcttgtctacactcaccatcctctgctgctgcgttttttcctcctgtatcccgagctaatgtctcgctatggccaccgtgtcctagagctgtggttcttctgggaggagagttcttacgaagaattggatgatgtaacctccgcggggcagccagccctgcccgccagcctcgtggtcttattccagctcctacggtcgataccgtcgatcctgctcatcctcctggacctcatatatagctctcctgtagacaccgcacacaaagtgctcatctctttacgtactttcctgaggcgcaacgaagacattcaggtcggcggcctaattcgcgggcacttcttgctaatcctgcagagactgctggtggaacatggagcgtctccatccggggtgcttctcgttttgcattcactgggtgagcctactatcgccgccgaaccccccctacccgatgctgctcaggaatgcgtgagggcacgcactgggcagagaggtcacgaagccccaagccctcgctgccctggttgtctcggatag

SEQ ID NO: 323326 - DNA, 810 bp, Artificial Sequence
  derived and/or modified sequence
atggagggcgccgcccggcagaggcagtactgcatcctgctgctcttctacctggcctacatccatgaagatagatttgtgtctgaggccgagctgtttgaagctgtgcagagcttcctgctgagcctgcaggaccagggcgagcggccccccctggtggtgttcaaggccagcatctacctgctggccatctgccaggacaaggacaacaccctgcgggagaccatggtgtctgccatcaggaagttcctggagggcatcccagacctgcagctggtgtacacccaccaccccctgctgctgcgcttcttcctgctgtacccagagctgatgagccgctatggccaccgggtgctggagctgtggttcttctgggaggagagcagctatgaggagctggatgatgtgaccagcgctggccagcctgccctgcctgccagcctggtggtgctcttccagctgctgcggagcatccccagcatcctgctgatcctgctggacctgatctacagcagccctgtggacacagcccacaaggtgctgatcagcctgcggaccttcctgcggagaaatgaagacatccaggtgggcggcctcatccggggccacttcctgctgatcctgcagaggctgctggtggagcacggggccagccccagcggcgtgctgctggtgctgcacagcctgggggagcccaccatcgctgctgagccccccctgcctgatgctgcccaggagtgtgtgcgggccaggacaggccagaggggccacgaggcccccagcccccgctgccccggctgcctgggctag

SEQ ID NO: 323327 - DNA, 810 bp, Artificial Sequence
  derived and/or modified sequence
atggagggcgccgcccggcagcggcagtactgcatcctgctgctgttttatcttgcttatattcacgaggataggttcgtgtccgaggccgaactgtttgaagcagttcaatctttccttctgtccctgcaagatcagggtgagagaccaccactggtcgtgttcaaggcatctatctacctactcgcaatctgtcaagataaggacaacactcttagggagacaatggtcagcgctattcggaaattcctggagggcattcctgatttgcaactggtttatacccaccacccactgctactaaggttctttttgctgtatcccgaactaatgtctcgttacggacatcgcgtgctcgagctgtggtttttctgggaggagtccagttacgaagaactcgacgacgtcacctccgccggtcaacctgcactgcccgctagcctcgtcgtgcttttccagctgttgaggtcaattccgtccattctcttgattttgctggacttgatctattcatctccagtcgacaccgcccacaaggttctcatctcgctcagaacctttcttcggcgaaacgaggatatccaggtcggcgggctgataagggggcacttcttacttattttgcagcgcctgctcgtggaacacggagccagcccttctggggtccttctggttctgcactctctcggggagcccaccatagcagccgagcctcctctgcctgatgccgcccaggagtgtgtccgcgcaaggaccggacagcgggggcatgaagcacctagcccgagatgtcccggatgcctcgggtag

SEQ ID NO: 323328 - DNA, 810 bp, Artificial Sequence
  derived and/or modified sequence
atggagggggctgcaaggcaacgccagtattgtatccttctgcttttctaccttgcatacattcatgaggaccgatttgtgagtgaggctgaactcttcgaagcggttcaaagtttccttctgagtctacaagaccaaggcgagcgaccgccactagtcgtgtttaaagcatcaatttatctcttggcaatctgtcaggataaagacaacaccctgagggagaccatggtctcagccattagaaagttcctggaaggcatccctgacctgcaactcgtctacactcatcacccgttgttgctgcggtttttcttactgtacccagagttgatgagtcgctacggacaccgcgtgctcgagctgtggttcttctgggaggagagcagctacgaggagcttgacgatgtcacctcggccggacagccggctctgcccgcatccttggtggtgcttttccagctgctgcggtccattccttccatcctcctgatactgttagacctgatctactcatctcccgtggacaccgcccataaagtactcatcagtcttcgaacatttttgagacggaatgaggatatacaggtgggcggacttatcagggggcactttctgttgatcttgcagagacttctcgtggagcacggagcctcaccctcgggtgtcttgcttgtgctgcacagcctaggcgagcccaccatagcagcggaacctcccctaccagacgccgcacaggagtgcgtcagggcccgaaccggtcaaagggggcacgaagccccttctccccgatgccccggttgtctcggttag

SEQ ID NO: 323329 - DNA, 1155 bp, Artificial Sequence
  derived and/or modified sequence
atgggccacccccaccaggagagcagcctgttcttcaccgccagcggcaacctgcccctgctgctgagcctgctgagcctgatgcagctgagaaacgtgagcgagcaggagctggacagcgtggccatgaagctgctgcaccaggtgagcaagctgtgcggcaagtgcagccccaccgacgtggacatcctgcagcccagcttcaacttcctgtactggagcctgcaccagaccacccccagcagccagaagagagccgccgccgtgctgctgagcagcaccggcctgatggagctgctggagaagatgctggccctgaccctggccaaggccgacagccccagaaccgccctgctgtgcagcgcctggctgctgaccgccagcttcagcgcccagcagcacaagggcagcctgcaggtgcaccagaccctgagcgtggagatggaccaggtgctgaaggccctgagcttccccaagaagaaggccgccctgctgagcgccgccatcctgtgcttcctgagaaccgccctgagacagagcttcagcagcgccctggtggccctggtgcccagcggcgcccagcccctgcccgccaccaaggacaccgtgctggcccccctgagaatgagccaggtgagaagcctggtgatcggcctgcagaacctgctggtgcagaaggaccccctgctgagccaggcctgcgtgggctgcctggaggccctgctggactacctggacgccagaagccccgacatcgccctgcacgtggccagccagccctggaacagattcctgctgttcaccctgctggacgccggcgagaacagcttcctgagacccgagatcctgagactgatgaccctgttcatgagatacagaagcagcagcgtgctgagccacgaggaggtgggcgacgtgctgcagggcgtggccctggccgacctgagcaccctgagcaacaccaccctgcaggccctgcacggcttcttccagcagctgcagagcatgggccacctggccgaccacagcatggcccagaccctgcaggccagcctggagggcctgccccccagcaccagcagcggccagccccccctgcaggacatgctgtgcctgggcggcgtggccgtgagcctgagccacatcagaaactag

SEQ ID NO: 323330 - DNA, 1155 bp, Artificial Sequence
  derived and/or modified sequence
atgggacaccctcatcaggagagttcccttttcttcacggctagcgggaaccttccactgctgctcagcctgttatctctgatgcagctgcgcaatgtttcagaacaagagctggactcagtcgccatgaaattgctgcaccaggtgtcaaaattgtgcggcaagtgttcaccaactgatgtggatatccttcagcccagctttaatttcctgtactggtcccttcaccagacaacaccaagcagtcagaagcgtgctgccgctgtcctgctgagctccacaggcctcatggaactgctagagaagatgctggcactgactctggccaaggccgattcacccagaaccgccctgctgtgcagcgcttggctgttgaccgccagctttagcgcacaacagcacaagggtagtctgcaggtccaccaaacccttagtgtagagatggaccaagttctgaaagctctgtccttcccaaaaaagaaagctgccctgctgtcggccgctattttatgtttcctgcgcacggcactaaggcagtcgttctctagtgccctcgtagccttggtcccgagcggagcccaaccgctccctgctaccaaggataccgtgctggccccattgaggatgtctcaggttagatccttggtaattggcttacagaacctccttgttcagaaagatccacttctgtctcaggcttgcgtcggatgcctcgaggctctcttggactatttagatgccagatcacctgacatagctttacacgtggccagtcagccctggaacagatttttattgttcaccctccttgacgcaggagaaaatagctttttacgtcccgaaatattaaggctgatgacattgttcatgagataccggtctagctcggtgctttcgcacgaagaagtgggggacgttctccagggcgttgccctggccgacctcagcaccttgagcaacacgaccctgcaggcactccacgggttctttcagcaattgcagtctatggggcaccttgctgaccacagtatggcgcagacactccaagcgagtcttgaggggctcccaccctccacctccagcggtcaaccccctctccaggacatgttatgcctgggtggcgtcgccgtgtccctgagccatattagaaactag

SEQ ID NO: 323331 - DNA, 1155 bp, Artificial Sequence
  derived and/or modified sequence
atgggccacccccaccaggagagcagcctcttcttcaccgccagcggcaacctgcccctgctgctgagcctgctgagcctgatgcagctgagaaatgtgtctgagcaggagctggacagcgtggccatgaagctgctgcaccaggtgtccaagctgtgtgggaagtgcagccccacagatgtggacatcctgcagcccagcttcaacttcctgtactggagcctgcaccagaccacccccagcagccagaagagagctgctgctgtgctgctgagcagcacaggcctgatggagctgctggagaagatgctggccctgaccctggccaaggctgacagccccaggacagccctgctgtgcagcgcctggctgctgacagccagcttcagcgcccagcagcacaagggcagcctgcaggtgcaccagaccctgtctgtggagatggaccaggtgctgaaggccctgtccttccccaagaagaaggccgccctgctgtctgctgccatcctgtgcttcctgaggacagccctgcggcagagcttcagcagcgccctggtggccctggtgcccagcggggcccagcccctgcctgccaccaaggacacagtgctggcccccctgaggatgagccaggtgcgcagcctggtgattggcctgcagaacctgctggtgcagaaggaccccctgctgagccaggcctgtgtgggctgcctggaggccctgctggactacctggatgcccggagcccagacatcgccctgcacgtggccagccagccctggaaccgcttcctgctcttcaccctgctggatgctggggagaacagcttcctgcggcctgagatcctgcggctgatgaccctcttcatgagataccgcagcagctctgtgctgagccatgaggaggtgggagatgtgctgcagggcgtggccctggccgacctgagcaccctgagcaacaccaccctgcaggccctgcacggcttcttccagcagctgcagagcatgggccacctggccgaccacagcatggcccagaccctgcaggccagcctggagggcctgccccccagcaccagcagcggccagccccccctgcaggacatgctgtgcctgggcggcgtggccgtgtccctgagccacatcagaaattag

SEQ ID NO: 323332 - DNA, 1155 bp, Artificial Sequence
  derived and/or modified sequence
atgggccacccccaccaggagagcagcctgttcttcaccgccagcggcaatctacctcttctgctgtccctgctctccctgatgcagcttcgcaatgtatctgagcaggaactggactccgtggccatgaaactcctgcaccaggtatccaagctttgtgggaagtgttctccaactgacgttgacatattgcaaccatccttcaattttctgtattggtcccttcaccagactacgccaagtagccagaaacgagccgccgctgttctcctatcttccactggactgatggagctgttggaaaaaatgcttgccttgactttggcaaaagccgatagcccaaggacagctcttctttgtagcgcctggcttttgaccgcatccttctccgctcagcaacacaagggttccctgcaggtgcaccaaactctatcggtcgaaatggaccaggtgcttaaggccctgtctttccctaaaaaaaaagccgccctactgtccgcggcgatcctgtgcttccttcgtactgcattaagacagtcattctcttccgcgctcgtggctttggtccccagcggagctcagcccctacctgctactaaagatacagtgctggcaccactgaggatgtcgcaggttaggtccctcgtcattgggttgcaaaatctgctagtacaaaaggatccccttctaagtcaggcttgcgtgggatgcttagaagcgctgctggattatctcgacgcaagatcccccgatattgcgcttcacgtggcctctcaaccatggaatagatttttactctttacactgcttgatgctggggagaactccttcttacgcccggaaatcctgaggctgatgaccttgttcatgaggtataggtcctcatcagttctgagccatgaagaagtcggagacgtgctccagggtgtggcccttgcggacttatccaccctgtcgaatacaacgttgcaagcactgcacggatttttccagcaactacagagcatggggcacctggccgaccatagtatggcgcagaccctgcaagcctcactggaaggactccccccgtccacatccagtggacagcctcctctccaagatatgctctgcttaggaggtgtggccgtatcccttagccacatccgtaattag

SEQ ID NO: 323333 - DNA, 1358 bp, Artificial Sequence
  derived and/or modified sequence
gataccacccaggcttgggactctctgtgacaagtctggtttaaactgctctctgctttattcccacttctctgaagcttcctcatccttcatacgactgaccctggagctgaaggccaggttttgcagtggtctgagaactctctgcagtgtctgagctcctgcagcatgggctgccccagataagcagcaggagccctgaaagccttgccttcctgtctgatcgccagtacatggagggagctgctcgccagagacagtactgcatcctgctcctcttctacttggcctacatccatgaagacaggtttgtctcagaggcagagttatttgaggctgtgcaaagcttcctcctgtcgctgcaggaccagggcgagcgccccccactggtggtcttcaaagcctccatctatctgcttgcaatctgccaggacaaagacaatacactacgtgagactatggtcagtgcaatcagaaaattcctagaaggcatcccagacctgcagctagtctatactcaccatccgctcctgctcaggttctttctgttgtatccagagctcatgagtaggtatgggcaccgtgtcctggaactttggttcttctgggaagagagcagctatgaggaactggatgatgtcacctctgctgggcagcccgcccttcctgccagcttagtagtcctgttccagttgctcagaagcatccccagcatcctgctcatcttgctggacctcatctattccagcccagtggacacagctcacaaggtactgattagcctgaggaccttcctgaggaggaatgaggatatccaagtgggcggtcttatccgaggccacttcctgctgatcctgcagcgtctgctagtggagcatggggcatccccatcaggagtcctccttgttcttcacagcctcggggaacctaccattgctgctgagcctcctctccctgatgcagctcaggaatgtgtcagagcaagaactggacagcgtggccatgaagctccttcaccaaggtgccctggctgcttgggatagcgcccaagggcccagggctggacgtgcagtgggtgctcactaataagcaagctgtgtgggaagtgcagccccactgacgtggacatcctgcagccctccttcaacttcctgtattggagccttcatcagaccacacccagcagtcagaaaagagctgctgcagtgctcctgagcagcacaggcctgatggagcttctggagaagatgctggccctcaccttggcaaaggcagattctcccaggactgcactcctctgctctgcctggctgctcactgcctccttctctgcccagcagcacaagggcagtttgcag

SEQ ID NO: 323334 - DNA, 1155 bp, Artificial Sequence
  derived and/or modified sequence
atgggtcaccctcatcaggaatctagtctgtttttcaccgcctccggtaatctaccactgctcctatccctcctgtccctcatgcagctgcggaacgtcagcgagcaggagcttgactccgtggcaatgaaattgctgcatcaggtgtccaagctgtgcggaaagtgcagcccaactgacgtcgacatcctacagccatcatttaattttctgtactggagcctgcaccagaccaccccttcttctcagaaacgcgctgccgctgtgctgctaagcagcacgggcttgatggaattactcgagaagatgctggctttaactctggcaaaagccgatagccctaggacggctctactgtgctccgcttggcttctgacagcctccttttcagctcaacaacataaaggctcgcttcaggtacaccagaccctgtccgtagagatggatcaggtgctaaaagctttgtcctttccaaaaaagaaggcagcactcctctccgctgctatcctttgctttctccgcacagccttgcgacagtccttttcgtcagccctcgtggccctggtgccaagcggggcacaaccactgccagctactaaagacacagttctagcacccctgcgcatgtcccaagtgcgaagccttgtgatcggactgcagaacttgttagttcagaaggacccactcctttcccaggcatgcgtggggtgcttggaagccttgctcgattacttggatgctcgttcccccgatattgctttgcatgttgccagccagccctggaatcgcttcctgttgttcactctgctagacgcgggtgaaaattccttccttcggccagaaatcctccgactgatgactttatttatgagatataggtcaagttccgtactgagccatgaagaggtcggcgatgtgctccagggggtcgcactggccgacctgtctaccctttctaatacaacactccaggccctacacggcttcttccagcagctccagagcatggggcacctggcagatcactcaatggcgcagacgttgcaggcctctctcgagggcctgcctccctcgacatccagcggacagccccctcttcaggacatgctgtgtctcgggggtgtggccgtttctctgtcacacattcgcaactag

SEQ ID NO: 323335 - protein, 506 aa, Artificial Sequence
  derived and/or modified sequence
MNQDGLGESAKNIEGSSGNTSLPLVLKKLLLSRDETLQVASAHCITAVLVHSPAKHASAFIHADIPEFLFEHLSSSSEVLVWSSCNCLTLLVEEPLFFSKCHTVYGIEAVVRSLQGSLKMNNIELHKQGLLLFAEILTRQPEEIKLFTSSAMCRDAGRALQEAVSSPVLEVAAEALKATSAFLRKDHQSTPPVQYGELQALLEAMLNRCAEFSQTLLSRRPLGHASSRDSEKAILQRGKFLLSTLEGFRSACRLAIEFQSEPSAQENPFTAPSAKKEDTLEAFSEFLLSACDSLCIPMVMRHLEQTTHPALMEVFLSILHNLFVIVPHMKEKFSKKLASSSFIRLTLELKARFCSGLSHSALNQVCSNFLYYMCLNLLSAPEKTGPPSKEELSAVSELLQHGLPQISSRSPESLAFLSDRQYMEGAARQRQYCILLLFYLAYIHEDRFVSEAELFEAVQSFLLSLQDQGERPPLVVFKASIYLLAICQDKDNTLREQLHCSLISIS

SEQ ID NO: 323336 - DNA, 1521 bp, Artificial Sequence
  derived and/or modified sequence
atgaaccaggacggcctgggcgagagcgccaagaacatcgagggcagcagcggcaacaccagcctgcccctggtgctgaagaagctgctgctgagcagagacgagaccctgcaggtggccagcgcccactgcatcaccgccgtgctggtgcacagccccgccaagcacgccagcgccttcatccacgccgacatccccgagttcctgttcgagcacctgagcagcagcagcgaggtgctggtgtggagcagctgcaactgcctgaccctgctggtggaggagcccctgttcttcagcaagtgccacaccgtgtacggcatcgaggccgtggtgagaagcctgcagggcagcctgaagatgaacaacatcgagctgcacaagcagggcctgctgctgttcgccgagatcctgaccagacagcccgaggagatcaagctgttcaccagcagcgccatgtgcagagacgccggcagagccctgcaggaggccgtgagcagccccgtgctggaggtggccgccgaggccctgaaggccaccagcgccttcctgagaaaggaccaccagagcaccccccccgtgcagtacggcgagctgcaggccctgctggaggccatgctgaacagatgcgccgagttcagccagaccctgctgagcagaagacccctgggccacgccagcagcagagacagcgagaaggccatcctgcagagaggcaagttcctgctgagcaccctggagggcttcagaagcgcctgcagactggccatcgagttccagagcgagcccagcgcccaggagaaccccttcaccgcccccagcgccaagaaggaggacaccctggaggccttcagcgagttcctgctgagcgcctgcgacagcctgtgcatccccatggtgatgagacacctggagcagaccacccaccccgccctgatggaggtgttcctgagcatcctgcacaacctgttcgtgatcgtgccccacatgaaggagaagttcagcaagaagctggccagcagcagcttcatcagactgaccctggagctgaaggccagattctgcagcggcctgagccacagcgccctgaaccaggtgtgcagcaacttcctgtactacatgtgcctgaacctgctgagcgcccccgagaagaccggcccccccagcaaggaggagctgagcgccgtgagcgagctgctgcagcacggcctgccccagatcagcagcagaagccccgagagcctggccttcctgagcgacagacagtacatggagggcgccgccagacagagacagtactgcatcctgctgctgttctacctggcctacatccacgaggacagattcgtgagcgaggccgagctgttcgaggccgtgcagagcttcctgctgagcctgcaggaccagggcgagagaccccccctggtggtgttcaaggccagcatctacctgctggccatctgccaggacaaggacaacaccctgagagagcagctgcactgcagcctgatcagcatcagctag

SEQ ID NO: 323337 - DNA, 1521 bp, Artificial Sequence
  derived and/or modified sequence
atgaatcaagacggtctgggcgagtctgctaagaacatcgagggaagtagcggcaatactagcctgccactagtcctgaaaaagctcttgctttcgcgcgatgaaacactgcaggtggcaagcgcccattgcattacagcggtgctcgtccactccccagcaaagcacgcctcggctttcattcacgccgacattccagagttcctgttcgaacatctgtcatcaagcagcgaagtcctggtttggtcttcctgcaattgcctcacccttttggtcgaagagcctttgttcttcagtaagtgtcatacggtgtacggcatagaggctgtggtgcgatcattgcagggtagccttaagatgaacaatattgagctacacaagcagggccttttgctcttcgcagaaatcctgacgcgacaacccgaggaaatcaaattgtttacatcttccgctatgtgcagggatgcaggccgggctcttcaggaggccgtgagctcgcctgtcctagaagttgcagctgaggccctgaaggccacatccgcattcttgcgtaaagatcatcagagcactcctcctgtgcagtacggtgagcttcaggccctgctggaagccatgctcaacaggtgcgcagagttctcacagactctattgagccggcgtcctctgggccacgcatcctctagagactccgagaaggccattctccagcggggcaagttcctcctgtccaccctggagggattcagatccgcttgtagactggctatcgaatttcagagtgagccgtctgctcaagaaaacccttttacagccccaagcgctaaaaaggaagacacactggaagcattttctgagtttcttcttagcgcttgcgatagcctgtgtatccctatggttatgaggcacctggaacaaaccactcacccggccttaatggaggtgttcctgtcgattctccacaatcttttcgtgattgtgccccatatgaaagagaagttctcaaaaaaactggcttccagttctttcattaggcttaccctagagctcaaggcaagattctgttcggggctgtctcactcagcactgaaccaagtgtgttcgaacttcctctattatatgtgtctgaacctgctttcggcaccagagaaaactggccccccatctaaagaagagcttagtgcggtctcagaattactccagcatggcctaccacagatatcatcacgcagcccggagtctctggcattcttgagcgaccgtcagtacatggaaggggcggctcgccagcggcagtattgcattttacttctcttttatctggcctatatccacgaagacaggtttgtatctgaggccgaactgtttgaggccgtccaatctttcctcctgtccttgcaggaccagggtgaacgaccgcctctggtggttttcaaggctagcatctacctgctcgcaatctgtcaggataaggacaatactttgagagagcagttgcactgcagcctgatctccatctcttag

SEQ ID NO: 323338 - DNA, 1521 bp, Artificial Sequence
  derived and/or modified sequence
atgaaccaggacggcctgggggagagcgccaagaacatcgagggcagcagcggcaacaccagcctgcccctggtgctgaagaagctgctgctgagcagagatgagaccctgcaggtggccagcgcccactgcatcacagctgtgctggtgcacagccctgccaagcacgccagcgccttcatccatgctgacatccctgagttcctgtttgagcacctgagcagcagcagcgaggtgctggtgtggagcagctgcaactgcctgaccctgctggtggaggagcccctcttcttcagcaagtgccacacagtgtatggaattgaagctgtggtgcgcagcctgcagggcagcctgaagatgaacaacatcgagctgcacaagcagggcctgctgctgtttgctgagatcctgacccggcagcctgaggagatcaagctgttcaccagcagcgccatgtgcagagatgctggccgggccctgcaggaggccgtgagcagccctgtgctggaggtggccgctgaggccctgaaggccaccagcgccttcctgaggaaggaccaccagagcaccccacctgtgcagtatggagagctgcaggccctgctggaggccatgctgaacagatgtgccgagttcagccagaccctgctgagcagaagacccctgggccacgccagcagccgggacagcgagaaggccatcctgcagaggggcaagttcctgctgagcaccctggagggcttccgcagcgcctgccgcctggccatcgagttccagagcgagcccagcgcccaggagaaccccttcaccgcccccagcgccaagaaggaggacaccctggaggccttcagcgagttcctgctgagcgcctgtgacagcctgtgcatccccatggtgatgaggcacctggagcagaccacccacccagccctgatggaggtgttcctgagcatcctgcacaacctgtttgtgattgtgccccacatgaaggagaagttcagcaagaagctggccagcagcagcttcatccggctgaccctggagctgaaggcccgcttctgcagcggcctgagccacagcgccctgaaccaggtgtgcagcaacttcctgtactacatgtgcctgaacctgctgagcgcccctgagaagacaggcccccccagcaaggaggagctgtctgctgtgtctgagctgctgcagcacggcctgccccagatcagcagccgcagccctgagagcctggccttcctgagtgaccggcagtacatggagggcgccgcccggcagaggcagtactgcatcctgctgctcttctacctggcctacatccatgaagatagatttgtgtctgaggccgagctgtttgaagctgtgcagagcttcctgctgagcctgcaggaccagggcgagcggccccccctggtggtgttcaaggccagcatctacctgctggccatctgccaggacaaggacaacaccctgcgggagcagctgcactgcagcctcatcagcatctcctag

SEQ ID NO: 323339 - DNA, 1521 bp, Artificial Sequence
  derived and/or modified sequence
atgaaccaggacggcctgggcgagagcgccaagaacatcgagggcagttctggcaataccagccttccgttagtgctcaaaaagcttcttctcagtcgcgacgagacacttcaagtggcaagtgcgcactgtattacagccgtcctggtgcatagcccagcgaaacatgctagtgcatttattcatgcagacatccctgagttcctattcgaacatctatcctcttctagcgaggtcctggtatggtcctcctgtaactgcctcaccctgctggttgaggagccattatttttttctaagtgtcataccgtgtatggtattgaagccgtggttcgatcattgcagggttctttgaagatgaacaacatcgagctgcataaacaaggcttgctcctgttcgctgaaatcttaactcgccagccagaggagatcaagttatttacatcctctgccatgtgccgggacgctggccgcgccctacaggaggctgttagctcccctgtgcttgaggttgcggcagaagctctgaaagccacgtcagcctttctccgcaaggatcaccagagcacacctcctgtgcagtacggcgaactgcaagccctgttggaagcaatgcttaaccgatgtgcagagtttagccagaccttattgtctcggaggcccctgggtcatgcgtcatctcgcgattccgaaaaagccattctgcagcgcgggaagttcctgttatctactctggaagggttcagaagtgcctgtcgcctggccatagaatttcagtccgagccctctgcccaggagaacccttttaccgccccttctgccaagaaggaggacactctggaagcgttctcagaatttctgctttcagcttgtgatagtctctgtattccaatggtgatgcggcacttagaacagaccacccaccccgcactcatggaggtgttcctctccatcctgcataacctgttcgtaattgtgccccacatgaaggaaaaattcagcaaaaagctggccagctcatcctttatccggctgacattggaactcaaagcccggttctgttccgggctgagccacagcgcgctgaatcaggtgtgctctaactttttgtattacatgtgcctgaacctcttgtcggcccccgagaagaccgggcccccatcaaaggaggagctttccgctgtgtccgagcttctccaacacggcctgccccagataagctcacgatcccccgaaagtctcgcttttctctcagatcgacagtacatggagggagccgctcgccagcgacaatactgcatcctgctcctgttttacttagcttacattcatgaagatcgcttcgtttcggaagcagagctcttcgaagccgtgcagtcatttttgctgtcacttcaggatcagggtgaaaggccgcctttggtcgtgttcaaggcctcaatttacctactggcaatctgccaggacaaagataatactttgcgagaacaactgcattgtagcttaatcagcatctcgtag

SEQ ID NO: 323340 - DNA, 2326 bp, Artificial Sequence
  derived and/or modified sequence
gcctcagctgagggcaagcgaggagatggctgtgaggcaggcggcgacggcgggcactcccgggcccaggagagaggaagaggcggcgcttctattcgagagggcccattaccggcacgacccgcgctggctgctgcccgtgaccccccgcctgtgcctggcctgcgcgctggagctgctgccggaccccggcgtgtcgttagtgcgcaagaagcacatgttgtcctgcttccaagatgcccttgtgaggcatacctccctggtcacgcaactggtgtctcaggatcagagagtctgcatccacttcataagtgtgctttttggactattatgcagcatggaagatgggagtgtgacagacctctgtattgaagtccttattcagatcacaacgcagctgaagctggagcagactatccgttgcctgctggatgagtgccacaaagagctgtgtaacatgccctccatgcgaggcagcctggccaccctgacccttcttggcaagttggtggatgccatccctgctctggcagacgagcttgtaatggagcatggcaacctgatggagcatctgttgagaggcttagtataccccagtgagggcatacaagcttctgtctgttacctttatgggaagctatactcctcaccagtggcagctgagatgctttcaggacacttccgtgagaagctttttcccctcttcctttccatcctggatggtgcccagacaaaggagctgcagattaactgcttgggtttgctgaggcagctgttgaagtatgatctctttgtgtccatgatcatgaaccaggatggactgggagaaagtgctaagaatatcgaagggtcatcaggaaatacctcactgcctttggtgctcaaaaagcttctcctctctagagatgaaaccctgcaggtggccagtgctcactgtataactgcggtgcttgtccactccccagcaaagcatgcgtcagccttcatccacgctgacatcccagagttcctctttgagcatctttcttcttccagtgaagtgctcgtctggtccagctgtaactgcttgacactcctggtagaagagccactctttttttccaagtgccacacggtgtatgggatcgaggcagtggtgaggagcctgcagggaagcctgaagatgaacaacatagagctgcacaagcagggcctgctgcttttcgctgaaatcctgacccggcagccagaggagatcaagctgttcacaagctcagccatgtgcagagatgctggccgtgccctccaagaagcagttagcagccctgtgctggaggtggctgctgaggccttgaaggccacttctgcttttctgaggaaggaccatcagagcactccacctgtgcagtatggggaactgcaggctttgctagaagccatgctaaaccgatgtgcggagttttcccagaccttgctgagcaggaggcccctgggccatgcctccagtagagattcagagaaggccattcttcaaaggggaaagttcctcctcagcactctggagggatttagaagtgcctgcaggttggctatagaattccagagtgagccttcagcccaggagaatccattcacagctcccagcgccaagaaggaagacaccttggaggccttctcagaatttcttctcagtgcctgtgactcgctgtgtatccccatggtgatgagacacttggagcagaccacccacccagctttgatggaagttttcctctcaattctacataacctctttgtcatcgttccccacatgaaggagaagttttccaagaagcttgcttcctcatccttcatacgactgaccctggagctgaaggccaggttttgcagtggtctgagtcactcagccctaaaccaggtgtgttccaatttcctctactatatgtgcctcaaccttctctcagctccagagaagacaggaccaccttccaaagaagaactctctgcagtgtctgagctcctgcagcatgggctgccccagataagcagcaggagccctgaaagccttgccttcctgtctgatcgccagtacatggagggagctgctcgccagagacagtactgcatcctgctcctcttctacttggcctacatccatgaagacaggtttgtctcagaggcagagttatttgaggctgtgcaaagcttcctcctgtcgctgcaggaccagggcgagcgccccccactggtggtcttcaaagcctccatctatctgcttgcaatctgccaggacaaagacaatacactacgtgagcaacttcattgcagtttgatcagcatttcctaa

SEQ ID NO: 323341 - DNA, 1521 bp, Artificial Sequence
  derived and/or modified sequence
atgaatcaggatggccttggcgaaagcgccaaaaacatcgaaggatccagcggtaatacttcccttccccttgtgctcaaaaaactgctcctctcccgagacgagacactgcaggtcgctagcgcacactgcatcaccgccgtgttggtgcacagtcccgcaaaacacgcctcggcctttatccacgcggatattcccgagtttctgtttgagcatttgagcagctcgtccgaagtgttggtctggagttcgtgcaactgtctgaccctccttgtcgaagagccgctctttttctcgaagtgccacacagtatacgggattgaggcagtggtgagatctctgcaggggtccctcaagatgaataacattgaactgcacaaacaaggacttctcctgtttgctgagatcttgacccggcaacctgaagaaatcaagctgttcacatcgagtgccatgtgccgggacgctggccgtgccttacaagaggctgtgagctctccggtgcttgaagtcgcagccgaagcactaaaagccacaagcgctttcctgcggaaagaccatcagtccacccctcccgtccagtatggcgagcttcaggcactcctcgaggccatgctgaatcgctgcgccgagttttctcagacccttctgtcccgtagacccttgggacacgcctcttctagagactctgaaaaagccatacttcagcgagggaaatttctgctctcgaccttagaaggtttcaggtcagcttgcagactggctattgagttccagtcagagccatccgcacaagaaaatccattcaccgccccttcggccaaaaaggaggacaccctggaagcattcagtgaattcttgctgtccgcatgcgacagcctttgcatccccatggtgatgcggcacctggagcagaccacccatccagccttaatggaggtgttcctgtccatcctacacaatctgtttgtgatagtgcctcatatgaaggaaaagtttagcaagaaactggcctccagcagcttcattaggctgacactggagctaaaggcaaggttttgcagcggcctgtctcacagcgctcttaaccaggtgtgtagtaatttcttgtactatatgtgcctgaacctgttgagcgctccagagaagacaggtccgccatccaaagaagaactctcagctgtgtccgaactgctccagcatggtctcccccagatctcatctcggagccctgaaagcttggcctttctgagcgatcgtcagtatatggaaggcgcagctaggcagaggcagtactgcatcctgctgctcttctacctggcatatatccatgaggacagatttgtatcggaggcagagctgttcgaggcagtccagtcctttctcttatcactacaggaccagggggagcgcccacccttagtagtctttaaggcttccatatatctgctggcaatctgtcaggataaggacaacacactaagagagcagctccactgttctctgatttccataagttag

SEQ ID NO: 323342 - DNA, 813 bp, Artificial Sequence
  derived and/or modified sequence
atggagaatcagccagtccggtggcgcgctttacctggcctccctaggccccccggcctgcccgcagcgccttggctgctgttgggagtgctcttactgcctggtacacttcgcctcgccggcggacagagcgtgacgcacacgggtctgcctattatggcatcgctggccaacacggccatttctttctcctgtcggatcacatacccttacacaccccagtttaaagtgttcacagtcagttattttcacgaagacctgcaaggacagcggagcccaaagaagcctaccaattgccaccccggcctggggaccgagaaccaaagccacactctggactgtcaagtgactttagttctgcccggtgcatccgcgacaggcacctattattgctctgtgcactggcctcattccaccgttcgtgggtcaggtacttttatactcgtaagggacgccgggtatagagagcctccacagtctccccagaagttgctgctgtttggttttacgggtctgctgagtgtactcagcgtggtcggaaccgcactgctgttgtggaataagaaacgtatgagaggccccggaaaggatcccacgaggaagtgtccagacccccgcagcgctagctcgccaaagcagcatccgtcagagagcgtgtataccgcactgcagcggagagagaccgaagtgtatgcttgcatcgaaaacgaggacggctcatctcccaccgcaaaacagtctcccttgtcccaagagcgccctcaccgcttcgaggacgatggtgagttgaacttggtgtatgagaacttgtag

SEQ ID NO: 323343 - DNA, 813 bp, Artificial Sequence
  derived and/or modified sequence
atggagaaccagcctgtgcgctggagggccctgcccggcctgcccaggcctcctggcctgcctgctgccccctggctgctgctgggcgtgctgctgctgcccggcaccctgcggctggccggcggccagagcgtgacccacacaggcctgcccatcatggccagcctggccaacacagccatctccttcagctgccgcatcacctacccctacaccccccagttcaaggtgttcaccgtgtcctacttccacgaggacctgcagggccagaggagccccaagaagcccaccaactgccaccctggcctgggcacagagaaccagagccacaccctggactgccaggtgaccctggtgctgcccggggccagcgccaccggcacctactactgcagcgtgcactggccccacagcacagtgcggggcagcggcaccttcatcctggtgagagatgctggctaccgggagcccccccagagcccccagaagctgctgctgtttggcttcaccggcctgctgtctgtgctgtctgtggtgggcacagccctgctgctgtggaacaagaagaggatgaggggccctgggaaggaccccaccaggaaatgtcctgaccccaggtctgccagcagccccaagcagcaccccagcgagagcgtgtacacagccctgcagaggcgggagacagaggtgtatgcctgcattgaaaatgaagatggcagcagccccacagccaagcagagccccctgagccaggagcggccccacagatttgaagatgatggagagctgaacctggtgtatgagaacctgtag

SEQ ID NO: 323344 - DNA, 813 bp, Artificial Sequence
  derived and/or modified sequence
atggagaaccagcccgtgcggtggcgggccctgcccggcctgccccgcccaccggggcttccggccgcaccctggcttctgttaggggtcctcctgctgcctgggaccctacgtctggccgggggccagtcagtcacccacaccggtctgcctatcatggctagtctggccaataccgccatctcattttcgtgtcgaatcacctatccctataccccccagttcaaggtgttcacagtctcttattttcacgaggacctgcaagggcaacgctctcccaagaaacccacgaattgccatcctggattgggcactgaaaaccaatcacatacgttggattgccaggtcacgttggtgctccccggggcatcagccactggcacatactattgctccgtccattggccacacagtacagtaagagggagcggcacatttattttagtgagagatgcggggtacagagagccccctcagagcccccagaaactgctgctttttggatttaccgggcttctaagtgtgttgagcgtcgtcggaaccgcactgctgctgtggaataagaagcgtatgcgcggcccagggaaagaccccacccggaagtgccccgaccccagatcagcatcatcacccaagcagcacccaagtgagtccgtgtatactgcactgcagcgccgggaaaccgaagtctacgcctgcatagaaaatgaggatgggtcatcccccacagccaaacaaagccccttgtcccaggagcgaccccatagattcgaggatgacggggaactgaatctggtatatgaaaatctgtag

SEQ ID NO: 323345 - DNA, 5602 bp, Artificial Sequence
  derived and/or modified sequence
gtgaactaaagagtcgccgcagacaagcaggcccccagatggagaaccagcctgtgaggtggcgggccctgccaggcctcccacgccctcctgggctccccgcagccccctggctcctccttggcgtgctgctgctgcccgggaccctgcgactggcaggaggacagtcagtgacccacaccggcctgcccatcatggcctccctggccaacacagctatctccttcagctgcaggatcacctatccatacactccccaattcaaggttttcacagtcagctactttcatgaagatctccagggacagaggagccctaagaagccaacaaactgccaccctggactgggcacagagaaccagagccacaccctggactgccaggtcacccttgtgctgccgggagcatcggccactggcacctactactgctctgtccactggccacactccacggtgagaggcagcggcaccttcatcctggtcagagacgcagggtaccgagagcccccgcagagtccacagaagctcctgctctttggcttcaccggcctcctgagtgtcctgagtgtagtgggcacggccctgctgctctggaacaagaagcggatgcggggtccagggaaggaccccaccaggaagtgcccagatccaagatctgccagcagccccaagcagcatccttcagaatctgtctacacagctctgcagcgccgcgagaccgaggtctatgcctgcatcgagaatgaggatggcagctcacccaccgccaagcagagccccctctcccaggagagaccgcatagattcgaagatgatggcgaacttaacctggtctatgaaaatctctaggatgggctccaccgctcatagagcttgccctgggtcagaggaccggggcagcccctgccaccaaaggacttgatctgagttgggagtaaggcccccagggacaccccatcatttcaccctcacattcaaggcccttcctgtcttggccggccccactgcccccccattctatgccccaaccaccaaggctttcccatcttggggcctttgcccaggctgttccttctgccaggcaggcccttcctcccttggcccaaccagcaaagcgcccctcagtcttcaagggctttcctggatgccacccttgcccagagccctgctcactgcctcatgctgacagagcagcatgctctcttggcaccagcctgcacctcagccagtagggcagcctctgagctgagggaggaccctgcaggggcgcctagcagtgctgtgtggggagccgaggtatggaggagctggggagcagctatgcaaatccctacctacccagctgggccagaggcacgaggcagccaggcagggtgggagcaggggctggcgtgggaggtctgggggacagacaaggatgatggacccctcagaggcaagactaggatcagggacagatctggaggcccaggacatggctgagaggtggtcagcaggctgggggcatggagcagagagggcttgggtacaagctggagaggaaggagattctggcatgttggggtgagggcagagggacagatgaggggaggagggtgctggctaaacaggaactgaatgaatggcctgaagctccctctcccaagggttcccactcccattggcctggccctgtacgtgcactctgtcatctccttggtcaccctctgctccaggccttctccaccacaggacctcagctgtccctccttctacccaaggtggagtcccccaaagtcccttctgtctggcctatcctgtgcccaccacctgtggcttcatccagccctcctcctctatctttatctgccataggccgcagccctggccccctgtggattgaggtcccaagtggtccagctgtggggtttggtgctgggaccctcaatggcagccggaaggtccctctgaggcagaagctcaagccccatggggacagtggctccccagtgcctggccctgagccatttctgctgtttcaggtgcccacatcaccctcatttcctcctcgcagtagccctgcaccgtggccagaaacccatccacaggcaggcagtggctggggtccgggtgccccgggctgttgggctctgcttcctccctctgctcccccatgtctccctgagttctcccacctttgctcatttgtaaaatgggcaggtcaatcttcccaccccaccgtgtgggctgccccaaccccaaatgtgcccagggaggggggggaacccaaggcacaggccccgcccctgcccccaagcagcactgggctactggctcacagaagcacctttggttctgcaggtcatgcccctccctgcagggaagggaaagctggtggtagaggctgggcacagactgacgtccagaagaagtcccttggccctgctagggtggcaccagacttctctggtcccacaggacagccagtggcctcccaacttggttctgggcccccgcctgcaagcacacatggcaaggagggctttagcaggctcacataaccgagtggcaaggcccctgctcccagaggctggatttgaatgaactccgggcctgtttggggaggtgaagctgccaggtgtgcacaggggcctcccaggctcctggctccaccagccaaggaggtgggggcaagggtcagggcaatgggggacaatgccgctcagggtgcagtgagctcccctgggaaaaccgaagccagcaagaccaggagagggccacctcactgggcctgcctcccccacctcctgggcctctctgacctcagctcctagaccctggacccttggctgggactcagcattttccagtctttttcaggggtagacaggggagcctgggttaaactttaccactgtgccctggcccaggcatcaccaacacggcctccctgcagctgccctgccaccgacagaccccgattaaacccacacctggccttggcctcccctgctctataccttgcatggtttttgcctcacttggaataaaattccaactcctccctgtggcgtaggaggttcttgggggctgacccatcacccctctggtggacagagacattgccagcgtggtggtcgtctgtgcttggttcagggcaaggctgggaggcagtgggtgctgaggtcttcagtgagcaaggagagaggcagggaggaggaggaggaggaggagagcacagcatgaaaggacgggaccctaaagggctttggcccaagggagggtggggcaagaatgttctgagacttctgtgggcagcaaagaggactgagcacctgttctccagcccccaggactgagagcctgcagagacaagctggcacagggcgaggggtggcagggaacttcagggtgggaggtgcatggggcaggcgggaggaggaagaacagagaggggacagagagggtatgaatgggagctcctggggtgcaggcttgctttccactatgaatgggtggaggagggaagagaagaaaattgcttttgagacccacccaggctgggtggcctcagggcctcccttgaatccctgctccacctcccacagccttgtggacttgggcaagtcactggccacctgagcctcagtttgcagtgacagtcaagacagctcaggccaggcgtagtggcttatgcctgtaatcccagcatgttgggaggccgaggcgggtggatcacttgaggccaggagtttgagaccagcctggccaacgtggtgaaaccccgtctctactaaaaatacaaaaattagcctggtgtggtggcacgcacctgtagtcccagctactcgagaggctaaggcaggagaatctcttgaacctgggagacagaggttgcagtgagccgaagtggcaccactgcacaccagcctgggctacagagcacgctctgtccaaataaacaaacaaacaaacactactcagtgtctcagaaaggacagaaggggactccctggctcaggcagaagctcagtgggtgtgcatttccttcaagactcgtccttcagaaggaataggcttctggggcagtacagaggagtctaagtgagaggcaggcctccctgggagctgggcccaggctctctgcagccatgcctttaaggagtgcctacggggtagcacgatcagatggacaggccagggctgcccagagctgggggtgggagcaaggtaagcagagaggtgagggaaggagggtgctggcttagcaggagctgaatgaatgggcctggaggggaaaagctaagggggatggggtggcttgagtggagtaggtgaggcctaggtgaaggggagctgtggaccttccaggacggacggatgtgagcagtcctgagtggggactggagttagggtggggaagggaagccccaggcagcccctgcaggcccctgcccctgggccctaccgcagcagggcagccctgtctctgggtctcagctgatgcttccctctgcccactggcccctgacctggtgggatttcccaccatctctcccggcccagcctgccctgccctcctaggtcttcccaacctcccctctgcagaaacatctcagccacgtctggcacccccaggcatccctgcctgcctctaggaagttgaccccttcaatgggtttcagcctccaaccccacccccgcttgactcctgctctgtcagcacttgcttgagaaaatcatcctgggaaaccagcttctgggagcaggggccttgccactcggttctgcgagcctgctgaagccctccttgccacgtgtgcttgcaggcgggggcccagaactaagctaggaggccactggctgtcctgtgggaccagggaagtctggtgccaccctagcagagggcccatggacttcttctggaggtcagtctgtgcccagcctctaccaccagtccagaacttgcagtgggtgcggtaaacggtggcccctcctcagcaaacatttccaggggattctggcagcagagtttccatgggaacatgtgctggttctgcgctgaacccggtgtggctggggttcccttcacagccaatattgcaggaactgagcctggtggcctcggccagggtaggcagtgctctttggccacccagtgtcacaaacctgaactcaagttacaggcaaaacctgcttttcctttttctttctctctctctctctttttttttttgttaaagcacattctaatgtaaagtccatgctccattctaaagatgcctctgggatttcagggatggatttttatgtagttcaatagttttcttggcagacagcttatgcaggagaggtgggccgttggctcagtccagccaggctgagtggcgtcactccattccttgcaatgccaggggatgtcatttgtccacctgagggggcttccccagtctcccttccctgacctgtggtcagaatgatggcctcagccttgactgagcgcgggtcaggccagactctctgaacttggtgttggcgtgtgttttgtgtgtgtctggaggtgacatatgtgggtgacagaagcatatgttacagtgaaacattaaaactacagcaaagtg

SEQ ID NO: 323346 - DNA, 813 bp, Artificial Sequence
  derived and/or modified sequence
atggaaaatcagccagttagatggagggctctacctggcctgccacgccctcctgggcttcccgcagcaccatggctgcttctgggtgtgttgttattgcccggaaccctgaggctggccggtggacagtccgtcactcacactggcctacccattatggccagtttagcaaatacggcaatcagcttttcatgtcgcataacttatccgtatactccccagttcaaggtgtttactgtgtcctatttccacgaggatttgcagggacagcgttccccgaagaagcccactaattgccacccagggctcgggaccgagaatcagagccacacactggattgccaggttacactggtgctgcccggtgcatctgccaccggaacctactattgttcggttcactggccacatagcacagtacggggtagtggcacctttattcttgtacgcgacgccggttaccgggaaccgcctcagagcccacagaagctgctgctctttgggttcacaggtctcctgagtgttttatctgtcgtgggcaccgccctgctcctatggaataagaaacgcatgcgcggacctggcaaggaccctacgcgaaaatgcccagatccgcgttctgcctcttccccaaagcagcacccttcagaaagcgtctataccgcactgcagcgtcgcgaaacagaggtttatgcctgtatcgaaaatgaggatggcagcagtcccacagcaaagcagtcaccactaagccaggagaggccccacagattcgaggatgacggagaactgaacctcgtgtatgaaaacctgtag

SEQ ID NO: 323347 - DNA, 813 bp, Artificial Sequence
  derived and/or modified sequence
atggagaaccagcccgtgagatggagagccctgcccggcctgcccagaccccccggcctgcccgccgccccctggctgctgctgggcgtgctgctgctgcccggcaccctgagactggccggcggccagagcgtgacccacaccggcctgcccatcatggccagcctggccaacaccgccatcagcttcagctgcagaatcacctacccctacaccccccagttcaaggtgttcaccgtgagctacttccacgaggacctgcagggccagagaagccccaagaagcccaccaactgccaccccggcctgggcaccgagaaccagagccacaccctggactgccaggtgaccctggtgctgcccggcgccagcgccaccggcacctactactgcagcgtgcactggccccacagcaccgtgagaggcagcggcaccttcatcctggtgagagacgccggctacagagagcccccccagagcccccagaagctgctgctgttcggcttcaccggcctgctgagcgtgctgagcgtggtgggcaccgccctgctgctgtggaacaagaagagaatgagaggccccggcaaggaccccaccagaaagtgccccgaccccagaagcgccagcagccccaagcagcaccccagcgagagcgtgtacaccgccctgcagagaagagagaccgaggtgtacgcctgcatcgagaacgaggacggcagcagccccaccgccaagcagagccccctgagccaggagagaccccacagattcgaggacgacggcgagctgaacctggtgtacgagaacctgtag

SEQ ID NO: 323348 - protein, 142 aa, Artificial Sequence
  derived and/or modified sequence
QLRRRFGDVFSLQLAWTPVVVQWAGGRARGDGDPRRGHGRPPACAHLPGDPLPASPTPRTPLSPQRSLGQSREQRDRLPHLRAPLRVRRPSLPQAAGPSSGGTEGGVGLPARGAECCPRPPAHPSAGWQGPTLPKGFPDPAG

SEQ ID NO: 323349 - DNA, 429 bp, Artificial Sequence
  derived and/or modified sequence
cagctgagaagaagattcggcgacgtgttcagcctgcagctggcctggacccccgtggtggtgcagtgggccggcggcagagccagaggcgacggcgaccccagaagaggccacggcagaccccccgcctgcgcccacctgcccggcgaccccctgcccgccagccccacccccagaacccccctgagcccccagagaagcctgggccagagcagagagcagagagacagactgccccacctgagagcccccctgagagtgagaagacccagcctgccccaggccgccggccccagcagcggcggcaccgagggcggcgtgggcctgcccgccagaggcgccgagtgctgccccagaccccccgcccaccccagcgccggctggcagggccccaccctgcccaagggcttccccgaccccgccggctag

SEQ ID NO: 323350 - DNA, 429 bp, Artificial Sequence
  derived and/or modified sequence
cagttgagacgcagattcggtgatgtgtttagcctccagcttgcttggacccccgttgtggttcagtgggccggcgggcgtgccagaggcgatggagacccccggagaggccatggacgccctcccgcctgcgcgcacctgccaggcgaccccctgcccgcttcacccacaccaagaacacccctgagcccccagcgaagcctcgggcagtcacgagaacagagagatcgccttccccatctgcgcgctcctctaagggtgcgacggcctagcctccctcaggcagcagggcctagttccggcggaactgaaggaggtgtcggtctccccgcaagaggggcagagtgctgtccccgtccccccgcccacccaagtgcgggatggcagggacccactttacctaagggatttcctgatcctgccggctag

SEQ ID NO: 323351 - DNA, 429 bp, Artificial Sequence
  derived and/or modified sequence
cagctgcggaggagatttggagatgtgttcagcctgcagctggcctggacccctgtggtggtgcagtgggccggcggccgggcccggggagatggagacccccggcggggccacggccggcccccagcctgtgcccacctgcccggggaccccctgcctgccagccccacccccaggacccccctgagcccccagaggagcctgggccagagccgggagcagagggaccggctgccccacctgcgggcccccctgcgggtgcggcggcccagcctgccccaggccgccggccccagcagcggcggcacagaaggaggagtgggcctgcctgcccggggagctgagtgctgcccccggcccccagcccaccccagcgctggctggcagggccccaccctgcccaagggcttcccagaccctgctggatag

SEQ ID NO: 323352 - DNA, 429 bp, Artificial Sequence
  derived and/or modified sequence
cagctgcggcggcggttcggcgacgtgttcagcctgcagctggcctggacgcccgtcgttgtccagtgggccggcggaagggctaggggggacggcgacccccgaagggggcatggtagaccaccggcttgcgctcatctcccaggggaccccctgcccgcgtccccgaccccacgcaccccgctgagccctcagcgctcactgggccagtcaagggagcagcgggaccggctgccacacctgagggccccgctgagggtgaggaggcccagcctgccccaggccgctgggccctcatctggtgggactgaaggaggagtcggacttccagcacggggcgcagagtgttgcccacggccgcccgctcacccgagtgcaggatggcaaggcccaacacttcctaagggcttcccagatccagctggttag

SEQ ID NO: 323353 - DNA, 429 bp, Artificial Sequence
  derived and/or modified sequence
caacttcggaggcgatttggggatgttttctctttgcagctcgcttggaccccagtggtagtgcagtgggccggtggaagggctagaggggacggcgaccccagacggggtcatgggcgtccgcctgcgtgtgctcacctccccggtgatccactgccggcaagccctaccccaaggaccccgttgtctccacaacggagcctggggcagtctagagagcagcgcgataggcttccccacttgagagcaccacttcgtgtaagaagacctagcctcccacaagctgccggtccctcaagcggcggaactgaaggaggcgttgggctgccagctagaggagctgagtgctgcccccgaccacccgcacacccctctgccggatggcaaggccctaccctccccaagggatttccagaccctgcaggttag

SEQ ID NO: 323354 - protein, 127 aa, Artificial Sequence
  derived and/or modified sequence
MAAGGDHGSPDSYRSPLASRYASPEMCFVFSDRYKFRTWRQLWLWLAEAEQTLGLPITDEQIQEMKSNLENIDFKMAAEEEKRLRHDVMAHVHTFGHCCPKAAGIIHLGATSCYVGDNTVGACVVYT

SEQ ID NO: 323355 - protein, 824 aa, Artificial Sequence
  derived and/or modified sequence
MPVAEAPQVAGGQGDGGDGEEAEPEGMFKACEDSKRKARGYLRLVPLFVLLALLVLASAGVLLWYFLGYKAEVMVSQVYSGSLRVLNRHFSQDLTRRESSAFRSETAKAQKMLKELITSTRLGTYYNSSSVYSFGEGPLTCFFWFILQIPEHRRLMLSPEVVQALLVEELLSTVNSSAAVPYRAEYEVDPEGLVILEASVKDIAALNSTLGCYRYSYVGQGQVLRLKGPDHLASSCLWHLQGPKDLMLKLRLEWTLAECRDRLAMYDVAGPLEKRLITSVYGCSRQEPVVEVLASGAIMAVVWKKGLHSYYDPFVLSVQPVVFQACEVNLTLDNRLDSQGVLSTPYFPSYYSPQTHCSWHLTVPSLDYGLALWFDAYALRRQKYDLPCTQGQWTIQNRRLCGLRILQPYAERIPVVATAGITINFTSQISLTGPGVRVHYGLYNQSDPCPGEFLCSVNGLCVPACDGVKDCPNGLDERNCVCRATFQCKEDSTCISLPKVCDGQPDCLNGSDEEQCQEGVPCGTFTFQCEDRSCVKKPNPQCDGRPDCRDGSDEEHCDCGLQGPSSRIVGGAVSSEGEWPWQASLQVRGRHICGGALIADRWVITAAHCFQEDSMASTVLWTVFLGKVWQNSRWPGEVSFKVSRLLLHPYHEEDSHDYDVALLQLDHPVVRSAAVRPVCLPARSHFFEPGLHCWITGWGALREGALRADAVALFYGWRNQGSETCCCPISNALQKVDVQLIPQDLCSEVYRYQVTPRMLCAGYRKGKKDACQGDSGGPLVCKALSGRWFLAGLVSWGLGCGRPNYFGVYTRITGVISWIQQVVT

SEQ ID NO: 323356 - DNA, 2475 bp, Artificial Sequence
  derived and/or modified sequence
atgcccgtggccgaggccccccaggtggccggcggccagggcgacggcggcgacggcgaggaggccgagcccgagggcatgttcaaggcctgcgaggacagcaagagaaaggccagaggctacctgagactggtgcccctgttcgtgctgctggccctgctggtgctggccagcgccggcgtgctgctgtggtacttcctgggctacaaggccgaggtgatggtgagccaggtgtacagcggcagcctgagagtgctgaacagacacttcagccaggacctgaccagaagagagagcagcgccttcagaagcgagaccgccaaggcccagaagatgctgaaggagctgatcaccagcaccagactgggcacctactacaacagcagcagcgtgtacagcttcggcgagggccccctgacctgcttcttctggttcatcctgcagatccccgagcacagaagactgatgctgagccccgaggtggtgcaggccctgctggtggaggagctgctgagcaccgtgaacagcagcgccgccgtgccctacagagccgagtacgaggtggaccccgagggcctggtgatcctggaggccagcgtgaaggacatcgccgccctgaacagcaccctgggctgctacagatacagctacgtgggccagggccaggtgctgagactgaagggccccgaccacctggccagcagctgcctgtggcacctgcagggccccaaggacctgatgctgaagctgagactggagtggaccctggccgagtgcagagacagactggccatgtacgacgtggccggccccctggagaagagactgatcaccagcgtgtacggctgcagcagacaggagcccgtggtggaggtgctggccagcggcgccatcatggccgtggtgtggaagaagggcctgcacagctactacgaccccttcgtgctgagcgtgcagcccgtggtgttccaggcctgcgaggtgaacctgaccctggacaacagactggacagccagggcgtgctgagcaccccctacttccccagctactacagcccccagacccactgcagctggcacctgaccgtgcccagcctggactacggcctggccctgtggttcgacgcctacgccctgagaagacagaagtacgacctgccctgcacccagggccagtggaccatccagaacagaagactgtgcggcctgagaatcctgcagccctacgccgagagaatccccgtggtggccaccgccggcatcaccatcaacttcaccagccagatcagcctgaccggccccggcgtgagagtgcactacggcctgtacaaccagagcgacccctgccccggcgagttcctgtgcagcgtgaacggcctgtgcgtgcccgcctgcgacggcgtgaaggactgccccaacggcctggacgagagaaactgcgtgtgcagagccaccttccagtgcaaggaggacagcacctgcatcagcctgcccaaggtgtgcgacggccagcccgactgcctgaacggcagcgacgaggagcagtgccaggagggcgtgccctgcggcaccttcaccttccagtgcgaggacagaagctgcgtgaagaagcccaacccccagtgcgacggcagacccgactgcagagacggcagcgacgaggagcactgcgactgcggcctgcagggccccagcagcagaatcgtgggcggcgccgtgagcagcgagggcgagtggccctggcaggccagcctgcaggtgagaggcagacacatctgcggcggcgccctgatcgccgacagatgggtgatcaccgccgcccactgcttccaggaggacagcatggccagcaccgtgctgtggaccgtgttcctgggcaaggtgtggcagaacagcagatggcccggcgaggtgagcttcaaggtgagcagactgctgctgcacccctaccacgaggaggacagccacgactacgacgtggccctgctgcagctggaccaccccgtggtgagaagcgccgccgtgagacccgtgtgcctgcccgccagaagccacttcttcgagcccggcctgcactgctggatcaccggctggggcgccctgagagagggcgccctgagagccgacgccgtggccctgttctacggctggagaaaccagggcagcgagacctgctgctgccccatcagcaacgccctgcagaaggtggacgtgcagctgatcccccaggacctgtgcagcgaggtgtacagataccaggtgacccccagaatgctgtgcgccggctacagaaagggcaagaaggacgcctgccagggcgacagcggcggccccctggtgtgcaaggccctgagcggcagatggttcctggccggcctggtgagctggggcctgggctgcggcagacccaactacttcggcgtgtacaccagaatcaccggcgtgatcagctggatccagcaggtggtgacctag

SEQ ID NO: 323357 - DNA, 2475 bp, Artificial Sequence
  derived and/or modified sequence
atgcccgtagccgaggcgccacaagtcgccggagggcagggcgatggcggcgatggagaggaagccgagcctgagggtatgttcaaggcttgtgaggactcgaagcgcaaggcccgcggatatttgcgtttggttcccttgttcgttcttctggcgcttttggtgctggctagtgctggagttcttctctggtatttcctgggttataaagccgaagtcatggtctcgcaggtgtatagcggaagcctgcgcgtgttgaaccggcactttagccaggatcttactaggagggagagttcggcatttcgctctgaaacggccaaagctcagaaaatgctaaaggaactgatcacttctacacgactcggcacctactacaactccagctcagtgtactctttcggagaggggccactcacttgtttcttttggttcattctgcagatccccgaacacaggcgccttatgctctcaccagaggtggtgcaagcactccttgtggaagagctcttgtctacagtgaatagttccgctgcagttccatatcgggccgagtacgaggtggaccccgaggggttggtaatcctcgaggcttctgtgaaagatattgccgccctgaactcaacactggggtgctacagatacagttatgtcggacaggggcaggtgctgcgactgaagggccccgaccaccttgccagctcttgtttatggcatctgcaaggtcctaaggatctcatgctgaagctccgcttggagtggactttagcggagtgtagagaccggctcgcaatgtacgacgtagccggacccttggagaaacgtctcataaccagcgtgtacggatgtagtcgacaggaaccggtggtagaggtgctggcttccggtgcgatcatggcagtggtctggaaaaaaggcttgcattcatattacgacccatttgtgctgagcgtgcagccagtagtattccaggcatgtgaggttaatctgacacttgataacaggttggatagtcagggggtcctgagcacgccttatttcccaagctactattcaccacagacgcactgtagttggcacctgaccgtcccgagtctggactatgggctggccctctggtttgacgcttatgctctccggcgccaaaaatatgatctgccgtgtactcagggccagtggacaatccagaataggcggttgtgcggcctacgaatactccagccatatgcagagcggatcccagtcgtcgctacagccggcattaccataaatttcaccagccagatctccctaaccggccccggtgtcagagtacactacggactgtataaccaatccgatccgtgcccaggagagttcttgtgctcggtgaacggcctctgtgtccctgcctgcgacggagtgaaggactgtccgaatgggctggatgaacgcaattgcgtgtgccgcgcgacattccagtgcaaagaggattcaacctgcattagcctgccaaaagtgtgtgacgggcagccggactgcctgaatgggagtgatgaggagcagtgtcaggagggagtaccttgtgggacattcaccttccagtgcgaagacaggtcgtgcgtaaaaaaacccaacccacaatgtgacggtcgccccgactgtcgggacgggtcagacgaggagcattgcgactgtggactgcagggtccttcatcacgtatcgtgggaggggccgtttcatccgagggcgagtggccttggcaggcaagcctgcaggtgagaggacgtcacatttgtggaggtgcactcatcgcagatcgatgggtaataaccgcggctcactgctttcaggaggattcaatggccagtacagttctgtggaccgtatttctcggcaaagtgtggcaaaattcccggtggccaggtgaggtatcttttaaggtgtctcgattactgctccacccctaccacgaggaggactctcatgattatgatgttgctctcctccagttagaccacccagttgtgcgctcagctgccgtcagacctgtttgtctgcctgctcggagtcacttctttgaacccgggctccactgttggataacaggttggggagccctacgcgagggtgccctgagagctgacgcagtggccctcttctacgggtggaggaaccagggatctgagacttgctgctgtcccatctccaatgccttgcagaaagttgacgttcagctaatccctcaagatttgtgctccgaggtgtataggtatcaagttacacccagaatgctgtgcgccggttatcgcaaggggaaaaaggacgcgtgccagggagactccggtggccctcttgtgtgtaaggcattgtccggacgttggttcctggcaggtcttgtgtcatggggcctggggtgtggcagaccaaactatttcggggtatacactcggatcaccggagtcatttcgtggatacagcaggtggtaacgtag

SEQ ID NO: 323358 - DNA, 2475 bp, Artificial Sequence
  derived and/or modified sequence
atgcctgtggccgaggcaccacaggttgcaggcggccagggggacgggggggacggggaagaggccgaaccggaaggtatgtttaaagcctgcgaagattcaaaacgaaaggcccgcggctatttacgcctcgtacctctgttcgttctgttggctctacttgtcctggcaagtgccggcgtcttactgtggtacttcctgggttataaagccgaggtgatggtgagccaggtgtacagtggctctctccgcgtgctgaatcgacacttcagccaagacctaaccaggagggagtctagtgcatttcgctccgagacagccaaagctcagaagatgctgaaggagctgatcaccagcacacggctcggtacgtactacaactcgagttctgtatatagcttcggagagggaccgttgacctgttttttctggttcatcctccagattccagaacatcggcggcttatgctcagcccggaagtagtccaggccctgctggtggaggaactgctgtcaacggtgaatagttcggcagctgtgccatatcgagcggagtatgaagttgatcccgagggtttggtgattctcgaggcctccgttaaagatatcgcagccctgaactctactctgggatgctatagatacagttacgtgggacaaggccaggtgttacgcttgaaagggcccgaccatctggcatcgagttgtctttggcatctgcaagggcccaaagacttgatgctgaaattacgattggaatggactctcgctgaatgccgcgatcgcctcgccatgtacgacgtagcaggtcctttagagaagagattgatcacatccgtgtacgggtgtagccgccaggagccagtggtggaggttttagccagcggcgctatcatggcagtggtgtggaaaaaaggcctgcactcttactacgatccgtttgttttatccgtgcagcctgttgtttttcaggcttgcgaggttaatctcaccctagataaccggctggattcccagggcgtattgtctaccccttattttccgagctattatagtccacagactcattgctcctggcacctcaccgtgccctccctggattatggcttagccttatggtttgatgcatatgcactgcggaggcaaaaatacgaccttccctgcacacaaggtcaatggaccatccaaaataggagattgtgcggtctgcgcatccttcagccatacgccgaacgaattccggtggtcgcaacagcaggtattaccatcaatttcacatcccagatatcgctgaccggacctggcgtgagagttcattacggactgtacaatcagtcagatccatgccctggtgaattcctgtgttccgtgaacggtctgtgtgtgccggcttgtgatggcgtaaaagactgccccaatggcctggacgaaaggaactgcgtctgccgggcaaccttccagtgtaaagaggatagcacctgtattagcctcccgaaagtctgtgatggacaacccgactgtctcaatggatcagacgaggaacaatgtcaggaaggagtgccctgcggaactttcacgtttcagtgtgaagatagaagctgtgtcaagaaaccaaatcctcaatgtgacggaaggccggattgccgggatggatcagacgaagagcattgtgactgcggcctccaaggccccagcagccgaatcgtcggcggcgccgtatccagcgaaggggagtggccttggcaagcctccctgcaagtcagaggccggcacatctgcggtggcgctctgatcgcagaccgatgggttatcacagccgctcactgtttccaagaagactctatggcctcaaccgtcctttggactgtgtttctggggaaagtctggcaaaatagccggtggcccggggaagtgagctttaaggtttccagactcctcctgcatccttatcatgaggaggatagccacgactacgacgtagcactgctacagctggatcatcccgtggtgcggagtgccgccgtgcggccagtgtgcctgcccgcacggagtcatttctttgagcccggactgcactgctggattacagggtggggcgcactgagagagggagccttgagagctgacgccgtggccctcttctatgggtggcgcaaccaaggatccgagacatgctgctgtcctatcagcaatgctttgcagaaagttgatgtccagctcatccctcaggacctctgctccgaagtctataggtaccaagtcaccccaaggatgctttgtgcagggtacaggaagggaaaaaaggatgcctgccagggtgacagcgggggccctttagtctgtaaagccttgtccggccgttggttccttgccggattggtaagttgggggctcgggtgcgggcggccaaactattttggagtctatacccgcatcaccggggtcatcagctggatccagcaggttgtgacatag

SEQ ID NO: 323359 - DNA, 2475 bp, Artificial Sequence
  derived and/or modified sequence
atgcctgtggccgaggccccccaggtggccggcggccagggagatggaggagatggagaggaggccgagcctgagggcatgttcaaggcctgtgaggacagcaagaggaaggcccggggctacctgcggctggtgcccctgtttgtgctgctggccctgctggtgctggccagcgctggggtgctgctgtggtacttcctgggctacaaggccgaggtgatggtgtcccaggtgtacagcggcagcctgcgggtgctgaacagacacttcagccaggacctgacccggcgggagagcagcgccttccgctcagaaacagccaaggcccagaagatgctgaaggagctgatcaccagcacccggctgggcacctactacaacagcagctctgtgtacagctttggagagggccccctgacctgcttcttctggttcatcctgcagatccctgagcaccggcggctgatgctgagccctgaggtggtgcaggccctgctggtggaggagctgctgagcacagtgaacagcagcgctgctgtgccctacagagcagaatatgaggtggaccctgagggcctggtgatcctggaggcctctgtgaaggacattgctgccctgaacagcaccctgggctgctaccgctacagctatgtgggccagggccaggtgctgcggctgaagggccctgaccacctggccagcagctgcctgtggcacctgcagggccccaaggacctgatgctgaagctgcggctggagtggaccctggccgagtgccgggaccggctggccatgtatgatgtggccggccccctggagaagaggctcatcacctctgtgtatggctgcagccggcaggagcctgtggtggaggtgctggccagcggggccatcatggctgtggtgtggaagaagggcctgcacagctactatgacccctttgtgctgtctgtgcagcctgtggtgttccaggcctgtgaggtgaacctgaccctggacaaccggctggacagccagggcgtgctgagcaccccctacttccccagctactacagcccccagacccactgctcctggcacctgactgtgcccagcctggactatggcctggccctgtggtttgatgcctatgccctgcggcggcagaagtatgacctgccctgcacccagggccagtggaccatccagaacagaaggctgtgtggcctgcgcatcctgcagccctatgcagagcgcatccctgtggtggccacagctggcatcaccatcaacttcaccagccagatcagcctgaccggccctggggtgcgggtgcactacggcctgtacaaccagagcgacccctgccctggagagttcctgtgcagcgtgaatggcctgtgtgtgcctgcctgtgatggagtgaaggactgccccaacggcctggatgagaggaactgtgtgtgccgggccaccttccagtgcaaggaggacagcacctgcatcagcctgcccaaggtgtgtgatggccagcctgactgcctgaatggaagtgatgaggagcagtgccaggagggcgtgccctgtggcaccttcaccttccagtgtgaggacaggagctgtgtgaagaagcccaacccccagtgtgatggccgcccagactgcagagatggcagtgatgaggagcactgtgactgtggcctgcagggccccagcagccgcatcgtgggcggcgctgtgtcctctgagggggagtggccctggcaggccagcctgcaggtgcggggccgccacatctgtggcggggccctgattgctgaccgctgggtgatcacagctgcccactgcttccaggaggacagcatggccagcacagtgctgtggacagtgttcctgggcaaggtgtggcagaacagccgctggccaggagaggtgtccttcaaggtgtcccggctgctgctgcacccctaccacgaggaggacagccatgactatgatgtggccctgctgcagctggaccaccctgtggtgcgctctgctgctgtgcggcctgtgtgcctgcctgcccggagccacttctttgagcccggcctgcactgctggatcaccggctggggcgccctgcgggagggcgccctgcgggcagatgctgtggccctcttctacggctggaggaaccagggcagcgagacctgctgctgccccatcagcaatgccctgcagaaggtggatgtgcagctgatcccccaggacctgtgcagcgaggtgtaccgctaccaggtgacccccaggatgctgtgtgccggctacaggaagggcaagaaggatgcctgccagggcgacagcggcggccccctggtgtgcaaggccctgagcggccgctggttcctggccggcctggtgtcctggggcctgggctgcggccggcccaactactttggagtgtacacccgcatcactggagtcatctcctggatccagcaggtggtgacctag

SEQ ID NO: 323360 - DNA, 2475 bp, Artificial Sequence
  derived and/or modified sequence
atgcccgtggccgaggccccccaggtggccggcggccagggcgacggtggcgacggagaagaagctgagccggaggggatgtttaaggcatgcgaggattctaagagaaaggcaaggggttacctgcgtttggttccattgttcgtgttacttgcgttgcttgtattggcctccgcgggcgtgctactgtggtatttcctagggtacaaggccgaagtaatggtttctcaggtgtatagcggcagcctccgggtattaaatcgccactttagccaggacttgaccaggcgcgagagctcggcattccgcagcgagaccgcaaaggcccagaaaatgctgaaggagctgattacatccacacgtcttggcacatattataattcttcctctgtgtactcgtttggcgaaggccctctgacctgttttttctggtttatcttgcagattccagaacaccggaggctaatgctgagccccgaagtggtgcaggccttgttggtggaggaactgctgtctaccgttaattcaagtgcggccgtgccttatagggctgaatacgaagtggatcccgagggtttggtcattctcgaagccagcgtcaaagacatcgccgcgctgaatagtacgctgggttgttatcggtacagctacgtgggacagggacaagtgttacggctgaagggacctgaccacctggcatcatcctgtctttggcatctgcagggccccaaagacttgatgctgaaactccggctggaatggactcttgctgagtgtagagaccgcctggcgatgtatgacgtggctggccctctggagaagcgcctgataactagtgtctatggctgctccagacaggagcccgttgtcgaggtgttggccagcggggcaattatggcagtggtgtggaagaaggggttgcactcctactatgacccattcgtgctctctgtgcaacctgtggtttttcaggcctgtgaggtgaacctcacactagacaatagacttgactcccagggggtgttgtcaaccccttactttccctcctactattcaccacaaactcattgttcgtggcatttgaccgtgccatcattggactacggccttgcactgtggttcgacgcatatgccctcagacgccagaagtacgatctcccctgtacacagggacagtggaccattcagaatcgtagactttgcgggttaaggatactacagccctacgcagagcgtattccagtggtggccacagcaggaatcacgattaacttcactagtcagataagcttgaccgggcccggggtgagagtacactacggattatacaaccaatctgatccatgtccgggcgaatttctatgctccgttaacgggctctgtgtgcccgcctgcgacggggtcaaagattgtccgaatgggctggacgagcgtaactgtgtgtgtagggccacctttcagtgtaaagaggactccacgtgtatatctttacctaaggtatgcgatgggcaaccggactgtctgaacgggtccgatgaggaacagtgtcaagaaggcgtgccctgcgggaccttcacattccagtgcgaggatcgtagttgtgtgaagaaacctaatcctcagtgcgacggccgtccggactgccgcgacgggtctgatgaagaacactgtgactgcggcttacagggcccatcctctaggattgtaggcggagcggtaagctccgaaggcgagtggccttggcaagcaagtttgcaggtgagagggagacatatctgcgggggagccctcattgcggataggtgggtcatcactgcagcgcattgttttcaggaagatagcatggcttctacagtactgtggactgtcttcctcggcaaagtgtggcaaaattcaaggtggcccggggaggtgtcattcaaggtgtccaggctcctactgcacccataccatgaggaagactcacacgattatgacgtggctctactgcagctcgaccatcctgtggtgaggtcagctgctgtcagacccgtgtgcctgcctgcgcgctcacacttttttgaacccggtctgcactgctggataacaggttggggtgcactacgggagggcgccctcagggccgacgctgtagcgctgttctatggatggcgtaaccaagggtccgaaacatgctgttgccccatttcgaatgcactgcagaaagtcgatgtgcagctcatcccgcaggacctttgctcagaagtataccggtaccaggttaccccacgaatgctatgcgcagggtacagaaagggcaagaaggatgcttgccagggcgattcaggaggacccctggtttgcaaagctctaagcggaaggtggtttttggctggccttgtgagctggggactcggttgcgggcgccctaattacttcggagtgtatactcggattaccggcgtcatctcctggattcagcaagtcgtcacttag

SEQ ID NO: 323361 - DNA, 2475 bp, Artificial Sequence
  derived and/or modified sequence
atgcccgtggccgaggccccccaggtggccggcggccagggcgacggtggcgacggtgaggaggccgagcctgaaggcatgttcaaggcttgtgaggacagcaaaagaaaggctcgcggctatctgcgcctggttcctttgttcgtcctactagcactacttgtgctggccagcgctggtgtgctgctttggtactttttgggctacaaggctgaagtgatggtttcccaagtttattcaggcagcctcagggtgttaaatcggcacttttcacaggaccttaccaggcgagagtcctcggccttccggagtgagaccgctaaggcgcagaaaatgttaaaggaacttattacctccacgcgcctcgggacctactacaattcaagtagtgtatactcattcggcgagggccccttgacatgttttttctggtttatcctgcaaattcccgagcaccggcgactgatgctgtcccccgaagtggtgcaggctctgcttgtggaggaactcttgtccacagtgaattctagcgccgctgtgccttatcgagcggagtacgaggtcgaccccgagggcctcgtcattctggaagcttcagtgaaggacatcgccgcattaaattcaacactcggctgctatcggtactcatacgtgggacagggacaggtgttacggctaaagggcccagaccatctcgcaagcagctgtctttggcacctgcaaggacctaaggaccttatgcttaaactccgattggagtggactctcgctgagtgtcgcgatagattggctatgtacgacgtggcaggtccactggagaagaggcttatcacatccgtttacggatgctctcggcaagagcccgtagtagaggtgctcgccagtggtgccatcatggcggtggtgtggaaaaagggccttcactcttactacgaccccttcgtgctgtctgttcagcctgtcgtattccaagcttgtgaggttaacctcacactggataaccggctggactcccaaggggtcctttctacaccatattttccctcttattacagcccccagacgcactgcagctggcacctgacagttccttcattagactatgggctggccttgtggttcgatgcgtacgcgctccgtagacagaagtacgacctcccttgcacccaggggcaatggaccatccagaaccgccggctctgtgggttacgaattctgcagccgtacgcggagcgaatacccgtggtggcaactgccgggatcaccatcaacttcacttctcagatttccctcacaggccccggggtgagggtgcattatgggctttacaatcaatcagatccgtgtcccggtgagtttctgtgtagcgtcaatggactttgcgtacccgcgtgtgatggcgtcaaggattgtcccaatggcctggacgagaggaactgcgtttgccgagccacgtttcagtgtaaggaagattccacgtgcatttcactccctaaagtgtgtgatggacagcctgactgtctcaacggaagcgatgaggaacagtgccaggagggagtgccctgcggaaccttcactttccaatgcgaggatcgatcatgtgttaaaaagccgaatcctcaatgtgacggacggcctgattgtcgcgatggcagcgacgaggaacattgtgattgcgggctgcagggaccctccagcagaatcgtcggcggtgctgtgtctagcgagggggaatggccttggcaagcctctctgcaggtacgcggacgccacatctgcgggggcgctctgatagctgatcggtgggtgattactgctgcacactgcttccaggaagactctatggcttccacagttctgtggactgtgttcctaggtaaagtgtggcagaatagccgatggccaggggaggtgtcttttaaagtaagcagactactcctccacccataccacgaggaggatagtcacgactacgatgtggcactcctgcagcttgatcatccagtcgtccgctctgcagctgtgagaccagtctgcctccctgccaggtcccacttcttcgagcccggtttgcattgctggataaccggatggggcgcactacgcgagggtgccctacgggctgacgccgtcgccctgttctacggatggcgtaaccagggtagcgaaacctgctgctgcccaatctcaaatgcactgcaaaaggtggatgtgcagttgatacctcaggacctgtgttcagaagtataccgataccaggttaccccgaggatgctgtgtgctggctatcgcaaaggcaagaaggacgcttgccagggcgactccggcggtccactcgtctgcaaagcactatcaggaagatggttcctggcaggcctggtaagctggggcttaggctgtggtagacctaattatttcggagtgtacacccgcatcacaggcgttatctcctggattcaacaagtggttacttag

SEQ ID NO: 323362 - DNA, 2475 bp, Artificial Sequence
  derived and/or modified sequence
atgcccgtggcggaagccccacaggtcgccggtgggcagggcgacgggggagatggagaggaggcagaacccgagggtatgttcaaagcctgcgaggacagtaaacgaaaggcacggggttatctcagattagtccctctgttcgtcctgctcgcccttctggtccttgcttccgccggagtgctgctgtggtattttctcggttataaggctgaagttatggtgtctcaggtgtacagtggttctctgcgggtgctgaataggcatttcagccaggacctcaccaggcgagagtcctcagcctttagaagtgagactgctaaggcccagaaaatgttgaaggagctgattacatccactcgcttaggcacatactacaactcatcctccgtgtactcttttggcgagggcccactcacatgttttttctggtttatcttgcagatccctgaacaccggaggctgatgctatctcccgaggttgtgcaggctcttctggtggaggagctgctgtctactgtgaattcctctgctgctgttccttaccgcgctgagtacgaagtggatcccgagggcctggtcatattggaagcttctgtgaaagatatagcggcattaaactctacgctgggatgttatagatacagttatgtcggacagggccaggttctgcggctgaaagggcctgatcatcttgccagcagctgcctttggcacttacagggccctaaagacctcatgctgaagctcaggctggaatggaccctcgccgaatgtagggaccgattggcaatgtatgatgtggctggccctctcgagaagcgtttaatcaccagcgtgtatggatgctcgaggcaagagccagttgttgaggtgctagctagcggggcaattatggccgtagtttggaagaagggactccattcatactatgatccgttcgtcctttctgtccagccagttgtctttcaggcgtgcgaggtgaaccttactttagacaatcgactcgattcgcagggggtgctgagcacaccttattttccgtcctactattctccacagactcactgctcatggcacctgacagtgccatctctggactacggactagccctatggttcgacgcttacgctctgagacgccagaaatacgatctaccttgcacccagggtcagtggacgatccaaaaccggcgattgtgtggtttgcgcattcttcagccatacgccgaacggatcccagtggtcgccacagctggtataaccattaacttcacatctcagatctccctgactggcccaggggtgagggtccactatggcctctacaatcagagcgatccgtgcccaggtgagtttctctgttccgttaacgggctgtgcgtgcccgcttgtgatggtgtgaaagattgcccaaatgggctggatgagaggaattgcgtgtgccgggcaacattccagtgcaaggaggactcaacatgtatatccctcccaaaggtgtgtgatggacagcctgattgtctcaacgggagcgacgaggagcagtgtcaggaaggagtcccttgcgggacctttacgttccagtgtgaagatcgatcctgtgtgaaaaaaccaaacccccaatgtgacggtagaccggactgtagggatggaagtgacgaggagcactgtgattgcggacttcagggcccatccagccgcatagtcgggggagcagtctcctcggagggtgaatggccgtggcaggcatccctccaagtgcgcggtaggcacatctgcggcggtgctctaattgcggatcgatgggttattaccgcagctcactgcttccaagaggactccatggcaagtactgtactctggaccgtcttcctcggtaaggtgtggcagaattcaaggtggcccggagaggtgtcgttcaaggtcagtcgactgctgctgcacccttaccacgaggaagatagccatgattacgacgtagccttgcttcaattagaccaccctgtcgtgaggtccgccgctgtgaggcctgtatgtcttccagcgagatcacacttttttgaacctggccttcactgttggattacgggctggggggctcttagagagggcgctttacgtgcggacgctgtcgccctgttttatgggtggcggaaccaaggttccgagacatgctgctgtcccatttcaaatgcgcttcagaaggtagacgtacagctaatcccccaagacttgtgcagcgaggtctatcggtatcaggtcacgccacgaatgctgtgcgccggatataggaagggcaaaaaggatgcgtgccagggtgattccggaggcccactcgtgtgcaaggcactgtctggtaggtggttcctggccggtctcgtgtcctggggcctgggctgtgggaggcctaactacttcggggtgtacacgcgtatcactggggtgattagctggattcagcaggtggtgacttag

SEQ ID NO: 323363 - DNA, 2475 bp, Artificial Sequence
  derived and/or modified sequence
atgccagtggccgaggcaccacaggtcgcgggagggcagggggacggcggagacggcgaggaggcggaacccgaaggaatgttcaaggcatgcgaagactccaagcgcaaggccaggggctacctgcgtctcgtgccactgtttgtcctcctcgccttactcgtcctggccagcgccggtgtgctgctgtggtacttcctggggtacaaggcggaggtgatggtttcgcaggtgtacagtggaagtttgcgggtgcttaaccggcatttctcacaagaccttacgcggagagaatccagcgcattccggagcgagacggccaaagcccagaaaatgttgaaggagctcatcacctctacacgtctgggaacctattacaactcctccagcgtgtattctttcggggaagggccactcacctgttttttctggtttatcctgcagattccagagcatcgacgcctcatgctttcccccgaggttgtccaggctctgctcgtcgaagagttacttagcacagttaatagctcagcagccgtgccataccgtgcagagtatgaggttgaccccgagggactggtgattctggaggcctccgttaaagacatcgccgctcttaactctacactgggatgttaccgttacagctatgttggacagggacaggtactgagattgaagggcccagaccatctggcctcgtcatgcctgtggcacctgcagggtccgaaagacttgatgttaaagctgaggctggagtggacccttgcggaatgccgagatcgtctcgcaatgtacgatgtggccggaccgttggaaaagagactgattacctcagtgtacggatgctcccggcaagagcccgtggtcgaggtcttggcttctggcgctatcatggcggtggtgtggaagaaggggctgcattcttattacgatccattcgttctgtcggtgcaaccagtggtcttccaggcttgcgaggtgaacttgacactagataatcggctggacagtcagggcgtgctgagcaccccatacttcccctcctactattcccctcagacgcattgctcctggcacctgactgttcctagtttagactatggcctggcgctctggttcgatgcttatgcacttaggaggcagaaatacgacctgccttgtactcaggggcagtggactatccagaatcgtcgactgtgtgggctccggatactgcagccatatgctgaaagaatacctgtggtggccacggcaggtataactattaattttacgagccagatctctctgacgggcccaggggtgcgggttcactatggcctatacaaccagagtgatccctgcccaggcgagttcctctgctccgtcaatggactgtgtgtgccagcctgcgacggcgtgaaagactgtcctaatggactggacgagaggaactgcgtttgccgcgcaacctttcagtgcaaggaagattccacttgcatctctttgccaaaagtctgtgacggccagcccgattgcctgaatggtagcgatgaggagcagtgccaagagggagtgccatgcggcacttttactttccaatgtgaagacagatcctgtgtcaaaaaacctaatccgcagtgcgatggcaggcccgactgccgagacggctccgacgaggagcactgcgattgcggtcttcagggcccaagctcacggattgtgggtggcgcagtgagctcggagggcgaatggccatggcaggccagcctccaggttagaggcaggcatatttgcggaggcgcactgatcgcagacaggtgggttattacagccgcacactgcttccaggaggattctatggcgtccacggtcttatggaccgtctttctgggcaaggtgtggcagaactcccgatggcccggtgaggtctccttcaaagtgagcaggctgctgctgcacccttaccacgaagaagattctcacgattatgacgtagcattgctgcagctggatcatcctgttgtccggagcgcagcagtccgtcccgtgtgcctaccagcacgcagccacttctttgaacccggtcttcactgctggattactggttggggagctttaagggagggggctctgagagctgacgctgtggccctgttctatgggtggcgcaaccaaggtagcgagacttgttgttgtcccatctctaatgcactccagaaggtagacgttcaattgattccccaggacctatgttctgaagtctacagataccaggttacaccaagaatgttgtgtgctggataccggaaaggcaaaaaggatgcgtgccagggggactccggaggaccactggtttgtaaagcccttagcggtcgatggttcttggcgggactggtttcatggggcctgggatgtggccgacctaactactttggcgtgtacactagaattaccggagtgattagctggattcagcaggtcgtaacatag

SEQ ID NO: 323364 - DNA, 3260 bp, Artificial Sequence
  derived and/or modified sequence
cttgagccagacccagtccagctctggtgcctgccctctggtgcgagctgacctgagatgcacttccctcctctgtgagctgtctcggcacccacttgcagtcactgccgcctgatgttgttactcttccactccaaaaggatgcccgtggccgaggccccccaggtggctggcgggcagggggacggaggtgatggcgaggaagcggagccggaggggatgttcaaggcctgtgaggactccaagagaaaagcccggggctacctccgcctggtgcccctgtttgtgctgctggccctgctcgtgctggcttcggcgggggtgctactctggtatttcctagggtacaaggcggaggtgatggtcagccaggtgtactcaggcagtctgcgtgtactcaatcgccacttctcccaggatcttacccgccgggaatctagtgccttccgcagtgaaaccgccaaagcccagaagatgctcaaggagctcatcaccagcacccgcctgggaacttactacaactccagctccgtctattcctttggggagggacccctcacctgcttcttctggttcattctccaaatccccgagcaccgccggctgatgctgagccccgaggtggtgcaggcactgctggtggaggagctgctgtccacagtcaacagctcggctgccgtcccctacagggccgagtacgaagtggaccccgagggcctagtgatcctggaagccagtgtgaaagacatagctgcattgaattccacgctgggttgttaccgctacagctacgtgggccagggccaggtcctccggctgaaggggcctgaccacctggcctccagctgcctgtggcacctgcagggccccaaggacctcatgctcaaactccggctggagtggacgctggcagagtgccgggaccgactggccatgtatgacgtggccgggcccctggagaagaggctcatcacctcggtgtacggctgcagccgccaggagcccgtggtggaggttctggcgtcgggggccatcatggcggtcgtctggaagaagggcctgcacagctactacgaccccttcgtgctctccgtgcagccggtggtcttccaggcctgtgaagtgaacctgacgctggacaacaggctcgactcccagggcgtcctcagcaccccgtacttccccagctactactcgccccaaacccactgctcctggcacctcacggtgccctctctggactacggcttggccctctggtttgatgcctatgcactgaggaggcagaagtatgatttgccgtgcacccagggccagtggacgatccagaacaggaggctgtgtggcttgcgcatcctgcagccctacgccgagaggatccccgtggtggccacggccgggatcaccatcaacttcacctcccagatctccctcaccgggcccggtgtgcgggtgcactatggcttgtacaaccagtcggacccctgccctggagagttcctctgttctgtgaatggactctgtgtccctgcctgtgatggggtcaaggactgccccaacggcctggatgagagaaactgcgtttgcagagccacattccagtgcaaagaggacagcacatgcatctcactgcccaaggtctgtgatgggcagcctgattgtctcaacggcagcgacgaagagcagtgccaggaaggggtgccatgtgggacattcaccttccagtgtgaggaccggagctgcgtgaagaagcccaacccgcagtgtgatgggcggcccgactgcagggacggctcggatgaggagcactgtgactgtggcctccagggcccctccagccgcattgttggtggagctgtgtcctccgagggtgagtggccatggcaggccagcctccaggttcggggtcgacacatctgtgggggggccctcatcgctgaccgctgggtgataacagctgcccactgcttccaggaggacagcatggcctccacggtgctgtggaccgtgttcctgggcaaggtgtggcagaactcgcgctggcctggagaggtgtccttcaaggtgagccgcctgctcctgcacccgtaccacgaagaggacagccatgactacgacgtggcgctgctgcagctcgaccacccggtggtgcgctcggccgccgtgcgccccgtctgcctgcccgcgcgctcccacttcttcgagcccggcctgcactgctggattacgggctggggcgccttgcgcgagggcgccctacgggcggatgctgtggccctattttatggatggagaaaccaaggctcagagacatgttgctgccccatcagcaacgctctgcagaaagtggatgtgcagttgatcccacaggacctgtgcagcgaggtctatcgctaccaggtgacgccacgcatgctgtgtgccggctaccgcaagggcaagaaggatgcctgtcagggtgactcaggtggtccgctggtgtgcaaggcactcagtggccgctggttcctggcggggctggtcagctggggcctgggctgtggccggcctaactacttcggcgtctacacccgcatcacaggtgtgatcagctggatccagcaagtggtgacctgaggaactgcccccctgcaaagcagggcccacctcctggactcagagagcccagggcaactgccaagcagggggacaagtattctggcggggggtgggggagagagcaggccctgtggtggcaggaggtggcatcttgtctcgtccctgatgtctgctccagtgatggcaggaggatggagaagtgccagcagctgggggtcaagacgtcccctgaggacccaggcccacacccagcccttctgcctcccaattctctctcctccgtccccttcctccactgctgcctaatgcaaggcagtggctcagcagcaagaatgctggttctacatcccgaggagtgtctgaggtgcgccccactctgtacagaggctgtttgggcagccttgcctccagagagcagattccagcttcggaagcccctggtctaacttgggatctgggaatggaaggtgctcccatcggaggggaccctcagagccctggagactgccaggtgggcctgctgccactgtaagccaaaaggtggggaagtcctgactccagggtccttgccccacccctgcctgccacctgggccctcacagcccagaccctcactgggaggtgagctcagctgccctttggaataaagctgcctgatccaa

SEQ ID NO: 323365 - DNA, 3178 bp, Artificial Sequence
  derived and/or modified sequence
ggacaaacagaggctcctgaggcctgtgtgcaggcccggcacctatctgccgctcccaaaggatgcccgtggccgaggccccccaggtggctggcgggcagggggacggaggtgatggcgaggaagcggagccggaggggatgttcaaggcctgtgaggactccaagagaaaagcccggggctacctccgcctggtgcccctgtttgtgctgctggccctgctcgtgctggcttcggcgggggtgctactctggtatttcctagggtacaaggcggaggtgatggtcagccaggtgtactcaggcagtctgcgtgtactcaatcgccacttctcccaggatcttacccgccgggaatctagtgccttccgcagtgaaaccgccaaagcccagaagatgctcaaggagctcatcaccagcacccgcctgggaacttactacaactccagctccgtctattcctttggggagggacccctcacctgcttcttctggttcattctccaaatccccgagcaccgccggctgatgctgagccccgaggtggtgcaggcactgctggtggaggagctgctgtccacagtcaacagctcggctgccgtcccctacagggccgagtacgaagtggaccccgagggcctagtgatcctggaagccagtgtgaaagacatagctgcattgaattccacgctgggttgttaccgctacagctacgtgggccagggccaggtcctccggctgaaggggcctgaccacctggcctccagctgcctgtggcacctgcagggccccaaggacctcatgctcaaactccggctggagtggacgctggcagagtgccgggaccgactggccatgtatgacgtggccgggcccctggagaagaggctcatcacctcggtgtacggctgcagccgccaggagcccgtggtggaggttctggcgtcgggggccatcatggcggtcgtctggaagaagggcctgcacagctactacgaccccttcgtgctctccgtgcagccggtggtcttccaggcctgtgaagtgaacctgacgctggacaacaggctcgactcccagggcgtcctcagcaccccgtacttccccagctactactcgccccaaacccactgctcctggcacctcacggtgccctctctggactacggcttggccctctggtttgatgcctatgcactgaggaggcagaagtatgatttgccgtgcacccagggccagtggacgatccagaacaggaggctgtgtggcttgcgcatcctgcagccctacgccgagaggatccccgtggtggccacggccgggatcaccatcaacttcacctcccagatctccctcaccgggcccggtgtgcgggtgcactatggcttgtacaaccagtcggacccctgccctggagagttcctctgttctgtgaatggactctgtgtccctgcctgtgatggggtcaaggactgccccaacggcctggatgagagaaactgcgtttgcagagccacattccagtgcaaagaggacagcacatgcatctcactgcccaaggtctgtgatgggcagcctgattgtctcaacggcagcgacgaagagcagtgccaggaaggggtgccatgtgggacattcaccttccagtgtgaggaccggagctgcgtgaagaagcccaacccgcagtgtgatgggcggcccgactgcagggacggctcggatgaggagcactgtgactgtggcctccagggcccctccagccgcattgttggtggagctgtgtcctccgagggtgagtggccatggcaggccagcctccaggttcggggtcgacacatctgtgggggggccctcatcgctgaccgctgggtgataacagctgcccactgcttccaggaggacagcatggcctccacggtgctgtggaccgtgttcctgggcaaggtgtggcagaactcgcgctggcctggagaggtgtccttcaaggtgagccgcctgctcctgcacccgtaccacgaagaggacagccatgactacgacgtggcgctgctgcagctcgaccacccggtggtgcgctcggccgccgtgcgccccgtctgcctgcccgcgcgctcccacttcttcgagcccggcctgcactgctggattacgggctggggcgccttgcgcgagggcgccctacgggcggatgctgtggccctattttatggatggagaaaccaaggctcagagacatgttgctgccccatcagcaacgctctgcagaaagtggatgtgcagttgatcccacaggacctgtgcagcgaggtctatcgctaccaggtgacgccacgcatgctgtgtgccggctaccgcaagggcaagaaggatgcctgtcagggtgactcaggtggtccgctggtgtgcaaggcactcagtggccgctggttcctggcggggctggtcagctggggcctgggctgtggccggcctaactacttcggcgtctacacccgcatcacaggtgtgatcagctggatccagcaagtggtgacctgaggaactgcccccctgcaaagcagggcccacctcctggactcagagagcccagggcaactgccaagcagggggacaagtattctggcggggggtgggggagagagcaggccctgtggtggcaggaggtggcatcttgtctcgtccctgatgtctgctccagtgatggcaggaggatggagaagtgccagcagctgggggtcaagacgtcccctgaggacccaggcccacacccagcccttctgcctcccaattctctctcctccgtccccttcctccactgctgcctaatgcaaggcagtggctcagcagcaagaatgctggttctacatcccgaggagtgtctgaggtgcgccccactctgtacagaggctgtttgggcagccttgcctccagagagcagattccagcttcggaagcccctggtctaacttgggatctgggaatggaaggtgctcccatcggaggggaccctcagagccctggagactgccaggtgggcctgctgccactgtaagccaaaaggtggggaagtcctgactccagggtccttgccccacccctgcctgccacctgggccctcacagcccagaccctcactgggaggtgagctcagctgccctttggaataaagctgcctgatc

SEQ ID NO: 323366 - protein, 200 aa, Artificial Sequence
  derived and/or modified sequence
MALLTAETFRLQFNNKRRLRRPYYPRKALLCYQLTPQNGSTPTRGYFENKKKCHAEICFINEIKSMGLDETQCYQVTCYLTWSPCSSCAWELVDFIKAHDHLNLGIFASRLYYHWCKPQQKGLRLLCGSQVPVEVMGFPKFADCWENFVDHEKPLSFNPYKMLEELDKNSRAIKRRLERIKIPGVRAQGRYMDILCDAEV

SEQ ID NO: 323367 - DNA, 603 bp, Artificial Sequence
  derived and/or modified sequence
atggcgctcctgacagccgagaccttcaggttgcagttcaacaataaacggagacttcgacggccatactacccaaggaaagctttactgtgctaccagttaactcctcagaatggatctacacctactagggggtactttgagaataaaaagaagtgtcacgctgagatttgcttcattaacgagatcaaatctatgggcctcgacgagacccaatgctatcaagtgacatgttacttgacgtggtcaccttgttcttcctgcgcatgggaactggtggattttatcaaggctcacgaccacctgaatctggggatcttcgctagccgcctatattatcactggtgtaagccacagcagaaggggcttaggctcctgtgcggatcccaggtccctgtcgaagttatgggatttcccaagttcgccgactgctgggagaactttgtggaccatgagaaaccattgtccttcaacccttataaaatgctggaggagctggacaagaatagtagagcaataaaaagacgtcttgaaaggatcaagatcccaggcgtgagggctcaaggccgatacatggatatcctgtgcgatgcggaagtctag

SEQ ID NO: 323368 - DNA, 603 bp, Artificial Sequence
  derived and/or modified sequence
atggccctgctgacagctgagaccttccggctgcagttcaacaacaagaggcggctgcggcggccctactaccccaggaaggccctgctgtgctaccagctgaccccccagaatggcagcacccccacccggggctactttgagaacaagaagaagtgccacgccgagatctgcttcatcaatgagatcaagtccatgggcctggatgagacccagtgctaccaggtgacctgctacctgacctggagcccctgcagcagctgtgcctgggagctggtggacttcatcaaggcccatgaccacctgaacctgggcatctttgccagccggctgtactaccactggtgcaagccccagcagaagggcctgcggctgctgtgtggcagccaggtgcctgtggaggtgatgggcttccccaagtttgctgactgctgggagaactttgtggaccacgagaagcccctgtccttcaacccctacaagatgctggaggagctggacaagaacagccgggccatcaagaggcggctggagcgcatcaagatccctggggtgcgggcccagggccgctacatggacatcctgtgtgatgctgaggtgtag

SEQ ID NO: 323369 - DNA, 603 bp, Artificial Sequence
  derived and/or modified sequence
atggccctgctgaccgccgagaccttccggctgcagttcaacaacaagagacggttaagaaggccttactacccaaggaaagcattgctgtgttaccagctcacccctcagaatggatccacccccacaaggggctacttcgaaaacaagaaaaaatgtcatgctgagatatgttttatcaatgagattaaaagtatgggcctggatgagactcagtgctatcaggttacatgctatctgacctggtcgccctgcagctcttgtgcctgggaactggtagatttcattaaggctcatgaccacctcaatctcggcatttttgcctccaggctctactatcattggtgtaagccgcagcagaagggactgaggttgctttgcggttcgcaggtccctgtggaagtcatgggcttccctaagttcgcagactgttgggagaatttcgtcgaccatgaaaaacccctgtctttcaatccttacaaaatgctggaggagttggacaaaaactccagggcaatcaagcggagacttgaacgcatcaagatccccggggttagagcccaaggcaggtatatggacatcctctgcgatgctgaggtgtag

SEQ ID NO: 323370 - DNA, 603 bp, Artificial Sequence
  derived and/or modified sequence
atggctttgctaacagcagaaactttcagactgcagttcaataacaaacggcgtcttaggcgaccctattacccacgaaaggcgttgctgtgctaccagctcactccccaaaatggcagcacacctacacggggatacttcgaaaataagaagaagtgccacgccgaaatttgttttattaacgagatcaagagcatgggccttgacgaaacccagtgctaccaggtgacgtgttacctaacatggtccccttgtagttcttgtgcgtgggagttagtggactttatcaaggctcacgaccatctcaatctcgggatcttcgcttccaggctgtattatcactggtgcaagccgcagcaaaaggggctgcggttgctctgtggctctcaggtgcctgtggaggtcatggggtttcctaagttcgctgattgttgggagaacttcgtggatcacgagaagcctttgagtttcaacccgtacaaaatgttagaagaactcgacaaaaactcacgggctattaaacggaggctggagcggatcaaaatcccaggtgtccgcgctcaggggaggtatatggatatattatgtgatgctgaagtgtag

SEQ ID NO: 323371 - DNA, 1023 bp, Artificial Sequence
  derived and/or modified sequence
tgaaacttagtgcctcagacaagcaggggcaagtctgctaaggaagctgtggccagaagcacagatcagaaacacgatggctctgttaacagccgaaacattccgcttacagtttaacaacaagcgccgcctcagaaggccttactacccgaggaaggccctcttgtgttaccagctgacgccgcagaatggctccacgcccacgagaggctactttgaaaacaagaaaaagtgccatgcagaaatttgctttattaacgagatcaagtccatgggactggacgaaacgcagtgctaccaagtcacctgttacctcacgtggagcccctgctcctcctgtgcctgggagctggttgacttcatcaaggctcacgaccatctgaacctgggcatcttcgcctcccgcctgtactaccactggtgcaagccccagcagaaggggctgcggcttctgtgtggatcccaggtcccggtggaggtcatgggcttcccaaagtttgctgactgctgggaaaactttgtggaccacgagaaaccgctttccttcaacccctataagatgttagaggagctagataaaaacagtcgagccataaagcgacggcttgagaggataaagattccaggggtacgtgcgcagggtcgttacatggatatattgtgtgatgctgaggtctgagtcacccaatctactggaacatagcacccaatagcagtcctgaagtgtggatgttttagagaatgacttaagaagtttgcagcttggacccgtatcccactcattatcaagaagcaactcaagatgactttccctggggcatgtcagttgcctcatagcctgctggtcctgtaagcaagcactaagctccacagtgccagttccttgccccaacctggccccatccaagtacagaagaccttcctttcctcctttttccatattgctttctgttctaagtgggtgaataattttataattgaaaaaataaagataaagtctgtaaatccagccgggtacggtgg

SEQ ID NO: 323372 - DNA, 603 bp, Artificial Sequence
  derived and/or modified sequence
atggccctgctgaccgccgagaccttcagactgcagttcaacaacaagagaagactgagaagaccctactaccccagaaaggccctgctgtgctaccagctgaccccccagaacggcagcacccccaccagaggctacttcgagaacaagaagaagtgccacgccgagatctgcttcatcaacgagatcaagagcatgggcctggacgagacccagtgctaccaggtgacctgctacctgacctggagcccctgcagcagctgcgcctgggagctggtggacttcatcaaggcccacgaccacctgaacctgggcatcttcgccagcagactgtactaccactggtgcaagccccagcagaagggcctgagactgctgtgcggcagccaggtgcccgtggaggtgatgggcttccccaagttcgccgactgctgggagaacttcgtggaccacgagaagcccctgagcttcaacccctacaagatgctggaggagctggacaagaacagcagagccatcaagagaagactggagagaatcaagatccccggcgtgagagcccagggcagatacatggacatcctgtgcgacgccgaggtgtag

SEQ ID NO: 323373 - protein, 583 aa, Artificial Sequence
  derived and/or modified sequence
MASTDYSTYSQAAAQQGYSAYTAQPTQGYAQTTQAYGQQSYGTYGQPTDVSYTQAQTTATYGQTAYATSYGQPPTGYTTPTAPQAYSQPVQGYGTGAYDTTTATVTTTQASYAAQSAYGTQPAYPAYGQQPAATAPTRPQDGNKPTETSQPQSSTGGYNQPSLGYGQSNYSYPQVPGSYPMQPVTAPPSYPPTSYSSTQPTSYDQSSYSQQNTYGQPSSYGQQSSYGQQSSYGQQPPTSYPPQTGSYSQAPSQYSQQSSSYGQQRPMDEGPDLDLGPPVDPDEDSDNSAIYVQGLNDSVTLDDLADFFKQCGVVKMNKRTGQPMIHIYLDKETGKPKGDATVSYEDPPTAKAAVEWFDGKDFQGSKLKVSLARKKPPMNSMRGGLPPREGRGMPPPLRGGPGGPGGPGGPMGRMGGRGGDRGGFPPRGPRGSRGNPSGGGNVQHRAGDWQCPNPGCGNQNFAWRTECNQCKAPKPEGFLPPPFPPPGGDRGRGGPGGMRGGRGGLMDRGGPGGMFRGGRGGDRGGFRGGRGMDRGGFGGGRRGGPGGPPGPLMEQMGGRRGGRGGPGKMDKGEHRQERRDRPY

SEQ ID NO: 323374 - protein, 180 aa, Artificial Sequence
  derived and/or modified sequence
MASTDYSTYSQAAAQQGYSAYTAQPTQGYAQTTQASYAAQSAYGTQPAYPAYGQQPAATAPTRPQDGNKPTETSQPQSSTGGYNQPSLGYGQSNYSYPQVPGSYPMQPVTAPPSYPPTSYSSTQPTSYDQSSYSQQNTYGQPSSYGQQSSYGQQSSYGQQPPTSYPPQTGSYSQAPSQYS

SEQ ID NO: 323375 - protein, 33 aa, Artificial Sequence
  derived and/or modified sequence
MLRRLDKIRFRGHKRDDFLDLAESPNASDTECS

SEQ ID NO: 323376 - DNA, 102 bp, Artificial Sequence
  derived and/or modified sequence
atgctgaggcggctggacaagatccgattcagggggcacaagagggacgactttctcgaccttgctgagtcgcccaacgcctcagatacggagtgtagttag

SEQ ID NO: 323377 - DNA, 102 bp, Artificial Sequence
  derived and/or modified sequence
atgctgcggcggctggacaagatccgcttccggggccacaagagagatgacttcctggacctggccgagagccccaatgccagtgacacagaatgttcctag

SEQ ID NO: 323378 - DNA, 102 bp, Artificial Sequence
  derived and/or modified sequence
atgctgcggcggctggacaagatccggttccggggccacaagcgggacgactttctcgacctggccgaatcaccaaatgcctccgatacagaatgctcttag

SEQ ID NO: 323379 - DNA, 102 bp, Artificial Sequence
  derived and/or modified sequence
atgctccgcagactcgataaaatcagattccgcggtcacaagagggatgactttcttgatttggctgaatcccccaatgcttctgacaccgaatgttcttag

SEQ ID NO: 323380 - DNA, 102 bp, Artificial Sequence
  derived and/or modified sequence
atgctgagaagactggacaagatcagattcagaggccacaagagagacgacttcctggacctggccgagagccccaacgccagcgacaccgagtgcagctag

SEQ ID NO: 323381 - DNA, 124 bp, Artificial Sequence
  derived and/or modified sequence
aatggaatggaatcatcgcatagaatggaatggaattatcatcgaattgaatcgaatggtatcaacatcaaacggaaaaaaacggaaatatcgaatggaatcgaagagaatcatcgaacggacc

SEQ ID NO: 323382 - DNA, 3284 bp, Artificial Sequence
  derived and/or modified sequence
gagcggtgccgcaccggccgcgggcgcagggagtattatgggctgtgggtgccgctgagcaagatggagctgtctgcagtgggcgagcgggtcttcgcggccgaatccatcatcaaacggcggatccgaaagggacgcatcgagtacctggtgaaatggaaggggtgggcgatcaagtacagcacttgggagcccgaggagaacatcctggactcgcggctcattgcagccttcgaacaaaaggagagggagcgtgagctgtatgggcccaagaagaggggacccaaacccaaaactttcctcctgaaggcgcgggcccaggccgaggccctccgcatcagtgatgtgcatttctctgtcaagccgagcgccagtgcctcctcgcccaagctgcactccagcgcagccgtgcaccggctcaagaaggacatccgccgctgccaccgtatgtcccgccgtcccctgccccgcccggacccgcaggggggcagccccggactgcgcccgcccatttcgcccttctcggagacggtgcgcatcatcaaccgcaaggtgaagccgcgggagcccaagcggaaccgcatcatcctgaacctgaaggtgatcgacaagggcgctggcggcgggggcgccgggcagggggccggggcgctggcccgccccaaagtcccctcgcggaaccgcgttataggcaagagcaagaagttcagcgagagcgtcctgcgtacacagatccgccacatgaagttcggcgcctttgcgctgtacaagcctccgcccgcccccctggtagccccgtcccccggcaaggctgaggcctcagccccgggccctgggctacttctggccgcccccgccgccccctacgacgcccgcagctctggctcctccggctgcccctcgcctacaccacagtcctctgaccccgacgacacgccccccaagctcctccccgagaccgtgagcccatccgcccccagctggcgcgagccggaggtgctcgacctgtccctccctcccgagtcggcagccaccagcaagcgggcaccgcctgaggtcacagctgctgccggcccggcacctcccacggcccctgagcccgccggtgcctcctccgagcccgaggctggggactggcgccccgagatgtcaccctgctccaatgtggtcgtcaccgatgtcaccagcaacctcctgacggtcacaatcaaggaattctgcaaccctgaggatttcgagaaggtggctgctggggtagcaggcgccgctgggggcggtggcagcattggggcgagcaagtgagggggctccaccaaggaggggggcttgggggggccctcctgcccgaagtcatactcttgctcccaccccacccttgcccccagccctctctccctgtgctttgcttgtctcaaatggctcggtgttgacccagggatggggctgggtagttggggtcccagaaagccgggggtaggggccaccctggaatggggcaggggaagggcacaccccctgcccatgcatggtagcccactgggtggtttctggaaagccctagaaactagggttcctctgccccttccacatcccacctgtctctctagcttgcttcctgctctcctgtgcggcgtctgatttctcggtgctaacctggcagctgtggggcccttaggagccccccaccgagggtggacacagtccctttccttcctgcagatgcctaggcaggaggagggcttcctgcctgtttggcaaagtcccaggcagaggccaaggatgaggcctgactcggctcctccctccacatcagccagggcatcagaagttgggccagggcggggtcttccctgctcgattttggacgaggcctaagtagaccccctatgccctgccccagccctggctctttcctaaccccctcaacggtgggaggaactggcagagggtgcgcctggccacagcctccccgcatctaaaggccccttcagttcttgaccaaaggtgctacgagaacctgccgtggaaacttccagttgtgcgtctgccccactcgctgtgtttgtccgtgggttcatacatgcattgggtgctaggccccaggctgccgggtggcaccctttacagttcctttgaacaggggcattgaaggcctggactgcctctcgcctcagtaggcctggggaccaggcttgggtctggaggtttgctgtggaagtcaccaggcctcccctcctggcccaggtgtgctgggggcaccgtgccccccacccccctgccctcctcagggtggtcagcccaacctgtcggaccttcacttcacatcatggtggggaccgagatagagagggagaccccattccaagctccctcttcctcccggtgtttggggaggatgctgaagaatccattcccgagggcctcccggcttgtcccagcccctcttttgcttctgaccacggaggctttctcacagcccagcctgcctgaagcaaaggaggctcccgtgtcctgggcagcttctgtttccctctgctgcctgggagctgaggcacccgtgccagtggcagaggccacagccccagccttaggccaggccctgggagggcaggcaggcaaaggggagaccagagggtctgtgttctccaggagaatgagggtgttggtcccagaattgggaccggggccccgctggccagccctgggccacttcccgggtctccattgtgcgtgggtggcgtgttccaggcgtggctggagctggcttcctggctgtgctgccatgggcccctccctcagaagcacgttggcaggaggccgatcagaaccctagcgcctttggtcctaagaatgggaggctgccttccttcccaatctccctgccagggcccacagcgtggccctagccctcccctccccgggatgtagaacggggaccctcgcagggttggggcgggggctgatactcctcggcccctccctaccctgccctgtgtgttggctttgtggccgtccaagtgccaattggcttttcgcccaaataagggctggtatttctcctctgtccttggaggtgatttccccctgaccccctcccccaggtgagtgaccacctgggtgccagttacaggtgtttccagagaccatagaaatgtgttttcctgagagttcgtgtcattcgtgacttttttgtaaagaagttgtgttttcagaggtgattttatgacaggaaagtgaaagaattagttttgcaaaaaaacaaaaacaaaaaaaaaaaaaaaaaa

SEQ ID NO: 323383 - DNA, 1239 bp, Artificial Sequence
  derived and/or modified sequence
atggaactctccgccgtgggcgagcgggtcttcgcagctgagtccatcatcaagcgcaggatccggaagggacgaattgagtatttggtgaagtggaaaggatgggccatcaagtattctacttgggagcccgaggaaaacatcttggacagccgcttaattgccgccttcgagcaaaaagagcgtgagagagaactgtatggaccaaagaaacgaggacccaagcccaagacatttctactcaaagctcgcgcccaggccgaagcattgcggatctctgatgtgcattttagcgtgaaaccatccgcctcggcatctagtcccaagctgcacagctctgctgcagtgcacaggttaaaaaaggatatccgtcgctgccaccggatgtcccggaggccactgcctcggcctgaccctcaagggggatcaccgggcctaaggccccctatcagccccttctcagagaccgtacgcattatcaaccggaaggtgaaaccaagagaaccaaagcgcaaccgcataatcctaaacttaaaagtgatcgataagggtgcaggcggaggaggagccggccagggcgccggcgcactcgcacggcccaaagtgcccagcagaaatagagtcatcgggaagagtaagaagttttccgagtcggttctccgcacgcagatccgtcacatgaaattcggtgcattcgcgctatacaagcccccaccagctcctttggtggctccttcgcccggcaaagcagaagccagtgcaccagggcccggactgctgctggccgccccagcagcaccctacgatgcacggagctcaggcagtagcggatgcccaagcccgaccccacagagctcagatccggatgatacgcccccaaagctcctgccggaaactgtatccccttctgccccaagctggcgggagcccgaggtgctggatctcagtctacctccagaatcagctgcgaccagtaagcgagctccacctgaagtcacagctgccgcagggcctgctcctccaacagcgcctgaacctgctggcgctagtagcgaacccgaagcgggcgattggcgacccgagatgtccccatgttcaaacgtggtggtcaccgacgtgaccagtaacctgctcacagtgactatcaaggaattttgtaatcccgaagatttcgaaaaagtcgccgctggtgtggccggggctgccggcggtgggggctctattggtgcctccaaatag

SEQ ID NO: 323384 - DNA, 1239 bp, Artificial Sequence
  derived and/or modified sequence
atggagctgtctgctgtgggggagcgggtgtttgctgctgagagcatcatcaagaggcgcatcaggaagggccgcatcgagtacctggtgaagtggaagggctgggccatcaagtacagcacctgggagcctgaggagaacatcctggacagccggctgattgctgcctttgagcagaaggagcgggagcgggagctgtatggccccaagaagaggggccccaagcccaagaccttcctgctgaaggcccgggcccaggccgaggccctgcgcatcagtgatgtgcacttctctgtgaagcccagcgccagcgccagcagccccaagctgcacagcagcgctgctgtgcaccggctgaagaaggacatccgccgctgccacaggatgagcagaagacccctgcccaggccagacccccagggcggcagccctggcctgcggccccccatcagccccttcagcgagaccgtgcgcatcatcaacaggaaggtgaagccccgggagcccaagaggaaccgcatcatcctgaacctgaaggtgattgacaagggagctgggggcggcggggccggccagggcgctggggccctggcccggcccaaggtgcccagcaggaacagagtgattggcaagagcaagaagttcagcgagagcgtgctgcggacccagatccgccacatgaagtttggagcctttgccctgtacaagcccccaccagcccccctggtggcccccagccctgggaaggccgaggccagcgcccctggccctggcctgctgctggccgccccagctgccccctatgatgcccggagcagcggcagcagcggctgccccagccccaccccccagagcagtgaccctgatgacaccccacccaagctgctgcctgagaccgtgagccccagcgcccccagctggagggagcctgaggtgctggacctgagcctgcccccagagagcgctgccaccagcaagagggcccctcctgaggtgacagctgctgctggccctgccccacccacagcccctgagcctgctggggccagcagcgagcctgaggccggggactggaggcctgagatgagcccctgcagcaatgtggtggtgacagatgtgaccagcaacctgctgactgtgaccatcaaggagttctgcaacccagaagattttgagaaggtggccgccggcgtggccggggccgccggcggcggcggcagcatcggggccagcaagtag

SEQ ID NO: 323385 - DNA, 1239 bp, Artificial Sequence
  derived and/or modified sequence
atggagctgagcgccgtgggcgagcgggtgttcgccgccgagagcatcattaagagacgaatccgcaaaggacgcattgaatacctggtgaagtggaagggatgggccatcaaatattctacctgggagcccgaggagaacattttagattccaggctgatcgcggccttcgagcagaaggagcgcgaaagagagctatacggcccgaaaaaaaggggcccaaaacccaaaacattcctgctgaaggccagagcgcaagccgaagcactgagaatatcagatgtccatttctccgtgaagcccagtgcgtctgcctctagcccaaaattgcattcatccgcagccgtgcacagacttaagaaggacatccgccgctgccaccgtatgagcaggaggcccctgccacgacctgacccacaggggggtagcccggggctccgcccacctatttcaccttttagcgagactgtgcgcatcatcaatcgcaaggttaagccccgagaacctaaacgcaaccggataatcctcaatctcaaggtcatcgacaaaggtgccggcggcgggggggcagggcagggggccggtgcacttgctcgcccaaaggttcctagccgtaaccgagtgattggaaagagcaaaaagttttctgagtccgtcctgcggacacagatccggcatatgaaattcggagcattcgccctgtataagccgcccccagcacccctggttgcgccctcccctgggaaggcggaggcatccgccccaggccctggtctcctgttagctgccccagccgcgccttatgatgccagatccagcgggagttctggatgtccctctccaaccccacaatctagcgaccctgacgatacccctcctaagttgttgccagagaccgtgagcccctccgcaccgtcatggcgggagccggaggtgcttgacctaagcctaccacccgaaagtgctgcaacaagcaagcgcgccccccccgaggttacagcagcggccggtcccgcaccaccaacagcgcccgagccagcaggcgcctctagtgaacccgaggccggagactggcggcctgaaatgagcccatgttccaatgtagtcgttaccgacgtgacttccaacctcctgactgtcacaatcaaagagttctgcaacccggaggactttgagaaagttgccgccggcgttgctggtgccgcaggtgggggggggtcaattggagcttctaagtag

SEQ ID NO: 323386 - DNA, 1239 bp, Artificial Sequence
  derived and/or modified sequence
atggagctgagcgccgtcggggagagggtgtttgctgccgagtccattatcaagaggagaatccgtaaggggcgaattgagtacctcgtcaaatggaagggctgggctattaaatacagtacatgggagccagaggaaaacattttagacagtagactaatcgccgcttttgagcagaaagaaagggagagagagctgtacggcccaaagaagagaggccctaagccgaaaacattccttctgaaagctcgggctcaagccgaggcgttacggatctccgatgtgcatttcagcgtcaaaccctctgcctccgccagcagtccaaaactgcactcttcggctgcagtgcacagactcaagaaagacattcgcaggtgccaccgtatgtcacgacgccctctgccacgcccagatcctcaggggggaagcccaggccttcgtccccctatcagcccgttctccgagacagtgcgtatcataaaccgcaaagtgaaaccaagagagcccaaaagaaaccggattattctaaatctcaaggtgatcgataagggcgcaggaggaggaggcgcaggacagggcgctggcgcacttgcaaggcctaaagtgccaagcaggaaccgggtcatcggaaagagtaagaaattctctgaatccgtgctcaggactcagatacgtcacatgaagtttggcgcatttgcattatacaaacctcctcccgcaccccttgtcgccccttcccctggcaaggccgaggcctccgcccctggacctggcttgctgttggcggctccagctgcaccgtacgacgcaaggtcttcaggtagctccggctgtccctcacccaccccgcagagttccgacccggacgacacccccccaaaactgctgccagagacggtgagccctagtgctccatcttggagagagcccgaggtgctggacctctctctccctccagaaagcgcggctacctctaaacgtgccccacccgaagtcaccgcagccgctgggcctgccccacctaccgctccggaacctgccggtgcatcatctgagcctgaagctggtgattggcgacccgaaatgagtccatgttctaacgttgtcgtcacagacgtcacctcaaatctgttaacagttacgatcaaggaattttgcaacccggaggactttgagaaggtcgccgctggagtcgcaggcgcagctggaggcggagggtcaattggagctagcaagtag

SEQ ID NO: 323387 - DNA, 6122 bp, Artificial Sequence
  derived and/or modified sequence
cgcgagcgcgcgccccgccgcgctcccgcccgccggggcctgggcgctgcggcgcgtgcgcgagcggtgccgcaccggccgcgggcgcagggagtattatgggctgtgggtgccgctgagcaagatggagctgtctgcagtgggcgagcgggtcttcgcggccgaatccatcatcaaacggcggatccgaaagggacgcatcgagtacctggtgaaatggaaggggtgggcgatcaagtacagcacttgggagcccgaggagaacatcctggactcgcggctcattgcagccttcgaacaaaaggagagggagcgtgagctgtatgggcccaagaagaggggacccaaacccaaaactttcctcctgaaggcgcgggcccaggccgaggccctccgcatcagtgatgtgcatttctctgtcaagccgagcgccagtgcctcctcgcccaagctgcactccagcgcagccgtgcaccggctcaagaaggacatccgccgctgccaccgtatgtcccgccgtcccctgccccgcccggacccgcaggggggcagccccggactgcgcccgcccatttcgcccttctcggagacggtgcgcatcatcaaccgcaaggtgaagccgcgggagcccaagcggaaccgcatcatcctgaacctgaaggtgatcgacaagggcgctggcggcgggggcgccgggcagggggccggggcgctggcccgccccaaagtcccctcgcggaaccgcgttataggcaagagcaagaagttcagcgagagcgtcctgcgtacacagatccgccacatgaagttcggcgcctttgcgctgtacaagcctccgcccgcccccctggtagccccgtcccccggcaaggctgaggcctcagccccgggccctgggctacttctggccgcccccgccgccccctacgacgcccgcagctctggctcctccggctgcccctcgcctacaccacagtcctctgaccccgacgacacgccccccaagctcctccccgagaccgtgagcccatccgcccccagctggcgcgagccggaggtgctcgacctgtccctccctcccgagtcggcagccaccagcaagcgggcaccgcctgaggtcacagctgctgccggcccggcacctcccacggcccctgagcccgccggtgcctcctccgagcccgaggctggggactggcgccccgagatgtcaccctgctccaatgtggtcgtcaccgatgtcaccagcaacctcctgacggtcacaatcaaggaattctgcaaccctgaggatttcgagaaggtggctgctggggtagcaggcgccgctgggggcggtggcagcattggggcgagcaagtgagggggctccaccaaggaggggggcttgggggggccctcctgcccgaagtcatactcttgctcccaccccacccttgcccccagccctctctccctgtgctttgcttgtctcaaatggctcggtgttgacccagggatggggctgggtagttggggtcccagaaagccgggggtaggggccaccctggaatggggcaggggaagggcacaccccctgcccatgcatggtagcccactgggtggtttctggaaagccctagaaactagggttcctctgccccttccacatcccacctgtctctctagcttgcttcctgctctcctgtgcggcgtctgatttctcggtgctaacctggcagctgtggggcccttaggagccccccaccgagggtggacacagtccctttccttcctgcagatgcctaggcaggaggagggcttcctgcctgtttggcaaagtcccaggcagaggccaaggatgaggcctgactcggctcctccctccacatcagccagggcatcagaagttgggccagggcggggtcttccctgctcgattttggacgaggcctaagtagaccccctatgccctgccccagccctggctctttcctaaccccctcaacggtgggaggaactggcagagggtgcgcctggccacagcctccccgcatctaaaggccccttcagttcttgaccaaaggtgctacgagaacctgccgtggaaacttccagttgtgcgtctgccccactcgctgtgtttgtccgtgggttcatacatgcattgggtgctaggccccaggctgccgggtggcaccctttacagttcctttgaacaggggcattgaaggcctggactgcctctcgcctcagtaggcctggggaccaggcttgggtctggaggtttgctgtggaagtcaccaggcctcccctcctggcccaggtgtgctgggggcaccgtgccccccacccccctgccctcctcagggtggtcagcccaacctgtcggaccttcacttcacatcatggtggggaccgagatagagagggagaccccattccaagctccctcttcctccgggtgtttggggaggatgctgaagaatccattcccgagggcctcccggcttgtcccagcccctcttttgcttctgaccacggaggctttctcacagcccagcctgcctgaagcaaaggaggctcccgtgtcctgggcagcttctgtttccctctgctgcctgggagctgaggcacccgtgccagtggcagaggccacagccccagccttaggccaggccctgggagggcaggcaggcaaaggggagaccagagggtctgtgttctccaggagaatgagggtgttggtcccagaattgggaccggggccccgctggccagccctgggccacttcccgggtctccattgtgcgtgggtggcgtgttccaggcgtggctggagctggcttcctggctgtgctgccatgggcccctccctcagaagcacgttggcaggaggccgatcagaaccctagcgcctttggtcctaagaatgggaggctgccttccttcccaatctccctgccagggcccacagcgtggccctagccctcccctccccgggatgtagaacggggaccctcgcagggttggggcgggggctgatactcctcggcccctccctaccctgccctgtgtgttggctttgtggccgtccaagtgccaattggcttttcgcccaaataagggctggtatttctcctctgtccttggaggtgatttccccctgaccccctcccccaggtgagtgaccacctgggtgccagttacaggtgtttccagagaccatagaaatgtgttttcctgagagttcgtgtcattcgtgacttttttgtaaagaagttgtgttttcagaggtgattttatgacaggaaagtgaaagaattagttttgcaaaaaaacaaaaacaaaaaaagaggaaaaaaaaaagaaatagaaaaaaatattgtgggattcctatgggggggtggcgggggagaaagagctatttaagaaaaaatagtaacgcagtgattgcacaggtgaggtggcaatgtcaggatggggcggaggcctgggcccagctggcaggtcccctggcatcgcaggcactgtggagagggcctggacccagatctccacacccgtgcttgctcaaagggaaggacaacagcgggcccccgggagctaacccaagctgcaggtcccggcaagctgaggtttgggagggtgggggttgtcactggtgattttctccagggggctggtgagtgggcagtttggtttcttgcccccttctgttcctttcccagttgttgggccatctggtccccaccaccgccaccctatgggggagacctccctccccacgggtcaccctaaagcccacaacctctctgagcctccctggcctgaaaggggatgcaggcttcaggaggcaagaagctgggcccctgggggtggctggggagagggaatgcatttcccttgccacaggtggtctgcttctgctggcctgagctccaagtggagcagcccgggccagccttggtgcatgaagaggcaccaggcacaccgccttgaggtgggcagtgcccatgggggcccgagtggatgggaccgagggtgagtggagcctccttcctcccctctctagtacccccgcctcccacacacttgcacggatcggcctcccttgggagatcagcctccatgggcccctcgtccacccttgctgctttccatttgcctaattaccaagcagaagttgcaatctggtttgctttatttttgtatgtgaaataacccccaaagcccaatctcctcctacgttcaatattggttggggcatccgtcatctccccttaagtgcgccccctccccacccaagtatcataggaaaccggtgaggtctggtgtctctggtttgagacggtaagttgggacccatccctgtctgggtgcccactctgacctttagtttgcccttctgtgaaatgggtgtattgggtagcaagccctcttcagaaagcgctgctggtgtcagagcagctgcccagtaccaggtggggggtcaaggttgctggtactggggcccccagctgcccacaacccctctttgttctcaccctgcaaaggggtcaaggtcaaaatgagcctcatccttcctatgatctgggaagaggtgatgatcaagtccccaacttcagtgtgaggtggacagagttggggggatggcccctttttgaagaggtgaaaatggttttggagaagcgcagctgcttcactgggggaatgcggcagggactggggcccaggatgctttggcctatggggaaaagccctttaaaaggcagggcccaggccctggagccagcacaagactggcctcgagcccctgagccaggaggtcctggaggagagccaggccggtgggcccgcccaaggctggagggtcagccccaacagggagctgggttggccagggggctggactgctaccagcctctctggcctatggggacccaagaggacacatcccccttttgcccactcttctgtgtcattttgttgttttggtttgtggtggtttttcttttttcttttgtttttcttttttctttctttctttttttttttttttttttttttttttgcacttcgcccacacaggacagtggagccccacctggtcagttccacttccgggctcccatgcacttgcccaaggcggcctctttgggacggggatggtttgaggaaacacttttaaagaaaaaaggaagacattgaaaggttttagtttcttccctatctgcatgtcctctcatatagaaagcccagaattaggggctagaactccaggagagggtctccccgactcatctcttgctgacggtcaccaggatgcagaaatagggagatggttagtgggggccaaagatgccccctcccaggccttcgtggttccctcctccgccccctgcaatctttggaggagtcagtgcctcactccagcagtgagtgcctactgtatgcaggtagtcagccaggcaaagagagactaacggtctcatgggggaaccctcttgcgggaggccgggtagctggagcgaagcgttccggctgcccttgctgctgggtggagtggagagggagacttctttttgttggttttaatttaaaaacacaaaggcctaaagaaatacgtatcttataatttttttaatttttgagacgttcatttaatgaattgtgcacgaatgaattctatatatataaaatatacatatatagctctatatttggggaggggcactgtctcttttttctctcatttttaaaatgaagtgttgttgcctttgtatgtggttcaaccatccagctcccagctggctaaactttgcctccagtggtcaaagatgggaaaagagtggggttggcaggagatggaaaacggaggtgccgccccagcatggggggcaggtcccccagtccaccctgcccctccccctgtggagaagacgcttagttgggggtgtgggtttgggctccattctggattcggcggttccgggggaggggtgggtctgtgccgattactctgtcttgtacgtttgttctgctgctcttcaatattgtatcaacgccaggaaaggggggtgaaaagcctcttttaccccccaaataaattgtcacattccgaagctgaggcctagccccta

SEQ ID NO: 323388 - DNA, 1239 bp, Artificial Sequence
  derived and/or modified sequence
atggagctgagcgccgtgggcgagagagtgttcgccgccgagagcatcatcaagagaagaatcagaaagggcagaatcgagtacctggtgaagtggaagggctgggccatcaagtacagcacctgggagcccgaggagaacatcctggacagcagactgatcgccgccttcgagcagaaggagagagagagagagctgtacggccccaagaagagaggccccaagcccaagaccttcctgctgaaggccagagcccaggccgaggccctgagaatcagcgacgtgcacttcagcgtgaagcccagcgccagcgccagcagccccaagctgcacagcagcgccgccgtgcacagactgaagaaggacatcagaagatgccacagaatgagcagaagacccctgcccagacccgacccccagggcggcagccccggcctgagaccccccatcagccccttcagcgagaccgtgagaatcatcaacagaaaggtgaagcccagagagcccaagagaaacagaatcatcctgaacctgaaggtgatcgacaagggcgccggcggcggcggcgccggccagggcgccggcgccctggccagacccaaggtgcccagcagaaacagagtgatcggcaagagcaagaagttcagcgagagcgtgctgagaacccagatcagacacatgaagttcggcgccttcgccctgtacaagcccccccccgcccccctggtggcccccagccccggcaaggccgaggccagcgcccccggccccggcctgctgctggccgcccccgccgccccctacgacgccagaagcagcggcagcagcggctgccccagccccaccccccagagcagcgaccccgacgacaccccccccaagctgctgcccgagaccgtgagccccagcgcccccagctggagagagcccgaggtgctggacctgagcctgccccccgagagcgccgccaccagcaagagagccccccccgaggtgaccgccgccgccggccccgccccccccaccgcccccgagcccgccggcgccagcagcgagcccgaggccggcgactggagacccgagatgagcccctgcagcaacgtggtggtgaccgacgtgaccagcaacctgctgaccgtgaccatcaaggagttctgcaaccccgaggacttcgagaaggtggccgccggcgtggccggcgccgccggcggcggcggcagcatcggcgccagcaagtag

SEQ ID NO: 323389 - protein, 175 aa, Artificial Sequence
  derived and/or modified sequence
MTRPLPESIRLLRHTGLVPPTPVPLGYPHQSFVSQPHPFSKQPSPCPRQSPQGDFGWVSPGASRSITGPSSPAAPSLISLGSLGSHLQGARPHPRQSSLGDFGLVTPGTPCCRLCPPLLLPQGRPPWVLCAGVSKELGPNPVLPSPIVEQRLGHGADMVPPPDQEEWNVVMSQST

SEQ ID NO: 323390 - DNA, 1870 bp, Artificial Sequence
  derived and/or modified sequence
cgtgctcgctagtcgccgccgccgctccgccatggggaagcgacagcaccaaaaggacaaaatgtacattacctgtgctgaatacactcacttttatggtggcaagaagccagatctcccacaaacaaattttcgtcgtttaccttttgaccactgcaggaacattgttccatggcttaagaagtacgggaccaaccccagcaatggagagaagctggacgggaggtccctgatcaagctgaacttttccaagaacagtgaggggaagtaccactgcccagtgctgtttaccgtgttcaccaacaacacccacatcgtggctgtgaggacgaccggcaacgtctacgcctatgaggcagtggaacagctaaatatcaaggccaagaacttccgggacctgctgaccgacgagcccttctcccggcaggacatcatcaccctccaggaccccaccaatttggacaagttcaatgtctctaacttctatcatgtgaagaataacatgaaaataatagacccagatgaagagaaggccaaacaggacccgtcttattatctgaaaaatacaaatgccgagacccgagagaccctgcaggagctctacaaggagttcaaaggggacgagattctggcagccaccatgaaggccccggagaagaagaaagtggacaagctgaacgctgcccactattccacagggaaggtcagcgcttccttcacctccaccgcgatggtcccggagaccacacatgaagcagctgccatcgacgaggatgtgctgcgctaccagtttgtgaagaagaagggctacgtgcggctgcacaccaacaagggcgacctcaacctggagctgcactgcgacctgacaccaaaaacctgcgaaaacttcatcaggctttgcaagaagcattattacgatggcaccatcttccacagatccatccggaactttgtgatccaagggggcgaccccacaggcacaggcacgggtggggagtcatactgggggaagcccttcaaagacgagttccggcccaacctctcgcacacgggccgcggcatcctcagcatggccaactccgggcccaacagcaacaggtctcaattcttcatcacgtttcgctcctgtgcctacctggacaagaagcataccatctttggacgggttgttgggggctttgacgtactgacagccatggagaatgtggagagtgaccccaaaactgaccgccctaaggaggagatccgcattgatgccactacagtgttcgtggacccctatgaggaggccgatgcccagattgcgcaggagcggaagacacagctcaaggaagcgagcagcagaggaagagccctcaaccagtgccactgtccccatgtccaagaagaagcccagtcggggttttggggacttcagctcctggtagcagcagcaacttgcaggctgtacctctgcccttccttttctcatcaatcactgatgctgaagctgcaggcctgagccctttgtctccctggatgctgggtggcgcctcatctgcatctctgcctcaccccatccactgccacaggctgcctgatgaccactagaggtatgtctgcccctcgtcaccctgctgcacaccaatctgtggcccttcatcatgctaagaacaagaactgcgccatggctggctccttctcttctccagcccatccctctgcagcctgtcatccctgtctgtgaccattggtcgggcccctgggctctagagtgacttttgacgccctccatccctcccgccaggcactgtcctccgcaaggcctggtgcagccctggcagtaactggcttgtaagaggctcagacaccaagctgggcctgcagagga

SEQ ID NO: 323391 - protein, 489 aa, Artificial Sequence
  derived and/or modified sequence
MGKRQHQKDKMYITCAEYTHFYGGKKPDLPQTNFRRLPFDHCRNIVPWLKKYGTNPSNGEKLDGRSLIKLNFSKNSEGKYHCPVLFTVFTNNTHIVAVRTTGNVYAYEAVEQLNIKAKNFRDLLTDEPFSRQDIITLQDPTNLDKFNVSNFYHVKNNMKIIDPDEEKAKQDPSYYLKNTNAETRETLQELYKEFKGDEILAATMKAPEKKKVDKLNAAHYSTGKVSASFTSTAMVPETTHEAAAIDEDVLRYQFVKKKGYVRLHTNKGDLNLELHCDLTPKTCENFIRLCKKHYYDGTIFHRSIRNFVIQGGDPTGTGTGGESYWGKPFKDEFRPNLSHTGRGILSMANSGPNSNRSQFFITFRSCAYLDKKHTIFGRVVGGFDVLTAMENVESDPKTDRPKEEIRIDATTVFVDPYEEADAQIAQERKTQLKEASSRGRALNQCHCPHVQEEAQSGFWGLQLLVAAATCRLYLCPSFSHQSLMLKLQA

SEQ ID NO: 323392 - DNA, 1470 bp, Artificial Sequence
  derived and/or modified sequence
atgggtaagcgccagcaccagaaggacaagatgtacatcacatgtgccgagtacacgcatttctatggaggaaagaagcctgaccttccacagaccaactttcggaggctgccatttgaccattgcaggaacatcgtcccctggttgaaaaaatatggcacaaaccccagcaatggggaaaagctggacgggcggagcctcattaaactgaacttttctaagaatagcgagggcaagtaccattgcccagtactgtttactgtgttcactaacaatacgcacatcgtggctgttaggaccactggtaatgtgtacgcctacgaggccgtggagcagctgaatattaaggccaagaatttccgagatctgttaactgatgaacctttctcaaggcaggacatcatcacactacaagatcccaccaaccttgataagtttaacgtatcaaacttctatcacgttaagaataatatgaaaataatcgatcctgacgaggaaaaagcaaaacaagatccttcctattatctgaaaaatactaacgctgaaaccagagagacactgcaggaactttacaaggagtttaaaggcgatgaaattctggccgctactatgaaagcaccagagaaaaagaaagtggacaaactgaacgctgcacactattctactggaaaggtgagcgccagctttacgagtactgccatggtccccgaaactacccacgaggctgctgcgatcgatgaagacgtgttaagataccagttcgtgaagaaaaaaggctatgtgagactccacacaaacaaaggggatttgaatctggagctccactgcgatcttacgcccaagacatgcgaaaacttcatccgtctgtgtaaaaagcattactacgatggcaccatattccatagatcaattcggaacttcgtaatccagggaggtgaccccaccggcaccgggacaggcggcgaaagttattggggaaaaccatttaaagacgagtttcgacctaacctaagccacaccggcaggggcattttgtctatggctaacagcggccctaactccaacagatcacagttcttcataaccttcaggagctgcgcgtatctcgacaagaaacataccatttttggccgcgtggtaggcgggtttgatgtccttaccgccatggagaacgtcgaatcggatcctaagaccgaccgccctaaagaggaaattaggatcgatgctaccaccgtttttgtcgacccttatgaagaagcggatgcgcagattgcgcaggaacgcaagacacagttaaaggaggcctcaagccgaggacgcgcgctaaatcagtgccattgtccacatgtacaggaagaggcacagagtgggttttggggtctccagcttttagtggcagccgcgacttgtaggctgtacttatgcccatctttcagccatcagagcttgatgttgaagctccaggcttag

SEQ ID NO: 323393 - DNA, 1470 bp, Artificial Sequence
  derived and/or modified sequence
atgggcaagaggcagcaccagaaggacaagatgtacatcacctgtgccgagtacacccacttctacggcggcaagaagccagacctgccccagaccaacttccggcggctgccctttgaccactgcagaaatattgtgccctggctgaagaagtatggcaccaaccccagcaatggagagaagctggatggccgcagcctcatcaagctgaacttcagcaagaacagcgagggcaagtaccactgccctgtgctcttcaccgtcttcaccaacaacacccacatcgtggccgtgaggaccactggaaatgtgtatgcctatgaagctgtggagcagctgaacatcaaggccaagaacttccgggacctgctgacagatgagcccttcagccggcaggacatcatcaccctgcaggaccccaccaacctggacaagttcaacgtgagcaacttctaccacgtgaagaacaacatgaagatcattgatcctgatgaggagaaggccaagcaggaccccagctactacctgaagaacaccaatgctgagacccgggagaccctgcaggagctgtacaaggagttcaagggagatgagatcctggccgccaccatgaaggcccctgagaagaagaaggtggacaagctgaatgctgcccactacagcacaggcaaggtgtctgccagcttcaccagcacagccatggtgcctgagaccacccatgaggccgccgccattgatgaagatgtgctgcgctaccagtttgtgaagaagaagggctacgtgcggctgcacaccaacaagggggacctgaacctggagctgcactgtgacctgacccccaagacctgtgagaacttcatccggctgtgcaagaagcactactatgatggcaccatcttccacaggagcatccggaactttgtgatccagggcggggaccccactggaactggaactggaggagagagctactggggcaagcccttcaaggatgagttccggcccaacctgagccacacaggccggggcatcctgtccatggccaacagcggccccaacagcaacagaagccagttcttcatcaccttccgcagctgtgcctacctggacaagaagcacaccatcttcggccgggtggtgggcggctttgatgtgctgacagccatggagaatgtggagagtgaccccaagacagaccggcccaaggaggagatcagaattgatgccaccaccgtgtttgtggacccctatgaggaggctgatgcccagatcgcccaggagaggaagacccagctgaaggaggccagcagccggggccgggccctgaaccagtgccactgcccccacgtgcaggaggaggcccagagcggcttctggggcctgcagctgctggtggccgccgccacctgccgcctgtacctgtgccccagcttcagccaccagagcctgatgctgaagctgcaggcctag

SEQ ID NO: 323394 - DNA, 1470 bp, Artificial Sequence
  derived and/or modified sequence
atgggcaagcggcagcaccagaaggacaagatgtacatcacctgcgctgaatatacccatttctacggcggtaagaagcccgacctgcctcagacaaatttcagacgcttgcccttcgaccactgtaggaatatcgtaccctggctgaagaagtatggaacaaatccttctaatggcgagaagctggacggccggtcattgatcaagctcaatttctccaaaaattcggagggaaagtatcattgccctgtcctctttactgtttttaccaacaatacgcatattgtggccgtacgtacaactggaaatgtctacgcttacgaagccgtggaacagctaaatatcaaggccaagaacttccgcgatctgttgactgatgaaccattctcacgacaagacatcatcacgcttcaggacccgaccaacttggataaatttaatgtctccaacttttaccatgtgaaaaacaatatgaaaattattgacccggacgaggagaaggcaaaacaggatcccagttactacctcaaaaacacaaacgctgagactcgtgagacacttcaggaactgtacaaggaattcaaaggagatgaaatactggcggccaccatgaaagctcctgagaaaaaaaaagtagataagcttaatgctgcacactactccaccggtaaggtgtctgcctcttttacttctacagctatggtgcccgagactacgcatgaagccgccgccattgatgaagatgtgctgcggtatcagtttgtaaaaaagaaagggtatgtgcgtttacacaccaataagggagacctaaacttggagctgcactgcgatcttacacctaaaacctgcgaaaactttattcgtctctgtaaaaaacattactacgacggcacgattttccacaggtccatccgcaacttcgtgattcaggggggggatcctaccggcacaggcacagggggtgaaagctactggggtaaaccctttaaggacgagttccgacccaatctgtcccacacggggcgggggatcctgtctatggctaattccggtccaaatagtaatcgttcgcagttttttattacattccggtcgtgcgcctacctggacaaaaaacataccatcttcgggcgagttgtcggaggcttcgacgtccttaccgctatggaaaatgtggagtcagaccctaaaacggataggcccaaagaagaaatccgaatagacgccaccaccgtgtttgtcgatccttacgaggaagctgatgctcagatcgcacaggaaagaaagactcagcttaaggaagcttctagccgggggcgcgcattgaatcagtgccactgtccccacgtacaggaagaggcccaatcagggttctgggggctgcaactgctagtcgccgctgcaacctgccgcctgtacctttgtccatctttctcccatcagtccctgatgctgaagctgcaggcatag

SEQ ID NO: 323395 - DNA, 1470 bp, Artificial Sequence
  derived and/or modified sequence
atgggcaagaggcagcatcagaaagataagatgtacattacttgcgcagagtacacccacttctacgggggaaagaaacccgatctcccgcaaacaaactttagaagactccctttcgaccactgtagaaatattgtaccctggctaaaaaagtatggcactaatccgtccaatggtgaaaaactggatggacggagcctcattaagctcaatttcagcaaaaattccgagggcaagtaccactgtcccgtgctgtttaccgtgttcactaataatacccacattgtggccgtccgcacaactggtaacgtatatgcctacgaagctgttgagcaactcaacattaaagccaaaaactttagagatctgttgactgacgagccattcagccggcaggatatcataactctccaagaccctacaaacctcgacaaattcaatgtcagcaacttctatcatgttaaaaataatatgaaaattatcgaccccgatgaagaaaaggcaaaacaagatccatcatattatctcaaaaacacaaatgccgaaacgcgcgaaaccctgcaggaactctacaaagaattcaagggcgatgaaattttggctgccaccatgaaggcacctgagaagaagaaggttgacaagctcaacgccgcacattactccaccggcaaggtgagcgctagctttacgtcgaccgcgatggtgcccgaaactacccacgaggcagctgccattgatgaagatgttcttcggtatcaatttgtgaagaaaaaggggtacgttcgactgcatacgaacaaaggagatctgaacctggagctgcactgtgatctcaccccaaagacgtgcgagaactttatccgcctctgtaaaaaacattactacgacggcaccatctttcaccggagtattagaaatttcgtgattcaagggggagaccccacaggaacagggactgggggtgagtcatactggggcaagcccttcaaggacgaatttcggcctaatttaagccacaccgggcgagggatcttgtctatggctaacagtgggccaaactcaaataggtcccagttctttatcacatttcgaagttgcgcctacctggataagaaacacacaatcttcggccgtgtagtcggtgggttcgacgttctgacagcaatggagaatgtagaatccgatccgaagaccgataggcctaaagaggagatcaggatcgatgcaaccactgtgttcgttgatccatatgaggaagccgatgcccaaatagcccaagaaagaaagactcagttgaaggaagccagtagtcgcggtagggccttaaaccagtgtcattgtcctcacgtgcaggaggaggcccagtccgggttctgggggctccaactgctagtcgctgcagctacttgtaggctgtacctgtgccctagtttttcccaccaaagcctgatgctcaaactgcaggcctag

SEQ ID NO: 323396 - DNA, 1470 bp, Artificial Sequence
  derived and/or modified sequence
atgggcaagagacagcaccagaaggacaagatgtacatcacctgcgccgagtacacccacttctacggcggcaagaagcccgacctgccccagaccaacttcagaagactgcccttcgaccactgcagaaacatcgtgccctggctgaagaagtacggcaccaaccccagcaacggcgagaagctggacggcagaagcctgatcaagctgaacttcagcaagaacagcgagggcaagtaccactgccccgtgctgttcaccgtgttcaccaacaacacccacatcgtggccgtgagaaccaccggcaacgtgtacgcctacgaggccgtggagcagctgaacatcaaggccaagaacttcagagacctgctgaccgacgagcccttcagcagacaggacatcatcaccctgcaggaccccaccaacctggacaagttcaacgtgagcaacttctaccacgtgaagaacaacatgaagatcatcgaccccgacgaggagaaggccaagcaggaccccagctactacctgaagaacaccaacgccgagaccagagagaccctgcaggagctgtacaaggagttcaagggcgacgagatcctggccgccaccatgaaggcccccgagaagaagaaggtggacaagctgaacgccgcccactacagcaccggcaaggtgagcgccagcttcaccagcaccgccatggtgcccgagaccacccacgaggccgccgccatcgacgaggacgtgctgagataccagttcgtgaagaagaagggctacgtgagactgcacaccaacaagggcgacctgaacctggagctgcactgcgacctgacccccaagacctgcgagaacttcatcagactgtgcaagaagcactactacgacggcaccatcttccacagaagcatcagaaacttcgtgatccagggcggcgaccccaccggcaccggcaccggcggcgagagctactggggcaagcccttcaaggacgagttcagacccaacctgagccacaccggcagaggcatcctgagcatggccaacagcggccccaacagcaacagaagccagttcttcatcaccttcagaagctgcgcctacctggacaagaagcacaccatcttcggcagagtggtgggcggcttcgacgtgctgaccgccatggagaacgtggagagcgaccccaagaccgacagacccaaggaggagatcagaatcgacgccaccaccgtgttcgtggacccctacgaggaggccgacgcccagatcgcccaggagagaaagacccagctgaaggaggccagcagcagaggcagagccctgaaccagtgccactgcccccacgtgcaggaggaggcccagagcggcttctggggcctgcagctgctggtggccgccgccacctgcagactgtacctgtgccccagcttcagccaccagagcctgatgctgaagctgcaggcctag

SEQ ID NO: 323397 - DNA, 1973 bp, Artificial Sequence
  derived and/or modified sequence
ggggccatcccccttgttttacagacaaggaccctggataaaatgttttaccaagaatcacacaaattgtaagtggtagggccaggacacagacagggagtgtggttccaaaggcctatgctttccagtcaactatgctgcgtgcacagcctcccacccaccgccaacccagctgccctctgctcactcgctcaacagatgtttactaacatcaggtccccctgctctggcccccagggcagccccgggcttccgagaaggacccatatccacctctggcctcactctgcccatatgtactttctggtgacttcttccttgctccctttcccactaatccaaccaggatgttccagaaccagatttaagacgctttgctctctgagacacacaagtgcacccacagaggagggacatggtcctgtgcggagaccctgtggcatgcactgtctgagccatctgccccatcccagaggaagacctcagggtcaccccacccacatgagaccagccctgcagcaagctctcctgtcccacccatctctcctcctcccttggagaagctctcctgactctgctgtccaggtaggcccctctatgattctcaggaggatcccaatggctgggcacctctgcttcccacactggccacagctgctggacagcagggactgttgcacttacacctgtatcaatacacctgtgctcaatagtcacatggtgcaggaaggagtgtgtggccagtaagtggagctaagtctagacgccaccagaagctgggcatggtggtgcacgcctgtggtcccagctactcaggaggctgatgtggaaggattacctgagctcaggagttccaggctgcagtgagctaggatcatgccactgcactgcactccagcctgggtgacagactgagaccctactcgaaaaaaaaaaaacagatcctatccgaatatggggcaagtccgaaaaatgcaacaccaagcacctaaagctgacagaatcaacgtaacagagaacagcctcttcaaactggaaggcgctgagaaatccatgtgctgttctgggatcaggaatgagataaggtggccctggggctgctgcaggaaatgcgaggagaggctgacgggaggggacggggatgctgagtggaaggaggcagagctgcccaaggagccggggatgttcacgggtgcagagctctgcagcaagctgccgcctgcaagagaggcccggggaggacgggctgggtgagggcagcggaagccaggcgggccacacagagcaaggggcctgagccaggcaggaacccgaggagtcctccaggctgccctgcccacccacacccagtaccgatggtgatgcttcctgggtggggcactgtgctgttatcgaaagtcttctccagggcggccacgccaaactcattcaggtccaggtcatccaaagcagactctagggacagagaagagtgggatgtgacctcccgagggactatctgaccctgaccacctcgtctactgcccacgctgcatcttcacgcccatgctacgctggtgcctgccacaggacctggcacaaagcgggcacctagaaatgagtactgaaagaaaggagcaccaacttctagcaccagggattctgagaacgtcgtgctggccattcactacacaaggacaccagtgagatgagtggggactgaacaacacgtcttggggtgagactgtactcaccaaggggaaaaggcacctctttctaatttgcacaaaggagctctaagggtcagtcctggccctacaccttggggtcatttcccctttagctcaaaggactcagagtgcccatcccctgattttccgaagacagatgtctaaggggtctggtgtgctgatttgagactcgcttcagagactggggggtctctgaccccagacccagtcctgggctttcaaacagaaatggcctagttacct

SEQ ID NO: 323398 - protein, 746 aa, Artificial Sequence
  derived and/or modified sequence
MKMEPVKELTGGGTTFSVRKTAYCDVHTPPGCTRRPLNIYGDVEMKNGVCRKESSVKTVRSTSKVRKKAKKAKKALAEPCAVLPTVCAPYIPPQRFIRMQSRKCLKRDCDQQADGLCRFGSFDCFRSSRRSSSTTRAWTSASRTRTSDRLNRIANQVAIQRKKQFVERAHSYWLLKRLSRNGAPLLRRLQSSLQSQRSSQQRENDEEMKAAKEKLKYWQRLRHDLERARLLIELLRKREKLKREQVKVEQVAMELRLTPLTVLLRSVLDQLQDKDPARIFAQPVPDYLDHIKHPMDFATMRKRLEAQGYKNLHEFEEDFDLIIDNCMKYNARDTVFYRAAVRLRDQGGVVLRQARREVDSIGLEEASGMHLPERPAAAPRRPFSWEDVDRLLDPANRAHLGLEEQLRELLDMLDLTCAMKSSGSRSKRAKLLKKEIALLRNKLSQQHSQPLPTGPGLEGFEEDGAALGPEAGEEVLPRLETLLQPRKRSRSTCGDSEVEEESPGKRLDAGLTNGFGGARSEQEPGGGLGRKATPRRRCASESSISSSNSPLCDSSFNAPKCGRGKPALVRRHTLEDRSELISCIENGNYAKAARIAAEVGQSSMWISTDAAASVLEPLKVVWAKCSGYPSYPALIIDPKMPRVPGHHNGVTIPAPPLDVLKIGEHMQTKSDEKLFLVLFFDNKRSWQWLPKSKMVPLGIDETIDKLKMMEGRNSSIRKAVRIAFDRAMNHLSRVHGEPTSDLSDID

SEQ ID NO: 323399 - DNA, 2241 bp, Artificial Sequence
  derived and/or modified sequence
atgaagatggaacccgtgaaagagctgactggaggtggcaccactttctcagtgaggaaaaccgcctactgtgacgttcataccccccctgggtgcactaggcgtccacttaacatctacggggacgttgaaatgaaaaatggggtttgtagaaaggagtccagcgtgaagaccgtgcgctctacttcgaaggtgcgcaagaaggccaaaaaggccaagaaggcactcgctgaaccttgtgccgtcctgcctactgtttgtgcgccgtatattccaccccagcgtttcattaggatgcagtcacgcaaatgcctcaagcgagactgtgaccagcaggctgatggcctttgtcgatttgggtcattcgactgtttccggagtagtcgaaggagtagttcaaccacgcgcgcgtggaccagcgctagccggaccagaacaagcgaccgcctcaatcgaatcgccaatcaagtggccatccagaggaaaaaacagttcgtggagcgtgcacattcatactggctccttaaacgcctttcccgaaatggagccccattgttacgaaggctgcaatcatccttacaaagtcagagatcgagtcagcagagagaaaatgatgaagagatgaaagcggccaaggagaaactgaaatattggcaacggctgcgtcacgacctggaacgcgccaggttgctgatagagctcctccgaaagcgggagaagctcaaaagggagcaggtgaaggttgagcaggtggccatggaactccgccttaccccgctgaccgtgctccttcgatcagtgctggaccagctgcaagacaaggatcccgcgcggatctttgcacagcccgtgcctgactatctcgaccatataaagcaccccatggacttcgccaccatgcggaagcggctagaggcccaaggttataaaaacctccacgagttcgaagaggattttgatctgatcatcgataactgtatgaaatataatgctagggatacggtgttctacagggcggcggtccgcctcagggatcagggcggagtcgtgcttagacaggccagaagggaggtcgactctattggactggaagaggccagtgggatgcacttgcctgaaaggccagcagccgctcctcggcggcccttcagttgggaagatgtcgaccgcctgctcgatccggctaatagagcacatctgggattagaggagcagctgagagagctactggatatgctggacctgacctgcgccatgaagagctcggggtctagaagcaagcgggccaagctcctgaagaaggagatagcactgctccgaaacaaacttagtcagcagcacagtcagccactgccaaccggtccaggtttggaggggtttgaggaagatggtgccgcactgggccccgaggctggggaggaggttctcccaaggcttgaaactctcctccagcctaggaagaggtcacgatcaacctgcggagacagcgaggttgaagaagagagccctggtaaaagactggacgccgggttgaccaacgggttcggtggcgccagatccgagcaagaacctggcggtgggctcggcagaaaagccactccgcggagacggtgtgcgtctgaaagtagtatatcaagctcaaatagccctctctgtgattccagcttcaatgctcctaagtgtggcagaggaaagcccgcgcttgtgcggcgccatactctggaagatagatcagagctcatttcatgcattgagaacggtaattacgctaaagccgcaagaattgccgctgaagtggggcagtcctctatgtggatcagcactgatgcggccgcaagcgtgttggagccattgaaggttgtatgggctaaatgttccgggtacccgagctaccccgcccttatcatagatccgaagatgcctagggtcccgggccatcacaacggagtgaccattcccgcaccaccactggatgtcctaaaaatcggagagcatatgcagacgaagtctgatgaaaaactgtttctggtgctttttttcgataataaacggtcatggcagtggctgcccaagtccaagatggtccccctagggatcgacgaaacgatagacaagctgaagatgatggaagggcgaaattcgtcaattcgcaaggcggttaggatcgctttcgatagggccatgaatcacctgagtagggtgcacggcgagccaacctcagacctgagcgatatagactag

SEQ ID NO: 323400 - DNA, 2241 bp, Artificial Sequence
  derived and/or modified sequence
atgaagatggagcctgtgaaggagctgaccggcggcggcaccaccttctctgtgaggaagacagcctactgtgatgtgcacaccccacctggctgcacccggcggcccctgaacatctatggagatgtggagatgaagaatggagtgtgcaggaaggagagctctgtgaagacagtgcgcagcaccagcaaggtgaggaagaaggccaagaaggccaagaaggccctggccgagccctgtgctgtgctgcccaccgtgtgtgccccctacatccccccccagcgcttcatccgcatgcagagcaggaagtgcctgaagagggactgtgaccagcaggctgatggcctgtgccgcttcggcagctttgactgcttccgcagcagcagaagaagcagcagcaccacccgggcctggaccagcgccagcaggaccaggaccagtgaccggctgaacagaattgccaaccaggtggccatccagaggaagaagcagtttgtggagcgggcccacagctactggctgctgaagaggctgagcagaaatggagcccccctgctgcggcggctgcagagcagcctgcagagccagaggagcagccagcagagagaaaatgatgaggagatgaaggccgccaaggagaagctgaagtactggcagaggctgcggcatgacctggagcgggcccggctgctgattgagctgctgaggaagcgggagaagctgaagcgggagcaggtgaaggtggagcaggtggccatggagctgcggctgacccccctgactgtgctgctgcggtctgtgctggaccagctgcaggacaaggaccctgcccgcatctttgcccagcctgtgcctgactacctggaccacatcaagcaccccatggactttgccaccatgaggaagaggctggaggcccagggctacaagaacctgcatgaatttgaagaagattttgacctgatcatcgacaactgcatgaagtacaatgcccgggacaccgtcttctacagagctgctgtgcggctgcgggaccagggcggcgtggtgctgcggcaggcccggcgggaggtggacagcatcggcctggaggaggccagcggcatgcacctgcctgagaggcctgctgctgccccccggcggcccttctcctgggaggatgtggaccggctgctggaccctgccaacagagcccacctgggcctggaggagcagctgcgggagctgctggacatgctggacctgacctgtgccatgaagagcagcggcagccgcagcaagagggccaagctgctgaagaaggagatcgccctgctgaggaacaagctgagccagcagcacagccagcccctgcccactggacctggcctggagggctttgaggaggatggagctgccctgggccctgaggccggggaggaggtgctgccccggctggagaccctgctgcagcccaggaagaggagccgcagcacctgtggggacagcgaggtggaggaggagagccctgggaagaggctggatgctggcctgaccaatggatttggaggagcccggtctgagcaggagcccggcggcggcctgggcaggaaggccaccccaagaagaagatgtgccagcgagagcagcatcagcagcagcaacagccccctgtgtgacagcagcttcaatgcccccaagtgtggccggggcaagccagccctggtgcggcggcacaccctggaggacagaagtgagctgatcagctgcattgaaaatggaaattatgccaaggccgccagaattgctgctgaggtgggccagagctccatgtggatcagcacagatgctgctgcctctgtgctggagcccctgaaggtggtgtgggccaagtgcagcggctaccccagctacccagccctgatcatcgaccccaagatgccccgggtgcccggccaccacaacggggtgaccatcccagccccacccctggatgtgctgaagatcggggagcacatgcagaccaagagtgatgagaagctgttcctggtgctcttctttgacaacaagaggtcctggcagtggctgcccaagagcaagatggtgcccctgggcattgatgagaccatcgacaagctgaagatgatggagggcaggaacagcagcatcaggaaggctgtgcgcatcgcctttgaccgggccatgaaccacctgagccgggtgcatggagagcccaccagtgacctgagtgacattgattag

SEQ ID NO: 323401 - DNA, 2241 bp, Artificial Sequence
  derived and/or modified sequence
atgaagatggagcccgtgaaggagctgaccggcggcggcaccaccttttcagtacgaaaaaccgcatactgcgacgtgcatactcctccaggctgcaccagaagaccactcaacatctatggcgacgttgagatgaaaaacggcgtgtgccgaaaagaatccagtgttaaaactgtgaggagcacatccaaagtacgcaagaaggcaaagaaggcaaaaaaggctcttgcagaaccttgtgcagtacttcctacagtgtgtgcaccctatattcccccacagcggtttattcggatgcagagtagaaagtgcctgaagagagactgtgatcagcaagctgacggactgtgccgctttggctcatttgactgttttagatcgagccgacgatcctctagcaccacgcgggcgtggacctccgcatccagaacaagaactagtgatagactcaataggatcgcgaaccaggtcgctatacagcggaagaagcagttcgtggagcgcgcacactcgtattggttgttaaaaaggctctctagaaacggggcacccctcttgaggcggctgcagagcagcctccagtcacaacggtccagtcagcagcgcgagaatgacgaggaaatgaaggccgctaaggaaaaattgaaatattggcaaagactgcgacatgacctcgagagggcacgtttactgatcgagctgctcaggaagagggagaaacttaagcgagaacaggtgaaggtggaacaggtggccatggagctgcgcttaacaccactgactgtgctgctccggtctgtactagaccaattgcaagacaaggatcccgcccggattttcgctcagcctgtacctgattacctcgatcatatcaagcatcctatggattttgctactatgcgaaagcgactggaagcgcaaggttataagaatcttcatgagtttgaggaggacttcgatctcattattgacaattgcatgaagtacaacgctagggataccgtcttttacagggccgctgtgcgattgcgggaccaggggggcgtggtactgagacaggcacggagagaagttgattccattggcctcgaggaggccagcggcatgcatctgcccgagaggcccgcggccgcccctaggagaccttttagctgggaagatgtggaccggttacttgatcctgccaatagggctcacctggggctcgaggagcagcttcgcgagctcttagacatgctagatttgacatgcgcgatgaaatcatctggctctcgcagcaagcgggctaagctgctgaaaaaagaaattgccctgttgaggaataagttatctcagcagcattcccaacccctgcccactggtcccggattagagggctttgaggaagatggcgctgctcttggtcctgaggccggggaagaagtcctgcctagactggaaaccctgctgcagcctagaaagaggtcacggagtacatgtggcgactctgaagtggaagaagaatctccaggtaagagactcgatgctggactaaccaatggcttcggaggggcacgtagcgaacaggagccagggggcggccttggcaggaaagctactcctaggaggagatgtgcttctgagtcctccatctcaagctctaactcacctctttgtgattccagtttcaatgcacccaaatgcgggagaggcaagccagcgctggtgcgcaggcacacgcttgaagaccgaagtgagctgattagctgtatcgaaaacggcaactacgccaaggcagctcggatagcggccgaggtcgggcaatcgtccatgtggatttctaccgacgctgctgcttccgtcttggagccgctgaaagtcgtatgggctaagtgtagcggctacccgagctaccccgccctgataatagaccccaagatgcctcgggtccccggacaccacaatggcgtgaccattcccgcacctcccctggacgttctgaaaatcggcgaacatatgcagactaagagtgacgaaaagctatttctagtcctctttttcgataacaagcgcagttggcagtggcttccaaaatcgaagatggttccactgggcattgacgagaccattgataaacttaaaatgatggagggtagaaactctagcattaggaaggccgttaggattgcatttgatagagccatgaaccatctgagtcgcgttcatggggagccaaccagtgacctgagcgatattgattag

SEQ ID NO: 323402 - DNA, 2241 bp, Artificial Sequence
  derived and/or modified sequence
atgaagatggagcctgtaaaggagcttaccggtggcggaacaaccttctccgtgaggaaaaccgcctattgcgacgtgcatactcctccaggatgcacgaggaggccgctcaacatttacggggacgttgaaatgaaaaatggcgtctgccggaaagaaagctctgtgaaaaccgtgaggtctacttctaaagtgcgaaagaaggccaagaaggctaagaaggccttggccgaaccgtgcgcggtattgccaactgtctgcgcaccatacatccctccccagcggtttatacggatgcaatcaagaaaatgcctgaagcgcgactgtgatcagcaggcagatggtctatgtcgcttcgggagctttgattgctttaggtcctcaagaaggtccagctcaacgaccagagcttggacttctgcgtcccggactaggacttcagacaggttgaaccggatagcaaatcaggtggcgattcagcgcaaaaaacaattcgtagaaagagcccatagttattggttgctgaagcgattgagccggaatggcgcacccctgcttcgccgtctgcagtcctctctccagtcacagcgctcttcgcaacagcgcgagaacgacgaagaaatgaaagccgcaaaagagaaactgaagtattggcagcgcctacgccacgatttagaaagagcccgattacttatcgagctgctgcggaaaagagagaagctcaaacgggaacaggtcaaggttgagcaggtcgccatggagctgaggctgacgccccttaccgtccttctgcgcagcgtcctggatcagttacaggataaagatcctgccagaatctttgcgcagcccgtgccagattatctggaccacattaaacatccaatggactttgccactatgagaaagcggttggaggcccagggctataaaaacctccatgaatttgaggaggatttcgaccttattattgataattgtatgaaatacaatgcccgagataccgtgttctatagagccgctgtccggctcagggatcagggtggcgtggtgctgcgccaagctaggagggaggttgacagcatcggcctcgaagaggcgtccggtatgcacctgcccgagcgcccagcagcagcgccaagaagacctttttcgtgggaggatgttgacaggttgttagatcccgcaaacagagcacacctcggcctggaggagcaactgcgagagctgctggacatgctggacctcacttgtgctatgaagtcctcgggaagccggtccaagagagccaagctcctgaagaaggaaatcgcattgctaaggaacaaactgtcgcagcagcacagtcagccactgcctaccggacctgggctcgaagggttcgaagaggatggggcagctctcggtccagaagcaggagaggaagtattgcctagactggaaacccttctgcagcccaggaagcggtcccgaagcacatgcggtgatagcgaggttgaagaggagtcgcctggtaaacgcctcgacgccggtttaacaaacggttttggcggagccaggagcgaacaagagcctggaggcggtctgggacgcaaagccaccccccgacgcagatgcgcatccgaaagcagcattagctccagcaattcacccttatgcgattcgtccttcaacgcccctaagtgtggcaggggcaagccggcattggtaaggaggcacaccttagaggatcgtagtgaactgattagctgtatcgaaaacggtaactatgccaaggcggctaggattgcggcagaagtggggcagagctcaatgtggatatccaccgacgccgctgccagcgtgctcgagccactgaaggtagtatgggccaagtgttccggatacccttcctacccagcgctcattatcgatccaaagatgccccgtgttcctggccaccacaatggcgtgaccatacctgcacccccactggacgtgctcaaaattggagagcatatgcagacaaagtctgacgagaaactttttttggtgctcttttttgataacaagaggagctggcagtggctgcccaaatctaaaatggttccgcttggtattgacgaaacaatcgacaagctgaaaatgatggagggtcgtaatagcagcattcggaaggccgttaggattgctttcgaccgggcaatgaatcatctgagtcgcgtgcacggtgagccaacaagcgatctgagtgacatcgattag

SEQ ID NO: 323403 - DNA, 2723 bp, Artificial Sequence
  derived and/or modified sequence
ccagtgccacaaagcaaactgctacacagcattccatgtgacgtgtgcccagaaggctggcctgtacatgaaaatggagcccgtgaaggaactgactggcggtggcaccaccttctccgtcagaaagaccgcttactgtgatgtccacacgcctccaggctgcacccggaggcctctgaatatttacggggatgtcgaaatgaaaaatggcgtctgtcgaaaagagagctcggttaaaacggtcaggtccacatccaaggtcaggaagaaggcaaaaaaggctaagaaagctctggctgagccctgcgcggtcctgccgaccgtgtgcgctccttatattcccccgcagaggttcatcagaatgcaaagtagaaagtgtcttaaaagagactgtgatcagcaggcagacggcctgtgtcggtttggttcctttgactgcttcagatcttctaggaggagctcctctactacgagagcctggacttcagcctcacggacaagaacctcagataggttaaataggattgcgaatcaggtggccattcagcggaagaagcagtttgtggagcgagcccacagctactggctgctcaagcggctgtccaggaacggggcccccctgctgcggcggctgcagtccagcctgcagtctcagcgaagctcacagcagagagaaaatgatgaggagatgaaggctgccaaagagaagctgaagtactggcagcggctgcggcacgacctggagcgcgctcgcctgctgatcgagctgctgcgcaagcgggagaagctcaagcgtgagcaggtgaaggtggagcaggtcgccatggagctgcggctgaccccgctgacggtgctgctgcgctcagtgctggaccagctgcaagacaaggaccccgccaggatatttgcgcagcccgtaccagattatttggatcacattaaacatcccatggactttgccacaatgaggaaacggttagaagctcaagggtataaaaacctccatgagtttgaggaggattttgatctcattatagataactgcatgaagtacaatgccagggacaccgtgttctatagagccgcggtgaggctgcgcgatcagggaggtgttgttctgaggcaggcccggcgcgaggtggacagcatcggcttggaagaggcctcggggatgcacctgcctgagcggcctgctgcggcaccgcggcggcctttctcctgggaagacgtggacaggttgctggaccccgccaacagagcccacctgggcctggaggagcagctgagagagctgctggacatgctcgacctcacctgcgctatgaagtccagcggctcccggagcaagcgggcaaagctgctcaaaaaggaaattgcccttctccgaaacaagctgagccagcagcacagccagcccctgcccacggggccaggcttggaaggcttcgaagaggacggagctgcgctggggccggaggcgggcgaggaagtccttccgaggttggagactcttctgcagccaaggaaaaggtcgcggagcacatgcggagactccgaggtggaggaggagtccccaggaaagcgcctggacgcaggtctcaccaacggctttgggggtgcgaggagcgagcaggagccgggcggcggcctggggaggaaggccacaccccgacgacgctgtgcctccgagtccagcatctcctccagcaacagcccgctctgcgactcgagctttaatgcgcccaaatgtgggcggggcaaaccggctcttgtgcgacggcacacgctggaggaccgcagtgagctgatctcctgcatcgagaatgggaactacgccaaggcggccaggatcgcagccgaagtcggccagagcagcatgtggatctccactgatgccgccgcctcggtgctggagcctctgaaggtggtgtgggccaagtgcagcggctacccctcctacccggcactgatcatcgaccccaagatgccccgtgtgcctggccaccacaacggcgtcaccatcccggccccacccctggacgtgctgaagattggggagcacatgcagaccaagtctgatgagaagctgttcctcgttctcttttttgataataagagaagttggcagtggcttcctaagtccaaaatggttccccttggtattgacgaaactatagacaagttaaagatgatggaagggaggaattccagcatccggaaggccgtgcggatcgcttttgaccgcgccatgaaccacctgagccgcgtccacggggagccgaccagcgacctcagtgacattgactgacggcccggccgccagcgcgggtcttgtccatagtgttgataagctgtacatgtttgtatattgttcaaaacttaacttattctgatttttagttatagctctttaattctttttccccggggaggggggaggttttatttccaagttttctaggaacccatctccgtctgggcgctgtgagtggggtgggcacgtccgggcagcccagtgcgtctgtcgcacgtccccaggccgtgctgctggcgtcactttctttgatatgtagctttttcttaaagacttttgaatgtttaataattttgtaaatcatgctctttacacagagtaccacttatttaataagacgggatgtaaatttacaatgacaaatgtgtattttaagaaagaaaatgacattattttgaatggtactttg

SEQ ID NO: 323404 - DNA, 2241 bp, Artificial Sequence
  derived and/or modified sequence
atgaagatggagcccgtgaaggagctgaccggcggcggcaccaccttcagcgtgagaaagaccgcctactgcgacgtgcacaccccccccggctgcaccagaagacccctgaacatctacggcgacgtggagatgaagaacggcgtgtgcagaaaggagagcagcgtgaagaccgtgagaagcaccagcaaggtgagaaagaaggccaagaaggccaagaaggccctggccgagccctgcgccgtgctgcccaccgtgtgcgccccctacatccccccccagagattcatcagaatgcagagcagaaagtgcctgaagagagactgcgaccagcaggccgacggcctgtgcagattcggcagcttcgactgcttcagaagcagcagaagaagcagcagcaccaccagagcctggaccagcgccagcagaaccagaaccagcgacagactgaacagaatcgccaaccaggtggccatccagagaaagaagcagttcgtggagagagcccacagctactggctgctgaagagactgagcagaaacggcgcccccctgctgagaagactgcagagcagcctgcagagccagagaagcagccagcagagagagaacgacgaggagatgaaggccgccaaggagaagctgaagtactggcagagactgagacacgacctggagagagccagactgctgatcgagctgctgagaaagagagagaagctgaagagagagcaggtgaaggtggagcaggtggccatggagctgagactgacccccctgaccgtgctgctgagaagcgtgctggaccagctgcaggacaaggaccccgccagaatcttcgcccagcccgtgcccgactacctggaccacatcaagcaccccatggacttcgccaccatgagaaagagactggaggcccagggctacaagaacctgcacgagttcgaggaggacttcgacctgatcatcgacaactgcatgaagtacaacgccagagacaccgtgttctacagagccgccgtgagactgagagaccagggcggcgtggtgctgagacaggccagaagagaggtggacagcatcggcctggaggaggccagcggcatgcacctgcccgagagacccgccgccgcccccagaagacccttcagctgggaggacgtggacagactgctggaccccgccaacagagcccacctgggcctggaggagcagctgagagagctgctggacatgctggacctgacctgcgccatgaagagcagcggcagcagaagcaagagagccaagctgctgaagaaggagatcgccctgctgagaaacaagctgagccagcagcacagccagcccctgcccaccggccccggcctggagggcttcgaggaggacggcgccgccctgggccccgaggccggcgaggaggtgctgcccagactggagaccctgctgcagcccagaaagagaagcagaagcacctgcggcgacagcgaggtggaggaggagagccccggcaagagactggacgccggcctgaccaacggcttcggcggcgccagaagcgagcaggagcccggcggcggcctgggcagaaaggccacccccagaagaagatgcgccagcgagagcagcatcagcagcagcaacagccccctgtgcgacagcagcttcaacgcccccaagtgcggcagaggcaagcccgccctggtgagaagacacaccctggaggacagaagcgagctgatcagctgcatcgagaacggcaactacgccaaggccgccagaatcgccgccgaggtgggccagagcagcatgtggatcagcaccgacgccgccgccagcgtgctggagcccctgaaggtggtgtgggccaagtgcagcggctaccccagctaccccgccctgatcatcgaccccaagatgcccagagtgcccggccaccacaacggcgtgaccatccccgccccccccctggacgtgctgaagatcggcgagcacatgcagaccaagagcgacgagaagctgttcctggtgctgttcttcgacaacaagagaagctggcagtggctgcccaagagcaagatggtgcccctgggcatcgacgagaccatcgacaagctgaagatgatggagggcagaaacagcagcatcagaaaggccgtgagaatcgccttcgacagagccatgaaccacctgagcagagtgcacggcgagcccaccagcgacctgagcgacatcgactag

SEQ ID NO: 323405 - DNA, 2988 bp, Artificial Sequence
  derived and/or modified sequence
atgcgccgaaaggggcggtgccaccgaggcagcgcagcgagacacccaagcagcccttgttcggtgaagcatagccccaccagggagactttgacctatgcccaggcccagcgtatggttgaaattgaaattgaggggcggctccacaggataagcatcttcgacccactcgagatcattctagaagacgacctgacggcacaggagatgagcgagtgcaactcaaacaaggagaactctgagcggccgcccgtctgtctcagaacaaaacgacacaagaacaatcgagtaaaaaagaaaaacgaggctttgcccagcgcccacggaacccctgccagcgcgtcggcccttccagagccaaaagtcaggatagtggaatacagcccaccttccgccccacgcaggccacctgtctattataaattcattgagaagagcgcagaggagctggacaacgaggtggagtatgacatggatgaggaggattatgcctggctcgagattgtcaacgagaagcgcaaaggcgattgtgtgccagcagtgagccaaagcatgttcgagtttctgatggatcgatttgaaaaggaatcacattgtgaaaatcagaagcagggagagcaacagtccctgattgatgaggatgctgtgtgctgtatctgtatggatggtgaatgccagaatagtaacgttattcttttctgcgacatgtgcaacctggcggtgcaccaagaatgctatggcgtgccctacatccctgaaggtcagtggctgtgtcgacattgtctccaatcgcgggcacgcccagccgattgcgtgctctgccctaacaagggtggggccttcaagaaaaccgacgacgatcggtgggggcacgtggtatgtgcactctggattcctgaggtaggcttcgccaacaccgtcttcatagaacctatcgacggcgtccgtaatattccaccagctcggtggaagttgacatgctacctgtgtaagcagaaaggtgtgggcgcgtgtatccagtgccataaagcaaactgctataccgccttccacgtaacatgcgcgcagaaggctgggctctacatgaagatggaacccgtaaaagagctgacaggagggggtaccacattctccgttcgcaagactgcttattgtgacgtccatacaccacccggctgtacacgaaggccccttaatatctatggagacgtggagatgaagaatggtgtatgccgcaaagagtcgtcagttaagacggtaaggtccacctctaaggtacgcaaaaaggccaagaaagcaaaaaaggcactcgcggagccatgcgccgtcctaccgactgtttgcgcaccctatattccacctcagcgcttgaatagaatagctaaccaggtcgcgatccagcgcaaaaaacaatttgtggaacgcgcccactcctactggttactcaagcgcctttccaggaatggagcccctctgctgaggcggctgcagtctagccttcaaagccagagatcctcgcagcagcgagagaacgatgaggagatgaaggccgctaaagagaagttgaaatactggcaacgcctgcgtcatgatctagagcgtgcacggctcctgatagagctgctacgtaagagggaaaagctgaaaagagagcaggtcaaggtggaacaagtcgccatggaactgaggcttacacctctgaccgttcttctccgatctgtcctcgatcagctacaagataaggatcctgctcgaatatttgcgcagcccgtgagcctcaaagaagtgcctgattacctggaccatataaaacaccctatggacttcgccacgatgcgcaaacggctcgaggcccagggttacaagaatctccacgagttcgaagaagacttcgatctgattatcgataattgcatgaagtataacgcccgggacactgtgttctacagagctgctgtgaggctacgcgatcaggggggagttgtcttacgccaggcccgacgtgaagtggatagcatcggcctggaggaagcttccggaatgcacttacctgaacgcccggccgcagcgccccggaggcccttttcgtgggaagatgtggaccgactcctcgaccccgccaatagggcccatctaggcctggaggaacagcttcgggagctactggacatgctcgatctgacgtgtgcaatgaaaagcagcggtagtagatccaagagggcaaaacttctgaagaaggagatcgccctcctgcggaataagttgtcacagcagcactctcagcccctacccactggcccaggactcgaagggttcgaagaggacggtgctgctctgggaccggaggccggagaggagggcgacaagtctcccccaaaactcgagccctccgatgccttgccccttccgagcaattcggaaacaaatagcgagccaccaactctcaaaccagttgagctgaatccagaacagagtaaactcttcaagagggtgactttcgataacgaaagccactccgcctgtacacagtccgctctggttagtggccgccctccagagccaactcgggcctctagcggggacgtacccgctgccgcagccagtgccgtggcagaacccgccagtgacgtaaaccgccgcactagcgtcttgttctgtaaaagtaaatcttcatttagggggtggcgattgttttgtagtcaagggaagggaaggggagcccacgcagaaacccccaggtggcggaggtcgccccaggagtctgcctggacgcaagtctcaccaacagcgctgggcgtacgcggtgcttcaaggtccagggccgcggcatggggcggaaggccccatccagacgacgcagtgcccccaagtccagctagcccacctgctacagcccggagcgctacacgggctttgatgaggcccaatgtgggaggggccaatcgcctgctttgtgacgggactcgttggcgcaccgctgtgagctag

SEQ ID NO: 323406 - DNA, 2988 bp, Artificial Sequence
  derived and/or modified sequence
atgaggaggaagggccgctgccaccggggcagcgctgcccggcaccccagcagcccctgcagcgtgaagcacagccccacccgggagaccctgacctacgcccaggcccagaggatggtggagattgaaattgagggccgcctgcaccgcatcagcatctttgaccccctggagatcatcctggaggatgacctgacagcccaggagatgtctgagtgcaacagcaacaaggagaacagcgagaggcctcctgtgtgcctgcggaccaagaggcacaagaacaacagagtgaagaagaagaatgaggccctgcccagcgcccacggcaccccagccagcgccagcgccctgcctgagcccaaggtgcgcatcgtggagtacagccccccatctgccccccggcggccccctgtgtactacaagttcatcgagaagtctgctgaggagctggacaatgaggtggagtatgacatggatgaagaagattatgcctggctggagatcgtgaatgagaagaggaagggggactgtgtgcctgctgtgtcccagagcatgtttgagttcctgatggacagatttgagaaggagagccactgtgagaaccagaagcagggcgagcagcagagcctgattgatgaagatgctgtgtgctgcatctgcatggatggagagtgccagaacagcaatgtcatcctcttctgtgacatgtgcaacctggccgtgcaccaggagtgctacggcgtgccctacatccctgagggccagtggctgtgccgccactgcctgcagagccgggcccggcctgctgactgtgtgctgtgccccaacaagggcggggccttcaagaagacagatgatgaccgctggggccacgtggtgtgtgccctgtggatccctgaggtgggctttgccaacacagtgttcatcgagcccattgatggagtgaggaacatccccccagcccgctggaagctgacctgctacctgtgcaagcagaagggcgtgggcgcctgcatccagtgccacaaggccaactgctacacagccttccacgtgacctgtgcccagaaggccggcctgtacatgaagatggagcctgtgaaggagctgactggaggcggcaccaccttctctgtgaggaagacagcctactgtgatgtgcacaccccacctggctgcacccggcggcccctgaacatctatggagatgtggagatgaagaatggagtgtgcaggaaggagagctctgtgaagacagtgcgcagcaccagcaaggtgaggaagaaggccaagaaggccaagaaggccctggccgagccctgtgctgtgctgcccaccgtgtgtgccccctacatccccccccagaggctgaaccgcatcgccaaccaggtggccatccagaggaagaagcagtttgtggagcgggcccacagctactggctgctgaagaggctgagcagaaatggagcccccctgctgcggcggctgcagagcagcctgcagagccagaggagcagccagcagcgggagaatgatgaggagatgaaggccgccaaggagaagctgaagtactggcagaggctgcggcatgacctggagcgggcccggctgctgattgagctgctgaggaagcgggagaagctgaagcgggagcaggtgaaggtggagcaggtggccatggagctgcggctgacccccctgactgtgctgctgcggtctgtgctggaccagctgcaggacaaggaccctgcccgcatctttgcccagcctgtgtccctgaaggaggtgcctgactacctggaccacatcaagcaccccatggactttgccaccatgaggaagaggctggaggcccagggctacaagaacctgcatgaatttgaagaagattttgacctgatcatcgacaactgcatgaagtacaatgcccgggacaccgtcttctacagagctgctgtgcggctgcgggaccagggcggcgtggtgctgcggcaggcccggcgggaggtggacagcatcggcctggaggaggccagcggcatgcacctgcctgagaggcctgctgctgccccccggcggcccttctcctgggaggatgtggaccggctgctggaccctgccaacagagcccacctgggcctggaggagcagctgcgggagctgctggacatgctggacctgacctgtgccatgaagagcagcggcagccgcagcaagagggccaagctgctgaagaaggagatcgccctgctgaggaacaagctgagccagcagcacagccagcccctgcccactggacctggcctggagggctttgaggaggatggagctgccctgggccctgaggccggggaggagggggacaagagcccccccaagctggagcccagtgatgccctgcccctgcccagcaacagcgagaccaacagcgagccccccaccctgaagcctgtggagctgaaccctgagcagagcaagctgttcaagagggtgacctttgacaatgaaagccacagcgcctgcacccagagcgccctggtgtctggccggcccccagagcccacccgggccagcagtggagatgtgcctgctgctgctgccagcgctgtggccgagcccgccagtgatgtgaacagaaggacctctgtgctcttctgcaagagcaagagcagcttccggggctggaggctcttctgcagccagggcaagggccgcggggcccatgctgagaccccccgctggaggaggagcccccaggagagcgcctggacccaggtgagccccacagccctgggcgtgcggggggccagccgcagcagagctgctgcctggggcggccggccccacccagatgatgctgtgccccccagccctgccagccccccagccacagcccggagcgccacccgggccctgatgaggcccaacgtgggcggggccaaccggctgctgtgtgatggcacccgctggaggacagctgtgtcctag

SEQ ID NO: 323407 - DNA, 2988 bp, Artificial Sequence
  derived and/or modified sequence
atgcggcggaagggccggtgccaccggggcagcgccgcccggcacccttcttctccttgcagcgtcaaacacagccctaccagggaaactctgacctacgctcaggcccagaggatggtggagattgaaatcgagggtaggctacacaggatctccatctttgaccccctcgaaatcatccttgaagacgacctcaccgcccaggagatgtcagagtgcaactcaaataaagaaaacagcgagcgccctcccgtgtgtttacggactaaaagacacaagaacaaccgcgtgaaaaagaagaacgaggcactcccatccgctcatggtactcctgcctccgcctctgcactacctgaacctaaggtgagaattgttgaatacagtcccccaagcgcccctcgtagaccaccagtgtattataaatttatcgaaaaaagtgctgaggagctggataacgaggtcgaatatgatatggatgaagaggactatgcatggcttgagatcgtcaacgagaagagaaaaggggattgtgtgcccgccgtatcacagtctatgttcgaatttcttatggatcgattcgagaaagaaagccattgcgagaaccagaagcaaggcgaacagcaatccctgatcgacgaggacgctgtttgttgcatttgcatggatggcgagtgtcaaaacagtaacgtcatcctgttttgtgatatgtgcaatttagctgtccaccaggaatgttacggagtcccttacatccccgagggtcagtggctgtgcaggcattgtttacagtcacgggcacgtcctgccgattgcgtgctctgccctaataagggtggggcatttaaaaaaacagatgacgacaggtggggacatgtggtatgtgcattgtggatacccgaggtagggttcgctaacacagtatttatcgagcccatcgatggcgtcagaaacatacctccagcccggtggaagttaacctgctacctgtgtaaacagaagggagttggggcatgcatccaatgtcacaaagcgaactgctacaccgctttccatgtgacatgcgctcaaaaggctgggctgtatatgaaaatggagccagtcaaggagcttacaggtggtggaactacattcagtgtgcgtaaaaccgcctactgtgatgttcacaccccgcccgggtgtacgcggcggcctcttaacatttacggcgatgtggagatgaaaaatggtgtatgtagaaaggagagctcagtcaagactgtgagaagtactagcaaagtgagaaagaaagccaagaaggccaagaaagcactggccgaaccatgtgctgtccttccaactgtatgcgctccatatatccccccgcagcgcctcaatcggatagccaatcaggtggctatccagagaaaaaagcagttcgttgaacgggcccacagctactggctgttgaaacggctgagccggaacggagccccgttgcttaggaggctccagtcatccctgcagtcccagcgaagctcacagcagcgcgagaacgacgaggagatgaaggcggccaaagaaaagctgaagtactggcagagactcaggcacgacctcgaaagagctcggttgctgatagaactcctgagaaagagggagaagctgaaacgagaacaggtgaaagtggagcaggtagcaatggaactgcgtttgacaccgctaactgtcctcctgcgctctgtcctagatcagcttcaagacaaagaccccgcgagaatattcgcgcaacccgttagccttaaagaggtccctgattatttagatcacattaagcatccaatggactttgctacaatgaggaagagactcgaggctcagggctacaagaacctgcatgaattcgaggaagattttgacctgattattgataattgcatgaaatacaacgcccgcgacactgtgttttatcgtgctgccgttcggctgagagaccaaggcggagtggtactaagacaggcgcgtagggaagtggactctattggcttggaagaagcttcagggatgcacctgcctgaaagaccggcagctgcgccacggaggccgttcagctgggaggatgtagataggctgctggaccccgcaaacagggctcacctgggcctggaggaacagcttagggaactcctcgatatgctcgacctgacctgtgcgatgaagagctcgggctcgcgtagcaaaagggctaagctgcttaagaaagagatcgctctcctgcgcaacaagctctcacaacaacatagccagcccctcccgacggggcccgggttagagggcttcgaagaggacggtgccgccctggggcctgaggccggcgaggagggcgacaaaagcccccctaaacttgagccgagcgacgctttaccgcttccctctaatagcgagacaaattccgagcctcccacactgaaacctgttgagcttaacccagaacagagtaaattgttcaaacgcgtcacatttgataacgagtctcatagcgcatgcactcagtcagcgctggtaagtggcagaccacctgagcctacccgagctagttcaggggacgtgcctgcggccgccgcctcagcggttgccgaaccggctagcgacgtaaatcgccgcacctcagtgctcttctgcaagtccaagtcttcctttaggggctggcgccttttctgctcccagggcaaggggcgaggcgcacatgcggaaacccctcgatggcgaaggagcccccaggagagcgcatggacccaagtaagcccgacggccctgggagtaagaggcgcatcacggagtagggccgccgcgtggggaggacggccccatcctgatgacgccgtgccccccagccctgcatcccctcctgccaccgcccgatcggcgacacgtgcactaatgcgacctaacgtcggcggggcaaaccgactcctgtgtgacgggacacgatggcggacagctgtgtcatag

SEQ ID NO: 323408 - DNA, 2988 bp, Artificial Sequence
  derived and/or modified sequence
atgcgacgaaaaggtcgctgccacagaggttcagcggctaggcatccctcctctccatgttccgtgaagcactcacctacccgggagactcttacctatgcccaggctcagcggatggtcgagattgaaattgagggtcgcctgcatcgcatcagcatattcgatcccctcgagatcatcctcgaggatgatctcactgctcaagagatgtccgagtgcaactcaaataaagagaactctgagcggcctccagtttgcctccgcaccaagagacacaaaaataaccgcgtcaaaaagaaaaacgaggcactgccatcagctcacggcacaccggcttccgcctctgctctccctgagccaaaagtcagaattgtggaatattctcctccatctgcacccagacgaccgccagtatattataagttcattgaaaagtccgcagaagagctagataatgaagtggagtacgatatggacgaggaggactacgcttggctcgaaatcgtaaatgaaaaacgtaaaggtgactgtgtcccagctgtttcccagtccatgttcgagtttctcatggaccgttttgaaaaggaatcccattgcgaaaaccaaaaacagggcgagcagcaaagccttattgatgaagatgccgtatgttgtatctgcatggacggtgagtgccagaatagtaatgtgattcttttctgtgacatgtgtaatctcgcggttcaccaagagtgttatggagtcccttacatccccgaaggacagtggctgtgccgacactgccttcagtccagggcacgtccagcggactgcgtcctctgcccgaacaagggcggagcgttcaagaaaacagacgacgacagatggggtcatgtagtgtgcgcactgtggatccctgaagtcggattcgcgaataccgtgtttattgagccgattgatggagtgcgcaacatcccacctgcccgatggaaactaacttgctacttgtgcaaacagaagggagttggagcttgcattcagtgtcacaaagcgaattgttacaccgcattccacgttacctgcgctcagaaggcaggactttacatgaaaatggagcccgttaaggaactgactggagggggaactactttttctgttagaaaaaccgcttactgcgacgtacatacaccccctggctgtactcggagacccctcaacatctatggcgacgtggagatgaaaaatggagtgtgtcggaaggaatcgtcagtgaagacagtgaggtctacgagcaaagtccggaagaaggcgaagaaggctaaaaaggcgctggctgagccatgcgctgtacttcccacggtgtgtgcaccgtacatacctccccagaggctcaatcgaatcgcgaatcaggtcgctattcagcgaaagaaacagttcgtcgagagagcccatagttactggcttctgaaaaggctatcacgaaatggtgcgccactcctacgtcggttgcagtctagtctccagtcacagcgtagcagccagcagcgggagaacgacgaagagatgaaggcggcaaaggagaaactgaagtactggcagcggttgagacacgatctagaaagggcacggctgctgattgaacttcttcgcaagcgagagaagttgaaacgtgagcaggttaaggtggagcaggttgcgatggagctgagactgacaccattgactgtgcttctcaggagcgtacttgaccagttacaggacaaagaccctgccagaatttttgcgcagcccgtgtctctgaaagaggtgccagactatctggatcatattaaacaccctatggatttcgccactatgaggaaaagattggaggctcagggatataaaaaccttcatgagttcgaggaggatttcgatctaattatcgataactgcatgaagtacaatgctcgcgatacggtcttctatagggccgctgtaagattgagagatcagggcggtgtggtgctaaggcaggcaaggcgggaggtcgacagcatcgggttagaagaggcatccggcatgcatttaccagagcgtcccgctgcagcaccacggaggccctttagctgggaggacgtggacaggctcctagaccccgcaaatcgagcccacctcggcctggaagaacagctgcgagaactgctggacatgctggaccttacgtgtgcaatgaagtctagtggaagtaggtctaagagggctaagcttctaaaaaaggaaattgccctactcagaaacaagctttcacagcaacacagccagcccctgccaaccgggccaggacttgagggtttcgaggaggatggcgcagcccttggaccggaagccggagaagaaggcgacaaatcccctcccaagctagaaccctctgacgccctgccgctaccctcaaacagtgagacaaatagcgagccacccacacttaagcccgtggagcttaacccagagcagtcaaaactgtttaaacgagttacgtttgacaatgaatctcactctgcctgtacgcagagtgccctggtatccggccgacctcctgagcccactagagccagctccggcgacgtgccagcagctgctgctagcgctgtcgccgagcccgcatccgatgtaaacagacgcacaagtgtcttattctgcaaatcgaaaagctcctttcgcggatggagactcttttgctctcagggcaagggcaggggtgctcacgcggagactcccaggtggcggaggagcccacaggagtccgcctggacacaagtctctcctaccgcccttggcgtgaggggggcttctcgatcaagggccgcagcctggggcggtcggcctcatcccgacgatgctgtgccaccatctcccgcaagtcctcccgctactgccaggtctgctacacgggctctgatgcggccaaatgtcgggggtgcaaataggctcttgtgtgacggaacgcgctggcgtaccgcagtgtcgtag

SEQ ID NO: 323409 - DNA, 4453 bp, Artificial Sequence
  derived and/or modified sequence
aggtaatcattaccaaatgaggaggaaaggacgatgtcatcgaggctctgcagcgaggcatccttcttccccatgcagtgttaaacactcccctacgcgagaaacgctgacctacgctcaagctcaaaggatggtagagatagaaattgaagggcgcttgcacaggatcagtatttttgatcccctggagatcatattggaagatgacctcactgctcaagagatgagtgagtgcaacagcaacaaggaaaacagcgagcggcctcctgtctgcttaagaactaagcgtcacaaaaacaacagagtcaaaaagaaaaacgaggccctccccagcgcccacggcacgccggcctcggccagtgccctcccggagcccaaggtgcgcatcgtggagtacagccctccgtccgcccccaggaggcctcctgtgtactacaagttcatcgagaagtcggccgaggaactggacaacgaggtggagtatgacatggacgaggaggactatgcctggctggagatcgtcaatgagaagcgcaagggcgactgcgtccccgccgtgtcgcagagcatgtttgagttcctgatggaccgcttcgagaaggagtcgcactgcgagaaccagaagcagggcgagcagcagtctctgatcgacgaggacgccgtgtgctgcatctgcatggacggggagtgtcagaacagcaacgtgatcctcttctgcgacatgtgcaacctggccgtgcaccaggagtgctacggggtgccctacatccccgagggccagtggctctgccgccactgcctgcagtcgcgggcccggcccgccgactgtgtgctgtgccccaacaagggtggtgccttcaaaaagacagatgacgaccgctggggtcacgtggtgtgtgccctgtggatcccagaggtcggctttgccaacacggtgttcatcgagcccatcgatggggtgaggaacatccctccagcccggtggaaactgacatgctacctctgtaagcagaagggcgtgggtgcctgcatccagtgccacaaagcaaactgctacacagcattccatgtgacgtgtgcccagaaggctggcctgtacatgaaaatggagcccgtgaaggaactgactggcggtggcaccaccttctccgtcagaaagaccgcttactgtgatgtccacacgcctccaggctgcacccggaggcctctgaatatttacggggatgtcgaaatgaaaaatggcgtctgtcgaaaagagagctcggttaaaacggtcaggtccacatccaaggtcaggaagaaggcaaaaaaggctaagaaagctctggctgagccctgcgcggtcctgccgaccgtgtgcgctccttatattcccccgcagaggttaaataggattgcgaatcaggtggccattcagcggaagaagcagtttgtggagcgagcccacagctactggctgctcaagcggctgtccaggaacggggcccccctgctgcggcggctgcagtccagcctgcagtctcagcgaagctcacagcagagagaaaatgatgaggagatgaaggctgccaaagagaagctgaagtactggcagcggctgcggcacgacctggagcgcgctcgcctgctgatcgagctgctgcgcaagcgggagaagctcaagcgtgagcaggtgaaggtggagcaggtcgccatggagctgcggctgaccccgctgacggtgctgctgcgctcagtgctggaccagctgcaagacaaggaccccgccaggatatttgcgcagcccgtgagtctgaaggaggtaccagattatttggatcacattaaacatcccatggactttgccacaatgaggaaacggttagaagctcaagggtataaaaacctccatgagtttgaggaggattttgatctcattatagataactgcatgaagtacaatgccagggacaccgtgttctatagagccgcggtgaggctgcgcgatcagggaggtgttgttctgaggcaggcccggcgcgaggtggacagcatcggcttggaagaggcctcggggatgcacctgcctgagcggcctgctgcggcaccgcggcggcctttctcctgggaagacgtggacaggttgctggaccccgccaacagagcccacctgggcctggaggagcagctgagagagctgctggacatgctcgacctcacctgcgctatgaagtccagcggctcccggagcaagcgggcaaagctgctcaaaaaggaaattgcccttctccgaaacaagctgagccagcagcacagccagcccctgcccacggggccaggcttggaaggcttcgaagaggacggagctgcgctggggccggaggcgggcgaggaaggagataaatctccccctaaacttgaaccatcagatgcattacctcttccttcaaactcggagactaattcagaaccaccaaccctcaaaccagtagaactcaacccagagcagagtaaacttttcaaaagagtcacatttgataatgaatcacatagcgcttgcactcagagcgcactggtaagcggacgccctccagagcccacccgcgccagtagtggcgatgtgccggcggcggcggcctccgcggtggcggagccagcaagcgatgtaaacagacgcacttctgttctcttctgcaaatcgaaaagttccttccgaggttggagactcttctgcagccaaggaaaaggtcgcggagcacatgcggagactccgaggtggaggaggagtccccaggaaagcgcctggacgcaggtctcaccaacggctttgggggtgcgaggagcgagcaggagccgggcggcggcctggggaggaaggccacaccccgacgacgctgtgcctccgagtccagcatctcctccagcaacagcccgctctgcgactcgagctttaatgcgcccaaatgtgggcggggcaaaccggctcttgtgcgacggcacacgctggaggaccgcagtgagctgatctcctgcatcgagaatgggaactacgccaaggcggccaggatcgcagccgaagtcggccagagcagcatgtggatctccactgatgccgccgcctcggtgctggagcctctgaaggtggtgtgggccaagtgcagcggctacccctcctacccggcactgatcatcgaccccaagatgccccgtgtgcctggccaccacaacggcgtcaccatcccggccccacccctggacgtgctgaagattggggagcacatgcagaccaagtctgatgagaagctgttcctcgttctcttttttgataataagagaagttggcagtggcttcctaagtccaaaatggttccccttggtattgacgaaactatagacaagttaaagatgatggaagggaggaattccagcatccggaaggccgtgcggatcgcttttgaccgcgccatgaaccacctgagccgcgtccacggggagccgaccagcgacctcagtgacattgactgacggcccggccgccagcgcgggtcttgtccatagtgttgataagctgtacatgtttgtatattgttcaaaacttaacttattctgatttttagttatagctctttaattctttttccccggggaggggggaggttttatttccaagttttctaggaacccatctccgtctgggcgctgtgagtggggtgggcacgtccgggcagcccagtgcgtctgtcgcacgtccccaggccgtgctgctggcgtcactttctttgatatgtagctttttcttaaagacttttgaatgtttaataattttgtaaatcatgctctttacacagagtaccacttatttaataagacgggatgtaaatttacaatgacaaatgtgtattttaagaaagaaaatgacattattttgaatggtactttgtggaaagaggggagaataaagttatgctgtgtacatcacttgcagatcaccaaaaacactccgctgcccgtgaccgccggtgggtgtgtccccgctcccgtcgtcccgcccacctcaaaccccgcaggtgtgcctcccagcggattatttattgtagaaagtgtattcatttgctttataatgaaaaatacatttgcaaaggtatattgatatgcatttttatacaggcacataaaaattcaacttggcttgggagcagaatgcattgcattgtataaatgactctggcctgtgtgtactttgattttataacttgtaatcttttgtttacaatgaggggctttctgtaacttgttttaatttagaacactttggtagcaatagaaactttggatacatttttgtatggtacctgtgatgtatatagaattagtactttatttttatttttaagaggtaaagcattatgttggggaaagtagggtgggtttccaaatttgcattttttatattaaaaataaagtcaagatttgg

SEQ ID NO: 323410 - DNA, 2988 bp, Artificial Sequence
  derived and/or modified sequence
atgagaagaaagggcagatgccacagaggcagcgccgccagacaccccagcagcccctgcagcgtgaagcacagccccaccagagagaccctgacctacgcccaggcccagagaatggtggagatcgagatcgagggcagactgcacagaatcagcatcttcgaccccctggagatcatcctggaggacgacctgaccgcccaggagatgagcgagtgcaacagcaacaaggagaacagcgagagaccccccgtgtgcctgagaaccaagagacacaagaacaacagagtgaagaagaagaacgaggccctgcccagcgcccacggcacccccgccagcgccagcgccctgcccgagcccaaggtgagaatcgtggagtacagcccccccagcgcccccagaagaccccccgtgtactacaagttcatcgagaagagcgccgaggagctggacaacgaggtggagtacgacatggacgaggaggactacgcctggctggagatcgtgaacgagaagagaaagggcgactgcgtgcccgccgtgagccagagcatgttcgagttcctgatggacagattcgagaaggagagccactgcgagaaccagaagcagggcgagcagcagagcctgatcgacgaggacgccgtgtgctgcatctgcatggacggcgagtgccagaacagcaacgtgatcctgttctgcgacatgtgcaacctggccgtgcaccaggagtgctacggcgtgccctacatccccgagggccagtggctgtgcagacactgcctgcagagcagagccagacccgccgactgcgtgctgtgccccaacaagggcggcgccttcaagaagaccgacgacgacagatggggccacgtggtgtgcgccctgtggatccccgaggtgggcttcgccaacaccgtgttcatcgagcccatcgacggcgtgagaaacatcccccccgccagatggaagctgacctgctacctgtgcaagcagaagggcgtgggcgcctgcatccagtgccacaaggccaactgctacaccgccttccacgtgacctgcgcccagaaggccggcctgtacatgaagatggagcccgtgaaggagctgaccggcggcggcaccaccttcagcgtgagaaagaccgcctactgcgacgtgcacaccccccccggctgcaccagaagacccctgaacatctacggcgacgtggagatgaagaacggcgtgtgcagaaaggagagcagcgtgaagaccgtgagaagcaccagcaaggtgagaaagaaggccaagaaggccaagaaggccctggccgagccctgcgccgtgctgcccaccgtgtgcgccccctacatccccccccagagactgaacagaatcgccaaccaggtggccatccagagaaagaagcagttcgtggagagagcccacagctactggctgctgaagagactgagcagaaacggcgcccccctgctgagaagactgcagagcagcctgcagagccagagaagcagccagcagagagagaacgacgaggagatgaaggccgccaaggagaagctgaagtactggcagagactgagacacgacctggagagagccagactgctgatcgagctgctgagaaagagagagaagctgaagagagagcaggtgaaggtggagcaggtggccatggagctgagactgacccccctgaccgtgctgctgagaagcgtgctggaccagctgcaggacaaggaccccgccagaatcttcgcccagcccgtgagcctgaaggaggtgcccgactacctggaccacatcaagcaccccatggacttcgccaccatgagaaagagactggaggcccagggctacaagaacctgcacgagttcgaggaggacttcgacctgatcatcgacaactgcatgaagtacaacgccagagacaccgtgttctacagagccgccgtgagactgagagaccagggcggcgtggtgctgagacaggccagaagagaggtggacagcatcggcctggaggaggccagcggcatgcacctgcccgagagacccgccgccgcccccagaagacccttcagctgggaggacgtggacagactgctggaccccgccaacagagcccacctgggcctggaggagcagctgagagagctgctggacatgctggacctgacctgcgccatgaagagcagcggcagcagaagcaagagagccaagctgctgaagaaggagatcgccctgctgagaaacaagctgagccagcagcacagccagcccctgcccaccggccccggcctggagggcttcgaggaggacggcgccgccctgggccccgaggccggcgaggagggcgacaagagcccccccaagctggagcccagcgacgccctgcccctgcccagcaacagcgagaccaacagcgagccccccaccctgaagcccgtggagctgaaccccgagcagagcaagctgttcaagagagtgaccttcgacaacgagagccacagcgcctgcacccagagcgccctggtgagcggcagaccccccgagcccaccagagccagcagcggcgacgtgcccgccgccgccgccagcgccgtggccgagcccgccagcgacgtgaacagaagaaccagcgtgctgttctgcaagagcaagagcagcttcagaggctggagactgttctgcagccagggcaagggcagaggcgcccacgccgagacccccagatggagaagaagcccccaggagagcgcctggacccaggtgagccccaccgccctgggcgtgagaggcgccagcagaagcagagccgccgcctggggcggcagaccccaccccgacgacgccgtgccccccagccccgccagcccccccgccaccgccagaagcgccaccagagccctgatgagacccaacgtgggcggcgccaacagactgctgtgcgacggcaccagatggagaaccgccgtgagctag

SEQ ID NO: 323411 - DNA, 3179 bp, Artificial Sequence
  derived and/or modified sequence
tggcggtggcaccaccttctccgtcagaaagaccgcttactgtgatgtccacacgcctccaggctgcacccggaggcctctgaatatttacggggatgtcgaaatgaaaaatggcgtctgtcgaaaagagagctcggttaaaacggtcaggtccacatccaaggtcaggaagaaggcaaaaaaggctaagaaagctctggctgagccctgcgcggtcctgccgaccgtgtgcgctccttatattcccccgcagagcttcgagtagagagagagaaacaaacctggacgagtgttcctggccgcggtctctgcagtctgggtttcccagtctccaggagatgctggtgcttcaggccaccttgccaccagtggaggagctcccagtgcgcctggcctgttggcaccatggttcatcagaatgcaaagtagaaagtgtcttaaaagagactgtgatcagcaggcagacggcctgtgtcggtttggttcctttgactgcttcagatcttctaggaggagctcctctactacgagagcctggacttcagcctcacggacaagaacctcagataggttaaataggattgcgaatcaggtggccattcagcggaagaagcagtttgtggagcgagcccacagctactggctgctcaagcggctgtccaggaacggggcccccctgctgcggcggctgcagtccagcctgcagtctcagcgaagctcacagcagagagaaaatgatgaggagatgaaggctgccaaagagaagctgaagtactggcagcggctgcggcacgacctggagcgcgctcgcctgctgatcgagctgctgcgcaagcgggagaagctcaagcgtgagcaggtgaaggtggagcaggtcgccatggagctgcggctgaccccgctgacggtgctgctgcgctcagtgctggaccagctgcaagacaaggaccccgccaggatatttgcgcagcccgtgagtctgaaggaggtaccagattatttggatcacattaaacatcccatggactttgccacaatgaggaaacggttagaagctcaagggtataaaaacctccatgagtttgaggaggattttgatctcattatagataactgcatgaagtacaatgccagggacaccgtgttctatagagccgcggtgaggctgcgcgatcagggaggtgttgttctgaggcaggcccggcgcgaggtggacagcatcggcttggaagaggcctcggggatgcacctgcctgagcggcctgctgcggcaccgcggcggcctttctcctgggaagacgtggacaggttgctggaccccgccaacagagcccacctgggcctggaggagcagctgagagagctgctggacatgctcgacctcacctgcgctatgaagtccagcggctcccggagcaagcgggcaaagctgctcaaaaaggaaattgcccttctccgaaacaagctgagccagcagcacagccagcccctgcccacggggccaggcttggaaggcttcgaagaggacggagctgcgctggggccggaggcgggcgaggaaggagataaatctccccctaaacttgaaccatcagatgcattacctcttccttcaaactcggagactaattcagaaccaccaaccctcaaaccagtagaactcaacccagagcagagtaaacttttcaaaagagtcacatttgataatgaatcacatagcgcttgcactcagagcgcactggtaagcggacgccctccagagcccacccgcgccagtagtggcgatgtgccggcggcggcggcctccgcggtggcggagccagcaagcgatgtaaacagacgcacttctgttctcttctgcaaatcgaaaagtgtaagccccccaaagtctgccaagaacactgaaacccagccaacttctcctcagctagggaccaaaacctttttgtctgtagtccttccgaggttggagactcttctgcagccaaggaaaaggtcgcggagcacatgcggagactccgaggtggaggaggagtccccaggaaagcgcctggacgcaggtctcaccaacggctttgggggtgcgaggagcgagcaggagccgggcggcggcctggggaggaaggccacaccccgacgacgctgtgcctccgagtccagcatctcctccagcaacagcccgctctgcgactcgagctttaatgcgcccaaatgtgggcggggcaaaccggctcttgtgcgacggcacacgctggaggaccgcagtgagctgatctcctgcatcgagaatgggaactacgccaaggcggccaggatcgcagccgaagtcggccagagcagcatgtggatctccactgatgccgccgcctcggtgctggagcctctgaaggtggtgtgggccaagtgcagcggctacccctcctacccggcactgatcatcgaccccaagatgccccgtgtgcctggccaccacaacggcgtcaccatcccggccccacccctggacgtgctgaagattggggagcacatgcagaccaagtctgatgagaagctgttcctcgttctcttttttgataataagagaagttggcagtggcttcctaagtccaaaatggttccccttggtattgacgaaactatagacaagttaaagatgatggaagggaggaattccagcatccggaaggccgtgcggatcgcttttgaccgcgccatgaaccacctgagccgcgtccacggggagccgaccagcgacctcagtgacattgactgacggcccggccgccagcgcgggtcttgtccatagtgttgataagctgtacatgtttgtatattgttcaaaacttaacttattctgatttttagttatagctctttaattctttttccccggggaggggggaggttttatttccaagttttctaggaacccatctccgtctgggcgctgtgagtggggtgggcacgtccgggcagcccagtgcgtctgtcgcacgtccccaggccgtgctgctggcgtcactttctttgatatgtagctttttcttaaagacttttgaatgtttaataattttgtaaatcatgctctttacacagagtaccacttatttaataagacgggatgtaaatttacaatgacaaatgtgtattttaagaaagaaaatgacattattttgaat

SEQ ID NO: 323412 - protein, 784 aa, Artificial Sequence
  derived and/or modified sequence
MQSRKCLKRDCDQQADGLCRFGSFDCFRSSRRSSSTTRAWTSASRTRTSDRLNRIANQVAIQRKKQFVERAHSYWLLKRLSRNGAPLLRRLQSSLQSQRSSQQRENDEEMKAAKEKLKYWQRLRHDLERARLLIELLRKREKLKREQVKVEQVAMELRLTPLTVLLRSVLDQLQDKDPARIFAQPVSLKEVPDYLDHIKHPMDFATMRKRLEAQGYKNLHEFEEDFDLIIDNCMKYNARDTVFYRAAVRLRDQGGVVLRQARREVDSIGLEEASGMHLPERPAAAPRRPFSWEDVDRLLDPANRAHLGLEEQLRELLDMLDLTCAMKSSGSRSKRAKLLKKEIALLRNKLSQQHSQPLPTGPGLEGFEEDGAALGPEAGEEGDKSPPKLEPSDALPLPSNSETNSEPPTLKPVELNPEQSKLFKRVTFDNESHSACTQSALVSGRPPEPTRASSGDVPAAAASAVAEPASDVNRRTSVLFCKSKSVSPPKSAKNTETQPTSPQLGTKTFLSVVLPRLETLLQPRKRSRSTCGDSEVEEESPGKRLDAGLTNGFGGARSEQEPGGGLGRKATPRRRCASESSISSSNSPLCDSSFNAPKCGRGKPALVRRHTLEDRSELISCIENGNYAKAARIAAEVGQSSMWISTDAAASVLEPLKVVWAKCSGYPSYPALIIDPKMPRVPGHHNGVTIPAPPLDVLKIGEHMQTKSDEKLFLVLFFDNKRSWQWLPKSKMVPLGIDETIDKLKMMEGRNSSIRKAVRIAFDRAMNHLSRVHGEPTSDLSDID

SEQ ID NO: 323413 - protein, 649 aa, Artificial Sequence
  derived and/or modified sequence
MKAAKEKLKREQVKVEQVAMELRLTPLTVLLRSVLDQLQDKDPARIFAQPVSLKEVPDYLDHIKHPMDFATMRKRLEAQGYKNLHEFEEDFDLIIDNCMKYNARDTVFYRAAVRLRDQGGVVLRQARREVDSIGLEEASGMHLPERPAAAPRRPFSWEDVDRLLDPANRAHLGLEEQLRELLDMLDLTCAMKSSGSRSKRAKLLKKEIALLRNKLSQQHSQPLPTGPGLEGFEEDGAALGPEAGEEGDKSPPKLEPSDALPLPSNSETNSEPPTLKPVELNPEQSKLFKRVTFDNESHSACTQSALVSGRPPEPTRASSGDVPAAAASAVAEPASDVNRRTSVLFCKSKSVSPPKSAKNTETQPTSPQLGTKTFLSVVLPRLETLLQPRKRSRSTCGDSEVEEESPGKRLDAGLTNGFGGARSEQEPGGGLGRKATPRRRCASESSISSSNSPLCDSSFNAPKCGRGKPALVRRHTLEDRSELISCIENGNYAKAARIAAEVGQSSMWISTDAAASVLEPLKVVWAKCSGYPSYPALIIDPKMPRVPGHHNGVTIPAPPLDVLKIGEHMQTKSDEKLFLVLFFDNKRSWQWLPKSKMVPLGIDETIDKLKMMEGRNSSIRKAVRIAFDRAMNHLSRVHGEPTSDLSDID

SEQ ID NO: 323414 - DNA, 2355 bp, Artificial Sequence
  derived and/or modified sequence
atgcagtccaggaaatgtcttaagcgggattgtgaccagcaggcagatggtttgtgccggttcggatcattcgattgctttagatccagtcgccgtagctcctccaccacccgtgcatggactagcgcttctagaacacgaacttcagaccggcttaacaggattgcgaaccaggtggctattcagcgaaaaaaacaattcgtggagagagcccactcctactggctgctgaaacgtctgtccaggaacggtgctccattactaagacggcttcagtcttcactgcagtcacagcggagctctcaacagcgggagaacgatgaggaaatgaaggccgccaaggaaaagctgaaatattggcaacgcctccggcacgacctagaaagggctcgcctgctcatcgaactgctgcgaaagcgggaaaaattgaaacgggaacaagtgaaggtggagcaggtagcaatggaattgcgccttaccccattaactgtcctgctgaggagtgtgctcgatcaactgcaggataaggaccctgcgcggattttcgcccaaccagtgtctctcaaagaagttcccgactacctggatcacatcaaacaccctatggacttcgctactatgaggaagcgtctggaggcacagggctataaaaatctgcatgagttcgaggaggacttcgatcttataatagataattgtatgaaatacaatgcgagagatacggtgttctaccgcgccgcggttaggttaagggaccagggcggggtggttctgcgacaagccaggcgcgaggttgatagtatcgggttagaagaagcttccggcatgcatctcccagaaaggcccgcggcagccccccgccggccattctcctgggaggatgtggacaggcttctggatccggccaatcgagctcatctcggactcgaggagcagctgagggaactgctagatatgctcgatctgacctgcgctatgaaatccagcggcagccgttccaaacgcgctaagctcctgaagaaagagatcgcgcttctgaggaacaaactcagccagcagcattcgcagcccttgccgactggcccgggtttggaagggttcgaagaggacggagctgccctcggtcctgaggcaggagaggaaggcgataagagtccacctaagcttgagccaagcgacgctctacccttgccaagcaattcagagacaaactctgaaccacctacgttgaaaccagtagagctgaatcctgaacagtcgaaactattcaagcgggtgacgttcgacaatgaaagtcactctgcctgcacgcagagcgcactggtgtcagggcggccacctgagcccaccagggcttcatctggcgacgtgccggccgccgcggctagtgcagttgcggaacctgccagcgatgtcaatcggagaacctctgtcctgttttgtaagagcaagtctgtgagcccgccaaaaagcgctaaaaacaccgaaacacaaccaacaagtccccagctgggaactaaaacctttctgtcggtagtccttcctcgtctcgagactctcctacagcctagaaaacggagccgtagcacatgtggcgactcggaggttgaagaggagagtccagggaaacgacttgatgccggcttaaccaacgggttcggcggtgccagaagcgagcaagaaccgggtggcggtctggggcgtaaagccactccaaggcgacgctgcgccagcgagtcttcgatatcctcttctaacagccctctgtgtgactccagctttaatgctcccaaatgcggacgaggaaaaccagccctggtgagacggcacacgctggaggatcgatctgagttgatatcctgcatcgagaacggcaactacgctaaagccgcaagaattgcggccgaagtgggacagtcctctatgtggatctcgacagacgcagctgcttccgtcctggaaccgctaaaggtggtttgggccaagtgctcaggatatcccagctaccctgctcttatcattgatcctaaaatgccgagggttcctgggcatcacaacggggttacgatacctgctccacctctcgacgttctgaagatcggcgaacacatgcagacaaaatcagacgagaagctgtttttagtgcttttcttcgacaataaacggtcttggcagtggctgcctaagtcaaagatggtgcccctcggaattgacgagactattgacaaactgaaaatgatggaagggagaaatagcagtattagaaaagctgtcagaattgcgttcgaccgggctatgaaccacctgagcagagtccacggagagcccacctccgacttgtctgatatagactag

SEQ ID NO: 323415 - DNA, 2355 bp, Artificial Sequence
  derived and/or modified sequence
atgcagagcaggaagtgcctgaagagggactgtgaccagcaggctgatggcctgtgccgcttcggcagctttgactgcttccgcagcagcagaagaagcagcagcaccacccgggcctggaccagcgccagcaggaccaggaccagtgaccggctgaacagaattgccaaccaggtggccatccagaggaagaagcagtttgtggagcgggcccacagctactggctgctgaagaggctgagcagaaatggagcccccctgctgcggcggctgcagagcagcctgcagagccagaggagcagccagcagagagaaaatgatgaggagatgaaggccgccaaggagaagctgaagtactggcagaggctgcggcatgacctggagcgggcccggctgctgattgagctgctgaggaagcgggagaagctgaagcgggagcaggtgaaggtggagcaggtggccatggagctgcggctgacccccctgactgtgctgctgcggtctgtgctggaccagctgcaggacaaggaccctgcccgcatctttgcccagcctgtgtccctgaaggaggtgcctgactacctggaccacatcaagcaccccatggactttgccaccatgaggaagaggctggaggcccagggctacaagaacctgcacgagtttgaggaggactttgacctgatcatcgacaactgcatgaagtacaatgcccgggacacagtgttctacagagctgctgtgcggctgcgggaccagggcggcgtggtgctgcggcaggcccggcgggaggtggacagcatcggcctggaggaggccagcggcatgcacctgcctgagaggcctgctgctgccccccggcggcccttctcctgggaggatgtggaccggctgctggaccctgccaacagagcccacctgggcctggaggagcagctgcgggagctgctggacatgctggacctgacctgtgccatgaagagcagcggcagccgcagcaagagggccaagctgctgaagaaggagatcgccctgctgaggaacaagctgagccagcagcacagccagcccctgcccaccggccctggcctggagggctttgaagaagatggagctgccctgggccctgaggccggggaggagggggacaagagcccccccaagctggagcccagtgatgccctgcccctgcccagcaacagcgagaccaacagcgagccccccaccctgaagcctgtggagctgaaccctgagcagagcaagctgttcaagagggtgacctttgacaatgaaagccacagcgcctgcacccagagcgccctggtgtctggccggcccccagagcccacccgggccagcagtggagatgtgcctgctgctgctgccagcgctgtggccgagcccgccagtgatgtgaacagaaggacctctgtgctcttctgcaagagcaagtctgtgagcccccccaagagcgccaagaacacagagacccagcccaccagcccccagctgggcaccaagaccttcctgtctgtggtgctgccccggctggagaccctgctgcagcccaggaagaggagccgcagcacctgtggggacagcgaggtggaggaggagagccctgggaagaggctggatgctggcctgaccaatggatttggaggagcccggtctgagcaggagcccggcggcggcctgggcaggaaggccaccccaagaagaagatgtgccagcgagagcagcatcagcagcagcaacagccccctgtgtgacagcagcttcaatgcccccaagtgtggccggggcaagccagccctggtgcggcggcacaccctggaggacagaagtgagctgatcagctgcattgaaaatggaaattatgccaaggccgccagaattgctgctgaggtgggccagagctccatgtggatcagcacagatgctgctgcctctgtgctggagcccctgaaggtggtgtgggccaagtgcagcggctaccccagctacccagccctgatcatcgaccccaagatgccccgggtgcccggccaccacaacggggtgaccatcccagccccacccctggatgtgctgaagatcggggagcacatgcagaccaagagtgatgagaagctgttcctggtgctcttctttgacaacaagaggtcctggcagtggctgcccaagagcaagatggtgcccctgggcattgatgagaccatcgacaagctgaagatgatggagggcaggaacagcagcatcaggaaggctgtgcgcatcgcctttgaccgggccatgaaccacctgagccgggtgcatggagagcccaccagtgacctgagtgacattgattag

SEQ ID NO: 323416 - DNA, 2355 bp, Artificial Sequence
  derived and/or modified sequence
atgcagagccggaagtgcctgaagcgggactgcgaccagcaggccgatggcctgtgtcgtttcggttccttcgactgctttcgctcctcacgtcgcagcagcagcacgacacgagcgtggacctctgcctctcggacacgaacatccgataggctgaatagaattgcaaatcaggttgcaatccagcgcaagaagcagtttgttgagcgggcccacagctactggctcctgaagaggctgtcccgtaacggcgctccactcctccgccggctgcagagctcattgcaatcacagagatcttctcagcaaagggagaacgatgaagagatgaaggccgcaaaggagaagctaaagtactggcaacggctacgccacgacctcgaacgcgctaggcttttgatcgaattacttagaaagagggaaaaactcaaacgggaacaagttaaggtagagcaggtggccatggaactgagactgacaccattaacagtgctgctcagaagcgtgctggaccagttacaggacaaggaccccgcacgtatattcgcccagccagtcagcctcaaggaggttcctgattacctggatcacatcaaacaccccatggattttgccaccatgcgtaaaagactcgaggcccagggttacaagaatttgcatgaattcgaggaggatttcgacctgatcatcgacaattgcatgaaatataatgctagggataccgttttttaccgtgccgccgtccggcttagggaccagggcggcgttgttctgcgccaggctagaagggaggttgacagcattggtctcgaagaggcttcagggatgcaccttcctgaacgacctgccgccgctccgaggcgccccttcagctgggaggacgtcgaccggctgctggaccccgcgaatcgggcccacttgggcttggaagagcagttgagggaacttctcgatatgctagatttgacctgcgctatgaagagctcaggctctagatctaaacgggccaaacttctgaaaaaagagattgcactcctgagaaacaaactgagccagcagcattcacagccacttccaacagggccgggactcgaggggtttgaggaggatggggcagcccttgggcctgaggctggtgaagagggagacaagagcccaccaaaactagaaccatccgacgctctccccttgccaagcaatagcgaaaccaattcagagccgcctaccctgaagccagttgagttgaacccagagcagtctaagctttttaaaagggttacattcgacaatgaaagtcactccgcatgtacacagagtgccctcgtgagtggacggcctccggaaccaactagagcatcttccggagatgtccccgccgctgctgcatcagcagtcgctgagcccgcctcggatgtgaacaggcggacctcagtgcttttttgcaaatcgaagtccgtgagtcctccgaaatcagctaagaatacggagacccagcccacttctccgcaacttgggaccaaaactttcttgtcagtagttcttcctagattggaaacactgttacagccaagaaagagatctcgatccacttgcggagacagtgaagttgaggaggagagccccgggaagaggctcgatgccggcttgaccaacggcttcggcggcgctcgctctgagcaagaacctggtggagggcttggtcgcaaggccacccctagacgacgctgtgccagcgagtcgagcatctcctcctccaactcaccactgtgtgacagttctttcaatgctccaaagtgtggacgggggaaacccgctctggtgcgccgccatacattggaggaccgttccgagttgataagctgtatagagaatggaaactacgccaaggctgctcggatcgctgccgaggtgggccagagctctatgtggatctcaacagacgctgccgcctccgtgcttgaaccactgaaggtggtttgggcaaagtgcagtggataccccagctaccccgcgttaattattgatccaaaaatgcctagagtcccaggccaccacaacggagtgaccatcccggctcccccactcgacgtcctcaagataggcgaacatatgcagaccaagtcggacgaaaaattatttctcgtactcttctttgataataagagatcttggcagtggttgcccaaaagcaaaatggtgcccctgggcattgacgaaacgatcgataagctgaaaatgatggaaggccgcaacagctctataaggaaagccgttagaatcgcttttgaccgcgccatgaatcatttaagccgcgtccacggagaaccaacctccgatctctccgacatagactag

SEQ ID NO: 323417 - DNA, 2355 bp, Artificial Sequence
  derived and/or modified sequence
atgcagtctcggaaatgcctaaaaagggattgcgatcagcaggctgatggtctttgtcggtttggcagcttcgattgttttcgttcttctagacgtagttcatctactacacgcgcttggacgtccgcttctagaactagaacttcggaccggctcaatagaatcgctaatcaggtggccatccagcgcaaaaagcaatttgtggaacgggcacactcctactggttactgaagcgactttctaggaacggcgctcctctcctccgaaggctccaatcttctctgcagtcgcagaggtcttcacagcagcgcgagaacgatgaagagatgaaggccgctaaagaaaaacttaagtactggcaaagactgcgtcatgatttggagagggcacggctgcttatcgagctgctgcgcaagagggagaaattaaagagagagcaggtgaaagtggagcaggtggcaatggagttgcgccttactcccctgactgtgctgctgcgatcggtgttagatcagctccaagacaaagaccctgccagaattttcgctcagccagtgagcttaaaagaggtgccagattacctcgatcacatcaagcatcccatggactttgcgacaatgaggaagcggttggaagctcagggatacaaaaacttacatgagtttgaggaagactttgaccttattattgataattgcatgaagtacaatgctcgggatactgtgttctaccgtgcagccgtcaggcttcgggaccaggggggagtggtccttcgccaagcacggagggaggtagactctattggactcgaggaagcctctgggatgcatctgccggagcggcctgcagccgctccaaggcggccattctcctgggaggacgttgatagactcctggacccagcaaaccgggcacacctcggtcttgaggagcagctgagggaacttttggatatgctggacttaacctgcgcaatgaaatctagcgggtctagaagcaagcgtgccaaactcttaaagaaggagatcgcactactgcggaacaagctgtcgcagcagcattcccagcctctgccaaccggacctggcttggaagggttcgaagaagatggcgcagcactgggtcccgaagctggagaagagggcgataagagtcctccaaaactggaaccttctgacgccctgcccctcccaagcaacagtgagacaaattcagagccaccgaccctaaaacctgttgaattaaaccccgagcagtccaaactcttcaagcgggtcacttttgacaatgaatctcattcagcttgcacgcagtccgcccttgtgagcggcagaccaccagagcctaccagagcctctagcggtgacgtgcccgctgccgctgcgagtgccgttgcggaaccagctagtgacgtgaacagacgtacgagtgtgctgttctgcaagagcaagtcggtgtctcctcctaagtctgctaaaaacaccgagacacagcccacttcgccccaactgggaacgaaaacattcttatccgtcgtactaccaagactggaaacgctgctgcagccaagaaaaagaagccgatctacatgcggtgacagtgaagtggaggaagagagccctggtaaacgcctggatgcgggacttaccaacggctttggtggagcacgtagcgaacaggaacccggagggggactgggcaggaaagccacccccagacgtcggtgtgcaagtgaatcttccatcagcagcagtaattctccattgtgtgattcatccttcaacgctccaaagtgcggaaggggaaaacccgcactggtaagaagacacacgctggaggatcgatccgaattgatctcatgtatcgaaaacggtaactatgcaaaagctgcaagaattgccgctgaagtgggccagagtagcatgtggatcagtacggatgccgctgcctctgtgctggagcccctgaaggtcgtgtgggccaagtgtagtggctatcccagctaccctgctctgatcatagaccctaaaatgccaagagtaccaggccatcataacggtgtgaccataccagcgccaccactggacgttctgaagattggagagcatatgcaaacaaagagcgacgagaagctgttccttgtgctgtttttcgacaataaacgcagttggcagtggttacccaagagcaaaatggtaccactcgggattgacgagactatcgacaagctgaagatgatggagggccgaaacagcagtatccgaaaggccgttaggattgctttcgacagagctatgaaccacttgtccagagtgcacggagagcctacaagcgatctcagcgacattgactag

SEQ ID NO: 323418 - DNA, 2355 bp, Artificial Sequence
  derived and/or modified sequence
atgcagagcagaaagtgcctgaagagagactgcgaccagcaggccgacggcctgtgcagattcggcagcttcgactgcttcagaagcagcagaagaagcagcagcaccaccagagcctggaccagcgccagcagaaccagaaccagcgacagactgaacagaatcgccaaccaggtggccatccagagaaagaagcagttcgtggagagagcccacagctactggctgctgaagagactgagcagaaacggcgcccccctgctgagaagactgcagagcagcctgcagagccagagaagcagccagcagagagagaacgacgaggagatgaaggccgccaaggagaagctgaagtactggcagagactgagacacgacctggagagagccagactgctgatcgagctgctgagaaagagagagaagctgaagagagagcaggtgaaggtggagcaggtggccatggagctgagactgacccccctgaccgtgctgctgagaagcgtgctggaccagctgcaggacaaggaccccgccagaatcttcgcccagcccgtgagcctgaaggaggtgcccgactacctggaccacatcaagcaccccatggacttcgccaccatgagaaagagactggaggcccagggctacaagaacctgcacgagttcgaggaggacttcgacctgatcatcgacaactgcatgaagtacaacgccagagacaccgtgttctacagagccgccgtgagactgagagaccagggcggcgtggtgctgagacaggccagaagagaggtggacagcatcggcctggaggaggccagcggcatgcacctgcccgagagacccgccgccgcccccagaagacccttcagctgggaggacgtggacagactgctggaccccgccaacagagcccacctgggcctggaggagcagctgagagagctgctggacatgctggacctgacctgcgccatgaagagcagcggcagcagaagcaagagagccaagctgctgaagaaggagatcgccctgctgagaaacaagctgagccagcagcacagccagcccctgcccaccggccccggcctggagggcttcgaggaggacggcgccgccctgggccccgaggccggcgaggagggcgacaagagcccccccaagctggagcccagcgacgccctgcccctgcccagcaacagcgagaccaacagcgagccccccaccctgaagcccgtggagctgaaccccgagcagagcaagctgttcaagagagtgaccttcgacaacgagagccacagcgcctgcacccagagcgccctggtgagcggcagaccccccgagcccaccagagccagcagcggcgacgtgcccgccgccgccgccagcgccgtggccgagcccgccagcgacgtgaacagaagaaccagcgtgctgttctgcaagagcaagagcgtgagcccccccaagagcgccaagaacaccgagacccagcccaccagcccccagctgggcaccaagaccttcctgagcgtggtgctgcccagactggagaccctgctgcagcccagaaagagaagcagaagcacctgcggcgacagcgaggtggaggaggagagccccggcaagagactggacgccggcctgaccaacggcttcggcggcgccagaagcgagcaggagcccggcggcggcctgggcagaaaggccacccccagaagaagatgcgccagcgagagcagcatcagcagcagcaacagccccctgtgcgacagcagcttcaacgcccccaagtgcggcagaggcaagcccgccctggtgagaagacacaccctggaggacagaagcgagctgatcagctgcatcgagaacggcaactacgccaaggccgccagaatcgccgccgaggtgggccagagcagcatgtggatcagcaccgacgccgccgccagcgtgctggagcccctgaaggtggtgtgggccaagtgcagcggctaccccagctaccccgccctgatcatcgaccccaagatgcccagagtgcccggccaccacaacggcgtgaccatccccgccccccccctggacgtgctgaagatcggcgagcacatgcagaccaagagcgacgagaagctgttcctggtgctgttcttcgacaacaagagaagctggcagtggctgcccaagagcaagatggtgcccctgggcatcgacgagaccatcgacaagctgaagatgatggagggcagaaacagcagcatcagaaaggccgtgagaatcgccttcgacagagccatgaaccacctgagcagagtgcacggcgagcccaccagcgacctgagcgacatcgactag

SEQ ID NO: 323419 - protein, 837 aa, Artificial Sequence
  derived and/or modified sequence
MSLSHLYRDGEGRIDDDDDERENFEITDWDLQNEFNPNRQRHWQTKEEATYGVWAERDSDDERPSFGGKRARDYSAPVNFISAGLKKGAAEEAELEDSDDEEKPVKQDDFPKDFGPRKLKTGGNFKPSQKGFAGGTKSFMDFGSWERHTKGIGQKLLQKMGYVPGRGLGKNAQGIINPIEAKQRKGKGAVGAYGSERTTQSMQDFPVVDSEEEAEEEFQKELSQWRKDPSGSKKKPKYSYKTVEELKAKGRISKKLTAPQKELSQVKVIDMTGREQKVYYSYSQISHKHNVPDDGLPLQSQQLPQSGKEAKAPGFALPELEHNLQLLIDLTEQEIIQNDRQLQYERDMVVNLFHELEKMTEVLDHEERVISNLSKVLEMVEECERRMQPDCSNPLTLDECARIFETLQDKYYEEYRMSDRVDLAVAIVYPLMKEYFKEWDPLKDCTYGTEIISKWKSLLENDQLLSHGGQDLSADAFHRLIWEVWMPFVRNIVTQWQPRNCDPMVDFLDSWVHIIPVWILDNILDQLIFPKLQKEVENWNPLTDTVPIHSWIHPWLPLMQARLEPLYSPIRSKLSSALQKWHPSDSSAKLILQPWKDVFTPGSWEAFMVKNIVPKLGMCLGELVINPHQQHMDAFYWVIDWEGMISVSSLVGLLEKHFFPKWLQVLCSWLSNSPNYEEITKWYLGWKSMFSDQVLAHPSVKDKFNEALDIMNRAVSSNVGAYMQPGARENIAYLTHTERRKDFQYEAMQERREAENMAQRGIGVAASSVPMNFKDLIETKAEEHNIVFMPVIGKRHEGKQLYTFGRIVIYIDRGVVFVQGEKTWVPTSLQSLIDMAK

SEQ ID NO: 323420 - protein, 88 aa, Artificial Sequence
  derived and/or modified sequence
MSLSHLYRDGEGRIDDDDDERENFEITDWDLQNEFNPNRQRHWQTKEEATYGVWAERDSDDERPSFGGKRARDYSAPVNFISAGLKKG

SEQ ID NO: 323421 - protein, 86 aa, Artificial Sequence
  derived and/or modified sequence
MSLSHLYRDGEGRIDDDDDERENFEITDWDLQNEFNPNRQRHWQTKEEATYGVWAERDSDDERPSFGGKRARDYSAPVNFISAGLK

SEQ ID NO: 323422 - protein, 42 aa, Artificial Sequence
  derived and/or modified sequence
MSLSHLYRDGEGRIDDDDDERENFEITDWDLQNEFNPNRQRH

SEQ ID NO: 323423 - protein, 522 aa, Artificial Sequence
  derived and/or modified sequence
MSLSHLYRDGEGRIDDDDDERENFEITDWDLQNEFNLFHELEKMTEVLDHEERVISNLSKVLEMVEECERRMQPDCSNPLTLDECARIFETLQDKYYEEYRMSDRVDLAVAIVYPLMKEYFKEWDPLKDCTYGTEIISKWKSLLENDQLLSHGGQDLSADAFHRLIWEVWMPFVRNIVTQWQPRNCDPMVDFLDSWVHIIPVWILDNILDQLIFPKLQKEVENWNPLTDTVPIHSWIHPWLPLMQARLEPLYSPIRSKLSSALQKWHPSDSSAKLILQPWKDVFTPGSWEAFMVKNIVPKLGMCLGELVINPHQQHMDAFYWVIDWEGMISVSSLVGLLEKHFFPKWLQVLCSWLSNSPNYEEITKWYLGWKSMFSDQVLAHPSVKDKFNEALDIMNRAVSSNVGAYMQPGARENIAYLTHTERRKDFQYEAMQERREAENMAQRGIGVAASSVPMNFKDLIETKAEEHNIVFMPVIGKRHEGKQLYTFGRIVIYIDRGVVFVQGEKTWVPTSLQSLIDMAK

SEQ ID NO: 323424 - protein, 191 aa, Artificial Sequence
  derived and/or modified sequence
  misc_feature (1)..(1): Xaa can be any naturally occurring amino acid
XGRGLGKNAQGIINPIEAKQRKGKGAVGAYGSERTTQSMQDFPVVDSEEEAEEWLFLAASDCILLVQEFQKELSQWRKDPSGSKKKPKYSYKTVEELKAKGRISKKLTAPQKELSQVKVIDMTGREQKVYYSYSQISHKHNVPDDGLPLQSQQLPQSGKEAKAPGFALPELEHNLQLLIDLTEQEIIQNDR

SEQ ID NO: 323425 - protein, 121 aa, Artificial Sequence
  derived and/or modified sequence
MSLSHLYRDGEGRIDDDDDERENFEITDWDLQNEFNPNRQRHWQTKEEATYGVWAERDSDDERPSFGGKRARDYSAPVNFISAGLKKGAAEEAELEDSDDEEKPVKQDDFPKDFGPRKLKT

SEQ ID NO: 323426 - DNA, 2514 bp, Artificial Sequence
  derived and/or modified sequence
atgagcctgagccacctgtacagagacggcgagggcagaatcgacgacgacgacgacgagagagagaacttcgagatcaccgactgggacctgcagaacgagttcaaccccaacagacagagacactggcagaccaaggaggaggccacctacggcgtgtgggccgagagagacagcgacgacgagagacccagcttcggcggcaagagagccagagactacagcgcccccgtgaacttcatcagcgccggcctgaagaagggcgccgccgaggaggccgagctggaggacagcgacgacgaggagaagcccgtgaagcaggacgacttccccaaggacttcggccccagaaagctgaagaccggcggcaacttcaagcccagccagaagggcttcgccggcggcaccaagagcttcatggacttcggcagctgggagagacacaccaagggcatcggccagaagctgctgcagaagatgggctacgtgcccggcagaggcctgggcaagaacgcccagggcatcatcaaccccatcgaggccaagcagagaaagggcaagggcgccgtgggcgcctacggcagcgagagaaccacccagagcatgcaggacttccccgtggtggacagcgaggaggaggccgaggaggagttccagaaggagctgagccagtggagaaaggaccccagcggcagcaagaagaagcccaagtacagctacaagaccgtggaggagctgaaggccaagggcagaatcagcaagaagctgaccgccccccagaaggagctgagccaggtgaaggtgatcgacatgaccggcagagagcagaaggtgtactacagctacagccagatcagccacaagcacaacgtgcccgacgacggcctgcccctgcagagccagcagctgccccagagcggcaaggaggccaaggcccccggcttcgccctgcccgagctggagcacaacctgcagctgctgatcgacctgaccgagcaggagatcatccagaacgacagacagctgcagtacgagagagacatggtggtgaacctgttccacgagctggagaagatgaccgaggtgctggaccacgaggagagagtgatcagcaacctgagcaaggtgctggagatggtggaggagtgcgagagaagaatgcagcccgactgcagcaaccccctgaccctggacgagtgcgccagaatcttcgagaccctgcaggacaagtactacgaggagtacagaatgagcgacagagtggacctggccgtggccatcgtgtaccccctgatgaaggagtacttcaaggagtgggaccccctgaaggactgcacctacggcaccgagatcatcagcaagtggaagagcctgctggagaacgaccagctgctgagccacggcggccaggacctgagcgccgacgccttccacagactgatctgggaggtgtggatgcccttcgtgagaaacatcgtgacccagtggcagcccagaaactgcgaccccatggtggacttcctggacagctgggtgcacatcatccccgtgtggatcctggacaacatcctggaccagctgatcttccccaagctgcagaaggaggtggagaactggaaccccctgaccgacaccgtgcccatccacagctggatccacccctggctgcccctgatgcaggccagactggagcccctgtacagccccatcagaagcaagctgagcagcgccctgcagaagtggcaccccagcgacagcagcgccaagctgatcctgcagccctggaaggacgtgttcacccccggcagctgggaggccttcatggtgaagaacatcgtgcccaagctgggcatgtgcctgggcgagctggtgatcaacccccaccagcagcacatggacgccttctactgggtgatcgactgggagggcatgatcagcgtgagcagcctggtgggcctgctggagaagcacttcttccccaagtggctgcaggtgctgtgcagctggctgagcaacagccccaactacgaggagatcaccaagtggtacctgggctggaagagcatgttcagcgaccaggtgctggcccaccccagcgtgaaggacaagttcaacgaggccctggacatcatgaacagagccgtgagcagcaacgtgggcgcctacatgcagcccggcgccagagagaacatcgcctacctgacccacaccgagagaagaaaggacttccagtacgaggccatgcaggagagaagagaggccgagaacatggcccagagaggcatcggcgtggccgccagcagcgtgcccatgaacttcaaggacctgatcgagaccaaggccgaggagcacaacatcgtgttcatgcccgtgatcggcaagagacacgagggcaagcagctgtacaccttcggcagaatcgtgatctacatcgacagaggcgtggtgttcgtgcagggcgagaagacctgggtgcccaccagcctgcagagcctgatcgacatggccaagtag

SEQ ID NO: 323427 - DNA, 267 bp, Artificial Sequence
  derived and/or modified sequence
atgagcctgagccacctgtacagagacggcgagggcagaatcgacgacgacgacgacgagagagagaacttcgagatcaccgactgggacctgcagaacgagttcaaccccaacagacagagacactggcagaccaaggaggaggccacctacggcgtgtgggccgagagagacagcgacgacgagagacccagcttcggcggcaagagagccagagactacagcgcccccgtgaacttcatcagcgccggcctgaagaagggctag

SEQ ID NO: 323428 - DNA, 261 bp, Artificial Sequence
  derived and/or modified sequence
atgagcctgagccacctgtacagagacggcgagggcagaatcgacgacgacgacgacgagagagagaacttcgagatcaccgactgggacctgcagaacgagttcaaccccaacagacagagacactggcagaccaaggaggaggccacctacggcgtgtgggccgagagagacagcgacgacgagagacccagcttcggcggcaagagagccagagactacagcgcccccgtgaacttcatcagcgccggcctgaagtag

SEQ ID NO: 323429 - DNA, 129 bp, Artificial Sequence
  derived and/or modified sequence
atgagcctgagccacctgtacagagacggcgagggcagaatcgacgacgacgacgacgagagagagaacttcgagatcaccgactgggacctgcagaacgagttcaaccccaacagacagagacactag

SEQ ID NO: 323430 - DNA, 1569 bp, Artificial Sequence
  derived and/or modified sequence
atgagcctgagccacctgtacagagacggcgagggcagaatcgacgacgacgacgacgagagagagaacttcgagatcaccgactgggacctgcagaacgagttcaacctgttccacgagctggagaagatgaccgaggtgctggaccacgaggagagagtgatcagcaacctgagcaaggtgctggagatggtggaggagtgcgagagaagaatgcagcccgactgcagcaaccccctgaccctggacgagtgcgccagaatcttcgagaccctgcaggacaagtactacgaggagtacagaatgagcgacagagtggacctggccgtggccatcgtgtaccccctgatgaaggagtacttcaaggagtgggaccccctgaaggactgcacctacggcaccgagatcatcagcaagtggaagagcctgctggagaacgaccagctgctgagccacggcggccaggacctgagcgccgacgccttccacagactgatctgggaggtgtggatgcccttcgtgagaaacatcgtgacccagtggcagcccagaaactgcgaccccatggtggacttcctggacagctgggtgcacatcatccccgtgtggatcctggacaacatcctggaccagctgatcttccccaagctgcagaaggaggtggagaactggaaccccctgaccgacaccgtgcccatccacagctggatccacccctggctgcccctgatgcaggccagactggagcccctgtacagccccatcagaagcaagctgagcagcgccctgcagaagtggcaccccagcgacagcagcgccaagctgatcctgcagccctggaaggacgtgttcacccccggcagctgggaggccttcatggtgaagaacatcgtgcccaagctgggcatgtgcctgggcgagctggtgatcaacccccaccagcagcacatggacgccttctactgggtgatcgactgggagggcatgatcagcgtgagcagcctggtgggcctgctggagaagcacttcttccccaagtggctgcaggtgctgtgcagctggctgagcaacagccccaactacgaggagatcaccaagtggtacctgggctggaagagcatgttcagcgaccaggtgctggcccaccccagcgtgaaggacaagttcaacgaggccctggacatcatgaacagagccgtgagcagcaacgtgggcgcctacatgcagcccggcgccagagagaacatcgcctacctgacccacaccgagagaagaaaggacttccagtacgaggccatgcaggagagaagagaggccgagaacatggcccagagaggcatcggcgtggccgccagcagcgtgcccatgaacttcaaggacctgatcgagaccaaggccgaggagcacaacatcgtgttcatgcccgtgatcggcaagagacacgagggcaagcagctgtacaccttcggcagaatcgtgatctacatcgacagaggcgtggtgttcgtgcagggcgagaagacctgggtgcccaccagcctgcagagcctgatcgacatggccaagtag

SEQ ID NO: 323431 - DNA, 576 bp, Artificial Sequence
  derived and/or modified sequence
tgaggcagaggcctgggcaagaacgcccagggcatcatcaaccccatcgaggccaagcagagaaagggcaagggcgccgtgggcgcctacggcagcgagagaaccacccagagcatgcaggacttccccgtggtggacagcgaggaggaggccgaggagtggctgttcctggccgccagcgactgcatcctgctggtgcaggagttccagaaggagctgagccagtggagaaaggaccccagcggcagcaagaagaagcccaagtacagctacaagaccgtggaggagctgaaggccaagggcagaatcagcaagaagctgaccgccccccagaaggagctgagccaggtgaaggtgatcgacatgaccggcagagagcagaaggtgtactacagctacagccagatcagccacaagcacaacgtgcccgacgacggcctgcccctgcagagccagcagctgccccagagcggcaaggaggccaaggcccccggcttcgccctgcccgagctggagcacaacctgcagctgctgatcgacctgaccgagcaggagatcatccagaacgacagatag

SEQ ID NO: 323432 - DNA, 366 bp, Artificial Sequence
  derived and/or modified sequence
atgagcctgagccacctgtacagagacggcgagggcagaatcgacgacgacgacgacgagagagagaacttcgagatcaccgactgggacctgcagaacgagttcaaccccaacagacagagacactggcagaccaaggaggaggccacctacggcgtgtgggccgagagagacagcgacgacgagagacccagcttcggcggcaagagagccagagactacagcgcccccgtgaacttcatcagcgccggcctgaagaagggcgccgccgaggaggccgagctggaggacagcgacgacgaggagaagcccgtgaagcaggacgacttccccaaggacttcggccccagaaagctgaagacctag

SEQ ID NO: 323433 - DNA, 2514 bp, Artificial Sequence
  derived and/or modified sequence
atgtccctctctcacctgtatcgggacggagaaggccggattgacgacgacgatgatgagcgggagaactttgagataaccgattgggacttgcaaaacgaatttaaccccaacagacagcgacattggcagactaaggaagaggcaacctacggcgtgtgggctgagcgtgacagcgatgacgagagaccttctttcggcggtaagcgtgctcgcgattacagtgccccagtcaatttcataagtgcgggactgaaaaaaggggccgcggaggaggccgaactcgaggatagcgacgatgaggagaagccagtgaagcaggatgacttccccaaagattttgggccgcgcaagctgaagactggcgggaattttaagcccagccagaaaggcttcgctgggggcacaaaatcatttatggactttggctcatgggagcgccataccaaagggattggacagaagctcttgcagaagatggggtacgtgcctggtcgcggcctggggaaaaacgcacagggcatcatcaatccaatcgaagcaaaacagcggaagggcaaaggggccgttggcgcctacgggtccgaaagaactactcagagcatgcaagactttccagtggtcgatagcgaagaagaggccgaggaggagtttcaaaaagaactgagccaatggcgtaaggacccatctggttctaagaaaaagccaaaatactcatacaagacggtggaggaactcaaggctaaggggcggatctctaagaaacttactgcaccccagaaagagctgtcgcaggtgaaggtgatcgacatgaccggacgggagcagaaagtctattactcatatagtcagatatcccataaacacaatgtgccggacgacggacttccactgcagtcacaacaattgccacaaagtggaaaggaagctaaggccccgggctttgctctgccagagctggaacataacttgcaactgctcattgatctgacagagcaagagatcattcagaatgacagacagctgcaatacgagcgcgacatggtcgtcaacctatttcacgagcttgagaaaatgactgaggtcctagaccatgaggaacgcgtcatatcaaacctctccaaggtgctggagatggttgaggagtgtgagcgcaggatgcagcctgactgtagcaaccccctgacactcgatgaatgcgcacgaattttcgagaccttacaggacaagtattatgaggagtataggatgtctgaccgagtcgatctggctgtggctatcgtgtatccgctgatgaaagaatatttcaaggaatgggacccactgaaagattgcacctatggtaccgaaatcattagcaaatggaagagcctcctggagaacgaccagttgctgagccacggaggccaggacctgtctgcagacgcatttcaccgcttgatttgggaagtctggatgcctttcgtgcgtaatatcgtgacccagtggcagcctcgtaactgcgatccaatggtcgacttcctggactcctgggtccatataatccctgtgtggattctcgataatatactcgaccagttgatcttcccgaaattgcagaaagaagttgagaactggaacccactgacagacacagtgcccatacactcctggatccacccttggttgcctcttatgcaagcccgacttgagcccctgtactctccaatccgttcgaaactgtccagcgcgctacaaaagtggcacccttcagatagctctgcaaaactgatcctacagccatggaaggatgtgtttacacccggatcgtgggaggcctttatggtgaagaacatcgtacccaaactgggcatgtgcctgggggagctggtgattaatccacaccagcagcacatggacgccttctattgggtgatcgattgggaggggatgatctcagtttcctccctggtggggttgttagaaaagcactttttccccaagtggctgcaagtgctgtgttcttggctgagtaattctcctaactatgaagagattaccaagtggtacctgggttggaaatccatgttctccgatcaagtgttggcacaccctagcgttaaagataagtttaacgaggcactcgatatcatgaaccgggccgtctcttcaaatgtgggagcatacatgcagccgggtgcccgcgaaaacattgcctacttaacccacacggagaggaggaaggactttcagtatgaagcaatgcaggaaagaagggaggctgagaacatggcccagaggggtattggggtggccgcctcctctgtgcccatgaactttaaggatctaatagagaccaaggctgaggagcataatatcgtgtttatgcccgtaataggcaagcggcacgagggcaagcaactgtatacctttgggaggattgtcatctacattgaccgcggcgtggtatttgtacagggagaaaagacttgggtccccacttctttgcaatctcttatcgacatggctaaatag

SEQ ID NO: 323434 - DNA, 2514 bp, Artificial Sequence
  derived and/or modified sequence
atgtcactgtcccatctctatagagatggagaggggaggatcgacgatgatgatgacgaacgcgagaactttgagatcaccgactgggacctacaaaatgagttcaatccaaatagacaaaggcactggcagaccaaggaggaggcgacttacggagtttgggcggagcgcgacagtgatgacgagcggccctccttcggtggaaaaagagccagggactattctgcacccgtcaactttatttccgctggactgaaaaaaggcgctgcagaggaggcagagctcgaggactcggatgacgaagagaaaccagtgaagcaggacgatttccctaaagacttcgggcctagaaaactgaagaccgggggcaatttcaagccctcccagaagggtttcgcaggaggcaccaagtcatttatggattttgggtcatgggaacgccacacaaagggtatcggacagaaacttcttcagaaaatggggtacgtcccaggccgggggctggggaaaaacgcacaagggatcataaacccaattgaggccaaacaacgaaagggtaaaggggctgtcggagcctacggcagcgaacgcacgacccagtcgatgcaggattttcccgtggtggatagcgaagaggaggccgaggaagagttccagaaagagctgagccagtggcgtaaggacccatctggaagtaaaaagaagcctaagtatagttacaaaacagtggaggaactgaaggctaaaggtcggatttctaaaaagcttactgctcctcagaaggaactctctcaggtaaaggtcatcgatatgaccgggagggaacagaaggtgtattactcatatagtcaaattagtcacaagcataatgtgcctgatgatggactgccacttcagagccagcaactgccccagtctgggaaggaagccaaagcacctgggttcgccttaccagagctcgaacacaacctccagctgctgattgaccttacagagcaagagattatccaaaatgacaggcagcttcagtatgagagagacatggtagttaacttattccacgaattggagaaaatgacagaggtcctggaccatgaggagcgcgtcatttctaatctttccaaagtgctggagatggttgaagaatgcgagcgccgcatgcagccggactgctccaatcccctgactttagacgaatgtgcccgcatttttgagacactgcaggacaagtattacgaggagtacaggatgtccgaccgggttgacctcgctgtggcaatcgtctacccgctgatgaaggagtactttaaagagtgggacccgctgaaagactgcacttatggcacagaaatcatttcaaagtggaagtccctgctggagaacgaccagctcctctcacacggcggccaggatctgagtgcggatgcttttcacagactgatctgggaggtgtggatgccattcgtgcgaaatattgtcacacagtggcaacctcgcaactgcgatccaatggtcgattttttagatagctgggtacatatcatacccgtgtggatcttggacaacatcctggatcagctgatcttcccaaagctccagaaagaagtggaaaactggaatccactaaccgacacagtaccgatacattcttggatccatccttggctccccctgatgcaggccagactcgaacccctgtactcccctatcagaagcaagctgagttctgccctgcagaaatggcatccgagcgactcgtctgccaagttgatactacagccttggaaggacgtcttcacaccaggtagctgggaggcttttatggtgaagaacattgtccctaagctgggcatgtgtctcggtgagctcgtcatcaaccctcatcagcaacatatggatgccttttactgggtgatcgactgggaagggatgattagcgtaagttcattagtgggcctgttggagaaacactttttcccaaagtggctccaggtgctgtgttcctggctgtcaaactcccccaactacgaagagattactaagtggtacctgggatggaaatcgatgttctccgaccaagttcttgcacatccctcagtaaaagacaaattcaacgaggctcttgacattatgaacagagctgtcagttcgaatgttggagcatatatgcagccaggtgcacgtgagaacatagcctacttgacacacacggaacgtcgcaaagacttccagtacgaggctatgcaagagagacgagaggcagagaacatggcccagcggggaattggcgtggctgcgtcatccgtgcccatgaattttaaggatctgattgaaacaaaggcggaggagcataacattgtcttcatgcccgtgattggcaagaggcacgaggggaagcagctgtatactttcgggcgcattgttatctacatcgacagaggggttgtgttcgtgcaaggtgaaaaaacttgggtgccgacaagtttacaatcattgattgacatggctaagtag

SEQ ID NO: 323435 - DNA, 2514 bp, Artificial Sequence
  derived and/or modified sequence
atgtcactctcacacctgtaccgggacggagaaggcagaattgatgatgacgacgacgagcgggaaaatttcgagatcaccgattgggacctccagaacgaattcaaccctaaccgccagcggcactggcagacgaaagaagaggcaacctacggcgtctgggcagaaagggatagcgatgacgagaggcccagcttcggcgggaagagggcaagggattatagcgcgccagtgaactttatctcggctggactaaaaaaaggagcagccgaggaggccgaactagaggactctgatgacgaagaaaaacctgtaaagcaggatgatttccctaaagactttggaccacgcaagttaaaaaccggtggaaattttaaaccgtctcagaagggcttcgctggggggacgaaaagtttcatggactttggtagttgggaaaggcatactaagggcattgggcagaagctgctacaaaagatggggtacgtgcctggcaggggattgggcaagaacgcacagggaatcattaatccgatcgaagctaagcagagaaaaggtaagggcgcagtcggcgcttatggctcagaaaggaccacccagtcaatgcaggattttccagttgtggattcagaggaggaggccgaggaagaatttcaaaaggagctctcacagtggcgaaaagatcccagcggtagcaaaaaaaagcctaaatacagctacaaaactgtcgaagaactgaaggcaaaaggccgaatttcaaaaaagttgacggcaccgcagaaagaactgtcacaggtgaaagtaatcgacatgacgggaagggaacagaaggtctattactcttactctcagatcagccataagcacaacgtccctgacgacggtctgccacttcaaagccagcagctgccacagtcggggaaggaggccaaggcgcctggttttgccctccccgaattagagcacaacctacagttgcttattgaccttaccgagcaggagattatccagaatgaccgacagctgcaatatgaacgcgacatggtagtgaacctgtttcacgagttagagaagatgaccgaagtcctggatcacgaagaaagggtgatctctaatctcagcaaggtgcttgagatggtcgaagaatgcgaacggcgtatgcaacccgactgctctaatcctctgactcttgacgaatgcgcaaggattttcgagacactgcaggacaagtattacgaggagtaccgaatgtcagaccgagtggatttggccgtggccatcgtgtaccccctgatgaaagaatacttcaaagagtgggatccgctcaaggattgcacctatggaaccgagatcattagtaagtggaaatccctactggaaaatgaccagctgttgtcacatgggggtcaggacctgtctgcggatgcctttcaccggctaatttgggaggtctggatgccattcgtcaggaacatcgtaacccagtggcaacccagaaattgcgaccctatggtggacttccttgactcatgggtccacattatccccgtctggattctcgacaatatactggatcagctgatttttcctaaactacagaaggaggtggaaaattggaacccgctgaccgacacggtgcccatccactcctggatccatccttggctgccactgatgcaggctagacttgaacctctctactcacctatccgctcaaaactgtccagtgctctgcagaagtggcatcctagcgatagttccgcgaagctcatactgcagccctggaaagatgtgtttacccctggatcatgggaggcatttatggtgaagaacattgtgcccaagcttggtatgtgcctgggtgaactagtgatcaatccccaccagcagcacatggacgccttctactgggtgatcgactgggaggggatgatatccgtgtcttcattagtgggcttactggagaagcatttttttccgaagtggctgcaggtgctgtgcagttggctgtccaacagccccaattacgaggagattacaaaatggtacctggggtggaagtccatgttctctgaccaggtactcgcacatcctagcgtgaaggacaagtttaatgaggctctggacatcatgaaccgagctgtcagttcaaacgtgggcgcgtatatgcagcccggagccagggagaacattgcctacttaacacatacagagcgacgtaaagattttcagtatgaagctatgcaggagcgacgcgaggcggaaaatatggcacagaggggaattggcgtggctgcttcctcagtcccaatgaattttaaggacctgatcgagaccaaagccgaagagcacaatatcgtgtttatgcccgtcatcggcaaacgccacgaaggcaaacagctttacaccttcggcaggattgtaatctacatagatcgcggtgtcgtctttgtacaaggagaaaaaacctgggtgccaacaagtttacagagcctcatcgatatggccaagtag

SEQ ID NO: 323436 - DNA, 2514 bp, Artificial Sequence
  derived and/or modified sequence
atgtctctgtcccatctctaccgtgacggtgagggccgcattgatgatgacgacgacgagcgagagaattttgagattacagattgggacttacagaatgagttcaatcctaaccgacagaggcattggcagacaaaggaggaggccacctacggcgtgtgggcagagcgagacagcgacgacgagaggcccagctttggaggcaagcgagcccgcgattacagcgctcccgtgaattttatttctgccgggctcaagaaaggagctgccgaggaggccgagttggaggactcagatgacgaagagaagcctgtgaaacaggacgatttccctaaggacttcgggccccggaaactgaaaacaggagggaactttaaaccaagtcagaagggcttcgctggcggaaccaaaagctttatggacttcgggagttgggaacgacacacgaagggcatcggccagaagctgttacaaaagatgggttacgtcccaggcaggggtcttggcaagaacgcccaagggatcatcaaccctatcgaggccaaacagaggaagggaaagggagccgtgggcgcgtacgggtctgagcgcacgacacagtccatgcaggactttccagtggtagatagcgaggaggaggctgaggaagaattccagaaagaactgtcacagtggagaaaagatccgtccgggtccaagaaaaagccgaagtactcatacaaaacagtcgaggaactaaaggccaaggggaggatttctaagaagcttacagccccccaaaaggagctgagtcaggtaaaggtaatcgacatgacagggcgcgaacagaaggtgtactacagttacagtcagattagccacaagcacaatgtcccagatgacggcctccctttgcaatcccaacaactccctcagtccgggaaagaggcaaaggcccccggctttgctctgccggagttggagcataatttgcaactcctcatcgatttaactgagcaggaaatcatccagaatgaccggcagctgcaatacgaaagggatatggtggtgaatttgtttcatgagctggagaagatgacagaggtgctagatcacgaggaacgggtcatatctaatctgagcaaagtgctggagatggtggaagaatgtgaacgcaggatgcagcccgattgctctaatcccctaactcttgacgaatgtgcacggatcttcgaaactctgcaggacaaatattatgaggagtacaggatgagtgaccgggtcgatctcgccgttgccattgtataccctctgatgaaagaatatttcaaagagtgggaccctctgaaagattgtacctacggcaccgaaatcatttccaagtggaaaagcctcctggagaatgatcagctgttgtcacacggggggcaagatttaagtgccgacgcgttccaccgtctgatatgggaagtgtggatgccgttcgtgagaaacatagtcactcagtggcagccccgcaactgcgacccaatggtggacttcctggatagctgggtgcacattatccctgtgtggatcttggataatatcctggatcagctcattttccccaaattgcaaaaggaggtggagaactggaatccactgacagatactgtcccaatacattcttggattcatccctggctacctcttatgcaggcgcgactggaacctctttattctcccatccgtagcaaactgtcctccgccctacagaagtggcacccatcggattcctccgcgaagctcatcctacagccttggaaagacgttttcacgcccggctcatgggaggcctttatggtaaaaaatatcgttcccaagcttggtatgtgcctaggagaactggtcattaacccacatcagcaacacatggacgccttttactgggtgatagactgggagggtatgatcagtgtttcgtccctggtggggctgctggaaaagcatttttttccaaagtggttacaggtgctgtgctcatggctttctaacagtccaaactacgaggagattactaagtggtatcttgggtggaaaagtatgttcagcgaccaggttctggcccacccatcagtgaaggataagtttaatgaggcacttgacattatgaaccgagcagtgagttccaatgttggtgcctacatgcagcctggggctcgcgagaacattgcatatttgacccatacagagcgaaggaaagactttcagtatgaggctatgcaggagcgtcgagaggcagaaaacatggcacagaggggaattggcgtggccgcctcctcagttcctatgaattttaaagacttgatcgagaccaaagcggaggagcacaatattgtgttcatgcccgtgattggcaagcgccatgaggggaagcagttgtacacgttcggccggatcgtcatatacatcgatagaggggtggtcttcgtgcagggcgaaaagacatgggtccccactagtctgcagagtctgatcgatatggccaagtag

SEQ ID NO: 323437 - DNA, 267 bp, Artificial Sequence
  derived and/or modified sequence
atgtctctcagccacctgtatagagacggtgaaggtaggatagatgatgacgatgatgagcgggaaaatttcgaaattactgattgggacctgcagaacgaattcaacccaaatcgacagcggcactggcaaactaaggaggaggctacgtacggggtttgggctgagagagactccgacgacgaaagaccaagctttggagggaagagggctcgggactacagcgctccagtaaactttatttccgctgggctgaaaaaggggtag

SEQ ID NO: 323438 - DNA, 261 bp, Artificial Sequence
  derived and/or modified sequence
atgtcactcagccacctctacagagacggtgagggcagaatagacgatgacgatgatgagcgagaaaatttcgagatcacagactgggatctgcagaacgagttcaaccctaataggcagaggcactggcaaaccaaggaggaagctacttatggagtatgggccgaacgggattctgatgacgaacggccaagcttcgggggcaaacgggcaagagattacagcgccccggtcaactttatctctgctggcctgaagtag

SEQ ID NO: 323439 - DNA, 129 bp, Artificial Sequence
  derived and/or modified sequence
atgagcctgtcccatctgtatcgcgatggggaaggaaggattgatgacgacgatgacgaaagggaaaatttcgaaatcaccgactgggacctgcaaaatgagttcaatcctaaccgccagaggcattag

SEQ ID NO: 323440 - DNA, 1569 bp, Artificial Sequence
  derived and/or modified sequence
atgtctctgtcccatctttaccgtgacggggaaggcaggattgacgatgatgatgacgaaagagagaacttcgagattaccgattgggatctccaaaatgaattcaacctcttccacgagctggaaaagatgacggaagtcttggaccatgaagagagggtgatatctaacctttctaaagttctagagatggtggaagaatgtgaacggcggatgcagccagactgttccaatccactcaccctggatgaatgcgctagaatcttcgaaactctgcaggacaagtactacgaagaataccgcatgtccgacagagttgacctggctgtcgcgatagtgtaccccctgatgaaagagtattttaaagagtgggacccactgaaggattgtacttacggtacagagataatctctaaatggaagagcctcctggaaaatgatcaactgctgagtcatggcggtcaggacctatcagctgatgcattccacaggctaatttgggaggtttggatgccttttgtgaggaatatcgtgacacagtggcagcctaggaattgtgacccaatggttgactttctcgacagttgggtccacattatacctgtgtggattctcgacaacatactggaccagttgattttccccaaactgcaaaaggaggtggaaaactggaatccattgaccgacacagtgcctatccattcctggatccacccctggctgccactgatgcaggcccgcctggagccactgtactctcccatccgcagcaagctgtccagcgccctgcaaaaatggcaccctagcgactcatctgccaagctgattctgcagccatggaaagacgtgttcacccccggatcatgggaagcctttatggtcaagaacatcgtcccaaaattgggcatgtgcctaggggaactggtaattaaccctcatcaacagcatatggatgctttctactgggtcatcgattgggaaggaatgatcagtgtatcctccctggtaggccttctggagaaacactttttcccaaagtggctccaggtactttgttcctggctgtccaattccccgaactatgaggagatcacaaaatggtatctggggtggaagtctatgttctccgaccaggtgctcgcgcacccatccgtcaaggataagtttaacgaggccttagatatcatgaacagggcagtaagctctaacgtgggcgcctacatgcagccaggtgctagggagaacatcgcatatcttactcacacagagcggagaaaggattttcagtatgaggctatgcaggagcggcgggaggccgagaatatggcccaacggggaataggtgtcgctgcctccagtgtcccgatgaacttcaaggacctcatcgaaacgaaggctgaggagcacaacattgtgttcatgccagttattggtaaacgccacgagggcaaacaactgtacacttttggccggatagtcatctatattgatcgcggagtagtcttcgtacagggggaaaagacatgggtgcctaccagtcttcaaagcttgattgatatggctaagtag

SEQ ID NO: 323441 - DNA, 576 bp, Artificial Sequence
  derived and/or modified sequence
taagggcgaggtctggggaaaaatgcgcagggcattattaatcccatcgaggcaaagcagcgaaagggcaagggggctgtaggagcgtacgggagcgagcgaacaacacagagtatgcaggactttccagtggtcgacagcgaggaggaggccgaggagtggttgtttttagccgcatctgattgcatactgctggtacaagagtttcaaaaggagctgtcccaatggagaaaagatccttctggttccaagaagaaaccaaagtactcgtacaagactgtcgaggagctcaaggctaagggccgcatttcaaaaaagcttacagcgccacagaaagagttgtctcaggttaaggtcatcgacatgacaggacgcgaacagaaggtgtattattcctactctcaaatcagtcataagcacaacgtgcccgatgacgggctgccactgcaatctcagcagctgccccagtccggaaaggaagcaaaggctcccggatttgctctcccagagctcgaacacaaccttcagctcctcatcgacctgaccgaacaggagatcatccaaaacgacagatag

SEQ ID NO: 323442 - DNA, 366 bp, Artificial Sequence
  derived and/or modified sequence
atgtctctcagtcatctgtaccgggatggggaaggccgaattgacgacgatgacgacgagagggagaacttcgagatcacagactgggacctgcaaaacgaatttaaccctaacaggcagcggcattggcagacaaaagaggaggcaacatacggagtgtgggcagaacgcgactccgacgacgagcgtcctagcttcgggggtaagagggcccgcgattacagtgcccccgtgaacttcatcagcgccggactgaagaagggagccgctgaggaagctgagctggaggacagtgatgatgaagagaagccagtgaaacaggacgacttccctaaggactttgggccccgtaagctaaagacctag

SEQ ID NO: 323443 - DNA, 2514 bp, Artificial Sequence
  derived and/or modified sequence
atgagcctgagccacctgtacagagatggagagggcagaattgatgatgatgatgatgagcgggagaactttgagatcacagactgggacctgcagaatgagttcaaccccaaccggcagaggcactggcagaccaaggaggaggccacctatggagtgtgggccgagcgggacagtgatgatgagcggcccagctttggaggcaagagggcccgggactacagcgcccctgtgaacttcatctctgctggcctgaagaagggagctgctgaggaggccgagctggaggacagtgatgatgaggagaagcctgtgaagcaggatgacttccccaaggactttggccccaggaagctgaagacaggaggcaacttcaagcccagccagaagggctttgctgggggcaccaagagcttcatggactttggctcctgggagcggcacaccaagggcatcggccagaagctgctgcagaagatgggctacgtgcccggccggggcctgggcaagaatgcccagggcatcatcaaccccatcgaggccaagcagaggaaaggaaaaggagctgtgggcgcctacggcagcgagaggaccacccagagcatgcaggacttccctgtggtggacagcgaggaggaggccgaggaggagttccagaaggagctgagccagtggaggaaggaccccagcggcagcaagaagaagcccaagtacagctacaagacagtggaggagctgaaggccaagggccgcatcagcaagaagctgacagccccccagaaggagctgagccaggtgaaggtgattgacatgacaggccgggagcagaaggtgtactacagctacagccagatcagccacaagcacaacgtgcctgatgatggcctgcccctgcagagccagcagctgccccagagcggcaaggaggccaaggcccctggctttgccctgcctgagctggagcacaacctgcagctgctgattgacctgacagagcaggagatcatccagaatgaccggcagctgcagtatgaaagagacatggtggtgaacctcttccacgagctggagaagatgacagaggtgctggaccacgaggagagggtcatcagcaacctgagcaaggtgctggagatggtggaggagtgtgaaagaaggatgcagcctgactgcagcaaccccctgaccctggatgaatgtgcccgcatctttgagaccctgcaggacaagtactatgaggagtacaggatgtctgacagagtggacctggccgtggccatcgtgtaccccctgatgaaggagtacttcaaggagtgggaccccctgaaggactgcacctatggaacagagatcatcagcaagtggaagagcctgctggagaatgaccagctgctgagccatggaggccaggacctgtctgcagatgccttccacaggctcatctgggaggtgtggatgccctttgtgaggaacatcgtgacccagtggcagcccaggaactgtgaccccatggtggacttcctggacagctgggtgcacatcatccctgtgtggatcctggacaacatcctggaccagctgatcttccccaagctgcagaaggaggtggagaactggaaccccctgacagacacagtgcccatccacagctggatccacccctggctgcccctgatgcaggcccggctggagcccctgtacagccccatccgcagcaagctgagcagcgccctgcagaagtggcaccccagcgacagcagcgccaagctgatcctgcagccctggaaggatgtgttcaccccaggctcctgggaggccttcatggtgaagaacatcgtgcccaagctgggcatgtgcctgggggagctggtgatcaacccccaccagcagcacatggatgccttctactgggtgattgactgggagggcatgatctctgtgagcagcctggtgggcctgctggagaagcacttcttccccaagtggctgcaggtgctgtgctcctggctgagcaacagccccaactatgaggagatcaccaagtggtacctgggctggaagtccatgttcagtgaccaggtgctggcccaccccagcgtgaaggacaagttcaatgaggccctggacatcatgaacagagctgtgagcagcaatgtgggcgcctacatgcagcccggggccagagaaaatattgcctacctgacccacacagaaagaaggaaggacttccagtatgaggccatgcaggagcggcgggaggccgagaacatggcccagaggggcatcggcgtggccgccagctctgtgcccatgaacttcaaggacctgattgagaccaaggccgaggagcacaacatcgtgttcatgcctgtgattggcaagagacatgagggcaagcagctgtacaccttcggcagaattgtcatctacatcgaccggggcgtggtgtttgtgcagggcgagaagacctgggtgcccaccagcctgcagagcctgattgacatggccaagtag

SEQ ID NO: 323444 - DNA, 267 bp, Artificial Sequence
  derived and/or modified sequence
atgagcctgagccacctgtacagagatggagagggcagaattgatgatgatgatgatgagcgggagaactttgagatcacagactgggacctgcagaatgagttcaaccccaaccggcagaggcactggcagaccaaggaggaggccacctatggagtgtgggccgagcgggacagtgatgatgagcggcccagctttggaggcaagagggcccgggactacagcgcccctgtgaacttcatctctgctggcctgaagaagggctag

SEQ ID NO: 323445 - DNA, 261 bp, Artificial Sequence
  derived and/or modified sequence
atgagcctgagccacctgtacagagatggagagggcagaattgatgatgatgatgatgagcgggagaactttgagatcacagactgggacctgcagaatgagttcaaccccaaccggcagaggcactggcagaccaaggaggaggccacctatggagtgtgggccgagcgggacagtgatgatgagcggcccagctttggaggcaagagggcccgggactacagcgcccctgtgaacttcatctctgctggcctgaagtag

SEQ ID NO: 323446 - DNA, 129 bp, Artificial Sequence
  derived and/or modified sequence
atgagcctgagccacctgtacagagatggagagggcagaattgatgatgatgatgatgagcgggagaactttgagatcacagactgggacctgcagaatgagttcaaccccaaccggcagaggcactag

SEQ ID NO: 323447 - DNA, 1569 bp, Artificial Sequence
  derived and/or modified sequence
atgagcctgagccacctgtacagagatggagagggcagaattgatgatgatgatgatgagcgggagaactttgagatcacagactgggacctgcagaatgagttcaacctcttccacgagctggagaagatgacagaggtgctggaccacgaggagagggtcatcagcaacctgagcaaggtgctggagatggtggaggagtgtgagaggaggatgcagcctgactgcagcaaccccctgaccctggatgaatgtgcccgcatctttgagaccctgcaggacaagtactatgaggagtacaggatgtctgacagagtggacctggccgtggccatcgtgtaccccctgatgaaggagtacttcaaggagtgggaccccctgaaggactgcacctacggcacagagatcatcagcaagtggaagagcctgctggagaatgaccagctgctgagccacggcggccaggacctgtctgcagatgccttccacaggctcatctgggaggtgtggatgccctttgtgagaaatattgtgacccagtggcagcccaggaactgtgaccccatggtggacttcctggacagctgggtgcacatcatccctgtgtggatcctggacaacatcctggaccagctgatcttccccaagctgcagaaggaggtggagaactggaaccccctgacagacacagtgcccatccacagctggatccacccctggctgcccctgatgcaggcccggctggagcccctgtacagccccatccgcagcaagctgagcagcgccctgcagaagtggcaccccagcgacagcagcgccaagctgatcctgcagccctggaaggatgtgttcaccccaggctcctgggaggccttcatggtgaagaacatcgtgcccaagctgggcatgtgcctgggggagctggtgatcaacccccaccagcagcacatggatgccttctactgggtgattgactgggagggcatgatctctgtgagcagcctggtgggcctgctggagaagcacttcttccccaagtggctgcaggtgctgtgctcctggctgagcaacagccccaactatgaggagatcaccaagtggtacctgggctggaagtccatgttcagtgaccaggtgctggcccaccccagcgtgaaggacaagttcaatgaggccctggacatcatgaacagagctgtgagcagcaatgtgggcgcctacatgcagcccggggcccgggagaacatcgcctacctgacccacacagagaggaggaaggacttccagtatgaggccatgcaggagcggcgggaggccgagaacatggcccagaggggcattggagtggccgccagctctgtgcccatgaacttcaaggacctgattgagaccaaggccgaggagcacaacatcgtgttcatgcctgtgattggcaagagacatgagggcaagcagctgtacaccttcggccgcatcgtcatctacatcgacagaggagtggtgtttgtgcagggcgagaagacctgggtgcccaccagcctgcagagcctgattgacatggccaagtag

SEQ ID NO: 323448 - DNA, 576 bp, Artificial Sequence
  derived and/or modified sequence
tgaggaagaggcctgggcaagaatgcccagggcatcatcaaccccatcgaggccaagcagaggaagggcaaaggagctgtgggcgcctacggcagcgagaggaccacccagagcatgcaggacttccctgtggtggacagcgaggaggaggccgaggagtggctgttcctggccgccagtgactgcatcctgctggtgcaggagttccagaaggagctgagccagtggaggaaggaccccagcggcagcaagaagaagcccaagtacagctacaagacagtggaggagctgaaggccaagggccgcatcagcaagaagctgacagccccccagaaggagctgagccaggtgaaggtgattgacatgacaggccgggagcagaaggtgtactacagctacagccagatcagccacaagcacaacgtgcctgatgatggcctgcccctgcagagccagcagctgccccagagcggcaaggaggccaaggcccctggctttgccctgcctgagctggagcacaacctgcagctgctgattgacctgacagagcaggagatcatccagaatgacagatag

SEQ ID NO: 323449 - DNA, 366 bp, Artificial Sequence
  derived and/or modified sequence
atgagcctgagccacctgtacagagatggagagggcagaattgatgatgatgatgatgagcgggagaactttgagatcacagactgggacctgcagaatgagttcaaccccaaccggcagaggcactggcagaccaaggaggaggccacctatggagtgtgggccgagcgggacagtgatgatgagcggcccagctttggaggcaagagggcccgggactacagcgcccctgtgaacttcatctctgctggcctgaagaagggagctgctgaggaggccgagctggaggacagtgatgatgaggagaagcctgtgaagcaggatgacttccccaaggactttggccccaggaagctgaagacctag

SEQ ID NO: 323450 - DNA, 2514 bp, Artificial Sequence
  derived and/or modified sequence
atgagcctgagccacctgtaccgggacggcgagggccggatcgacgatgacgatgacgaaagggagaatttcgagatcacagactgggacctgcagaatgagtttaatccaaaccgacagagacactggcagacaaaggaggaggccacctacggcgtttgggcagagcgtgactccgatgacgagcgaccctcttttggcggcaagcgcgcacgggactacagtgctccggttaattttattagtgcaggcttgaaaaagggcgcagcagaggaggctgagcttgaggattccgatgatgaggagaagccagtgaagcaggacgattttcctaaggacttcgggccaagaaagttaaaaacaggcggaaatttcaaaccctctcagaaggggttcgctggtggtacaaaatcgtttatggacttcggttcatgggagagacatactaagggaattgggcagaagctcctgcagaaaatgggctacgttcccggcagggggttggggaaaaatgcgcaggggatcattaacccgattgaagccaagcagcggaaaggcaaaggcgcagtgggcgcttacgggtccgaacggacaacgcagtcgatgcaggacttccctgtggtggactctgaggaggaggcggaggaggaattccagaaggaactttctcagtggcgcaaggacccaagtggatcaaaaaagaaacctaaatacagctataaaacagtagaggagctgaaggccaagggcaggatctccaagaaattgacagctccacagaaggagcttagccaagttaaggtcattgatatgaccggccgtgaacagaaggtttattacagctactcccagatctcgcataagcataatgtcccggacgacggcttacccctccagtctcagcagttgccacagtctggcaaagaggctaaggctcctgggttcgctctgcccgagttagagcacaacctccagctgctgatcgacttgacagagcaagaaataatacaaaatgatcggcagctgcagtacgagagagatatggtcgtcaatctctttcatgagttggaaaaaatgactgaagttttagatcacgaggaacgtgtgatctcgaatttgtcgaaggtgttggaaatggtggaggagtgtgaacgcagaatgcagcccgactgttctaatcccctgacactggacgagtgtgctaggatcttcgaaaccctgcaggacaaatattacgaggaatatcgaatgagcgaccgagttgatctggccgttgctatcgtttaccccctgatgaaagagtactttaaagaatgggatccactcaaggattgcacttacgggaccgaaatcatatccaaatggaaaagtttgcttgagaacgatcagttactgagtcatgggggacaggatctctcagcagatgccttccacagactcatctgggaagtgtggatgccgtttgtcaggaacattgtgacccaatggcagccgagaaactgcgatcctatggtggattttttggatagctgggtccatatcataccagtgtggatactggacaacattctggatcagcttatttttcctaagctccaaaaggaggttgaaaattggaacccactcaccgacaccgtcccgatccattcttggatccatccctggctgccattgatgcaagcacggctggaaccgctgtacagcccgatccgatccaagctttcatcagcactgcagaagtggcatccttctgatagctccgccaagctgatcctgcagccatggaaagacgtctttacccccggatcatgggaagcttttatggtgaaaaacattgtgcccaaactcggcatgtgtttgggcgagctcgttatcaaccctcaccaacaacatatggacgcgttctactgggttatcgattgggaaggaatgatttccgtctccagcctcgttgggctactggagaaacattttttccctaaatggctgcaggtcctttgttcctggcttagcaatagccccaactacgaggaaattaccaagtggtacctgggctggaagtcaatgttctcagatcaggtgttagctcacccatcagtgaaggacaagtttaatgaggccttggacattatgaatcgcgcagttagctcaaatgtaggagcttacatgcagccaggtgcccgcgaaaatattgcttatctaacacacaccgaaagacgaaaggattttcaatatgaggccatgcaggaacggagggaagcggaaaatatggcccaaaggggaataggggtcgcagcttcttcagtacctatgaacttcaaagacttgatcgaaacaaaagccgaggagcataatatcgtgtttatgcctgtgatcggtaaacgacacgaaggcaagcagctctataccttcggccgaatcgtaatttacatagatcgcggcgtggtatttgttcagggagagaagacctgggtgcctacctccctacagtctctcattgatatggccaagtag

SEQ ID NO: 323451 - DNA, 2514 bp, Artificial Sequence
  derived and/or modified sequence
atgagcctgagccacctgtaccgggacggcgagggccggatcgacgacgacgatgatgagcgcgagaacttcgagataacggactgggatcttcagaatgaattcaaccctaatagacaacggcactggcagacgaaagaggaggcaacctatggggtgtgggccgaacgcgattccgatgacgagcgaccttccttcggagggaagcgagctcgagactacagtgcacctgtcaacttcattagcgctggtttgaagaaaggggccgccgaggaggcggaactcgaagattccgacgatgaggagaagcccgtgaagcaggatgactttcccaaggacttcggccctaggaaactgaagactgggggcaacttcaagcccagtcagaagggcttcgccggtggcacaaagagttttatggacttcggctcctgggaaagacatacaaagggcatcggccagaaactgcttcagaaaatgggctatgtgcccgggaggggcctgggcaaaaatgctcaaggaataatcaatcccattgaggctaagcagcgcaagggcaaaggagcagtcggggcttacggaagcgaaagaacgactcagagcatgcaggatttccccgttgtggatagcgaagaagaagcagaagaggagttccaaaaagaactgtcacagtggcgaaaggatcccagcggatccaagaaaaagcctaagtacagctataagaccgtcgaagagctgaaggcaaaaggccgaatctctaaaaagctgactgccccccagaaggaactatcccaggttaaagtgatcgacatgaccggtcgggagcagaaagtgtactattcatactcccagattagtcataagcacaacgtgccagatgatggccttccgctgcagagtcaacaactgcctcagtctgggaaggaggccaaagcacctggatttgccctgcccgagctggagcacaatttacagctgctgatcgatctaactgagcaggaaattattcagaacgatagacagttacagtacgagcgggatatggttgtcaacctcttccacgaactcgagaagatgacagaagtcttagatcatgaggaacgcgtgatctcaaatctaagcaaagtactggaaatggtcgaagagtgcgagagaagaatgcagcccgattgtagcaatccgctcactctcgacgagtgcgcgaggattttcgagacattgcaagataagtattacgaagagtaccgtatgagtgaccgggtggaccttgcagtggccatcgtctatccattgatgaaggaatacttcaaggagtgggatcccctgaaagattgcacctacggcactgagattatctcaaaatggaagtccttgttggagaacgatcagctgcttagccacgggggccaagacctgagcgctgacgctttccatagacttatctgggaggtgtggatgccatttgtcagaaatattgtgacacagtggcagccccgaaattgtgatccaatggtggattttctcgacagctgggtccatatcatccctgtctggattctagataatatcttggatcaactgattttccccaagctgcagaaagaggttgaaaactggaatcccctgacagataccgttccaatccattcttggatccacccctggctgcccctgatgcaggctcgcctggagcctttgtattccccgattagatcaaagctgagctccgccctacaaaagtggcacccttccgacagctcggcaaaactgatcctccaaccctggaaggatgtcttcacccctggctcatgggaggcgttcatggtcaagaatattgtccctaagctcgggatgtgcctaggcgagcttgtgattaatcctcatcagcagcatatggacgccttctactgggtcatagactgggagggcatgatctctgtgtctagtctggttggattattagaaaaacattttttcccgaaatggctccaagtgttgtgtagttggctttccaactctccaaattatgaagaaatcactaagtggtacctgggttggaagtctatgttcagcgatcaggtccttgctcatcctagcgtcaaggataagttcaatgaagccctcgatataatgaaccgggccgtctctagtaatgttggtgcctatatgcagccgggcgctcgggagaatatagcctacctgacacacaccgaacggagaaaggatttccagtacgaggccatgcaggagcgcagagaggccgaaaatatggcccagcggggcatcggcgtcgctgcgtccagtgtgcctatgaatttcaaagacctgatcgaaacaaaggccgaagagcataacattgtgttcatgccagttattggcaagcggcatgaagggaagcagctgtacacatttggtaggatagtaatatatattgacagaggggttgttttcgtccaaggagagaaaacctgggtgcctacttcacttcagtctctcattgacatggcaaaatag

SEQ ID NO: 323452 - DNA, 2514 bp, Artificial Sequence
  derived and/or modified sequence
atgagcctgagccacctgtaccgggacggcgagggccggatcgacgacgacgatgacgagagagagaattttgagataaccgactgggatctgcagaatgagtttaaccctaatcggcaacgtcactggcaaaccaaagaagaagccacttacggggtctgggccgaaagggactcggatgacgagcgcccctcattcgggggcaagagggcacgagattacagcgcccccgtgaatttcattagcgctggcctgaaaaaaggcgctgctgaggaagctgagctggaagactcagacgatgaagagaagcccgtcaagcaggatgatttcccaaaagattttggcccacgcaaacttaaaaccgggggaaattttaaacctagtcagaagggctttgcaggcggaacgaaaagctttatggattttggcagctgggaacgccataccaaaggcattggacagaaactcttgcagaagatggggtatgttcctggacgaggattggggaagaatgcacagggcatcatcaaccctatagaggccaagcaacgcaagggtaagggcgccgttggcgcatacggcagcgaacggacgacccaatccatgcaggacttcccagtggttgatagcgaagaagaggccgaggaagagtttcaaaaagaactcagtcagtggagaaaggatcctagcgggtccaagaaaaagcctaagtatagttacaagacagtggaggaactcaaggccaagggaagaatatccaaaaaactcacagctccacagaaagaattgtcacaggtcaaggtgatcgacatgactggcagggagcagaaggtgtactatagctattctcagataagccacaaacataatgttcctgatgacggcctgccactccagtctcagcagctgccccaaagcggaaaggaagccaaggctccgggcttcgcactgcccgagctagagcacaatttgcagctgttgatagatctgactgagcaggaaatcattcagaacgatagacagctgcagtatgagagagatatggttgtgaacctgttccacgagctggagaagatgactgaggtcctcgaccacgaggagcgagttatttccaacctgtctaaggtgctggagatggttgaggagtgcgagcgtcgaatgcaacctgattgctctaaccctctgactctggacgagtgcgcccggatttttgagacacttcaggacaaatactatgaggaataccggatgtcagaccgggtggatctggcggtcgccattgtttaccccctcatgaaagaatacttcaaggagtgggatccgctgaaggactgtacctacgggactgaaataatttctaagtggaaatcacttctggagaatgaccaactgctgtcccatggcggacaggacctgagcgccgatgcctttcacagactgatttgggaggtgtggatgccattcgtgcggaacatagttacacagtggcagccaaggaactgcgatcctatggtcgactttctcgattcttgggtccacatcatccctgtctggatccttgataatatcttggaccagcttatctttcccaaactgcagaaagaggttgagaactggaacccgctgacagatacagttccgatccactcatggatccacccttggctacctctgatgcaggcccggctggagcctctgtactcccctataaggagcaagttgtcgtccgcattgcagaagtggcacccatcagactcctccgcaaagctgattctgcaaccctggaaggacgtgttcaccccaggctcctgggaggctttcatggtgaagaatatagttcccaagcttggtatgtgcctgggagaactcgtgattaatccgcaccaacaacatatggacgccttctactgggtcattgactgggaaggtatgatctccgtgagcagtctggtgggactcctggaaaagcacttcttccccaaatggttgcaagtgctgtgctcttggctgagcaatagcccaaattacgaggaaattacgaagtggtatcttggctggaagtcaatgttctcggaccaggtgctggcacacccttccgtgaaagataagttcaatgaagctcttgatatcatgaatcgcgcggtgtcaagcaatgtgggagcctacatgcaacccggggcacgcgagaatatcgcctacctgacgcatacagaaagaagaaaggacttccagtacgaagctatgcaagaaaggagagaagcggagaatatggcccagcgcggaatcggtgtagcggcttcgtctgtgccaatgaacttcaaggatcttatcgagacaaaagctgaagagcacaacattgtatttatgcccgtgatagggaagaggcacgaaggcaagcagctttatacattcggccgtatcgtcatatacattgacaggggcgttgtgtttgtgcagggagagaagacatgggtgcccacctccctgcaatccttgattgacatggccaagtag

SEQ ID NO: 323453 - DNA, 2514 bp, Artificial Sequence
  derived and/or modified sequence
atgagcctgagccacctgtaccgggacggcgagggccggatcgacgatgacgacgacgagagggaaaactttgagattacggactgggacctccagaacgaatttaaccctaacaggcagcgtcactggcagaccaaagaagaggccacatacggagtatgggctgagagggactctgacgatgagcgccccagtttcggcggaaagcgagctagggactacagcgcaccagtgaattttatttcagctggtcttaagaaaggagcggccgaggaagcggagctggaagatagcgacgacgaagagaagcccgtgaaacaggatgatttcccgaaagattttggtcctagaaaactgaagaccggcggtaatttcaaacctagccaaaagggcttcgccggaggcacaaagtcatttatggacttcggaagctgggagcggcatacaaagggtatcggccaaaaactgttgcagaagatgggttatgttcctgggaggggactaggcaaaaacgcccaaggtataattaacccaattgaggctaaacaacgcaaaggtaagggcgcagtgggggcctacggaagtgagagaaccacacagtctatgcaggacttcccagtggtggattcagaggaagaagcagaggaggagttccaaaaggagctctcccaatggcgaaaagacccatccggcagcaaaaagaagccgaagtatagctacaagaccgtggaggagctaaaagctaagggacgaatttctaagaagcttaccgcaccccagaaagagctctctcaggtaaaggtaatcgacatgaccggtcgagagcagaaggtttattattcttacagccaaatctcacacaaacacaacgtgcctgatgatggactccctctccaatcgcagcagctgcctcagtccggaaaggaagctaaggcccctggtttcgccttacctgagctggagcataacctgcagctcctgattgatttaactgagcaggagattatccagaacgacagacagctgcaatacgagagggatatggtcgtgaatcttttccacgagttagaaaagatgacagaagtgctagaccatgaagaaagggtgatcagcaatttgagcaaagtgcttgagatggtggaggagtgcgagaggcgcatgcagccagattgctcgaaccctcttacattagacgagtgtgctcggattttcgagacgctgcaggataagtactatgaagagtacaggatgtctgatagagttgacctggctgtggcaatcgtgtatcccctgatgaaggaatatttcaaagagtgggacccacttaaagattgtacatacgggactgagatcatctccaagtggaaaagtctgcttgaaaatgatcagctgttgagccatggaggacaagatctgagcgccgacgcttttcacagattgatatgggaggtttggatgcctttcgtcaggaacattgtgactcaatggcaaccacggaactgcgatcccatggtggacttcctggacagctgggtacatattatccccgtctggatactagataacatcctggaccaactcatctttcccaaactgcagaaggaagttgagaattggaaccccctcactgatacagttcccattcattcttggatccacccatggttacccctcatgcaggcccggctcgagcccttatatagcccaatccgaagtaagctatcttccgcactccagaaatggcatccctccgactcttctgcaaagctcatcctccaaccctggaaggatgtgttcacgcctggctcttgggaagccttcatggtgaaaaacatcgtgccgaagttggggatgtgcttgggcgaactcgtcataaatccgcaccagcagcacatggatgccttctactgggtcattgactgggagggtatgattagtgtgtcatccttagtggggctcttggaaaaacactttttccctaaatggctgcaagtgttatgctcatggctgtcaaactcgcctaactacgaggaaattacgaagtggtacttgggttggaaatctatgttctcagatcaggttctggcccatccttctgtcaaagataaatttaatgaggccctggatatcatgaatcgcgcagtctcatccaatgtgggggcgtacatgcagccaggcgcccgcgaaaatatcgcctatctgacacataccgaacgtcgaaaggactttcagtacgaagccatgcaggaaagaagggaggcagaaaacatggcgcagcgtggcataggagttgccgcttcatccgtgccaatgaattttaaagatctcatcgagaccaaagcagaagagcacaatatcgtgtttatgccagtgattgggaagcggcacgaaggcaaacaattgtatacctttggccggattgttatctacatagatcgcggtgtggtttttgtgcagggcgaaaagacttgggttcctacatccttgcagtctctcattgatatggccaagtag

SEQ ID NO: 323454 - DNA, 267 bp, Artificial Sequence
  derived and/or modified sequence
atgagcctgagccacctgtaccgggacggcgagggccggatcgacgacgacgacgacgagagggaaaatttcgagattaccgattgggatctgcagaacgagtttaatccaaataggcagcggcattggcaaaccaaggaggaggccacctacggcgtgtgggcagagcgcgactctgacgatgagagaccctcttttggcgggaagcgggcccgtgactattccgccccggtcaacttcatcagcgcgggcctgaaaaaaggttag

SEQ ID NO: 323455 - DNA, 261 bp, Artificial Sequence
  derived and/or modified sequence
atgagcctgagccacctgtaccgggacggcgagggccggatcgacgatgacgatgacgagcgcgaaaatttcgaaattaccgactgggatctgcaaaatgagtttaacccgaatcgacagagacactggcagactaaggaggaggccacatatggagtgtgggcagaacgtgactccgatgatgaaaggccttcttttggcggcaagcgagcaagagactacagcgctccagtcaattttatttctgccggcttgaagtag

SEQ ID NO: 323456 - DNA, 129 bp, Artificial Sequence
  derived and/or modified sequence
atgagcctgagccacctgtaccgggacggcgagggccggatcgacgacgacgatgacgagcgggagaatttcgagatcactgactgggacttgcagaacgaatttaaccctaataggcagcgtcattag

SEQ ID NO: 323457 - DNA, 1569 bp, Artificial Sequence
  derived and/or modified sequence
atgagcctgagccacctgtaccgggacggcgagggccggatcgacgatgacgatgatgagagagagaacttcgaaataacagattgggacctacagaacgaattcaatttgtttcatgagctcgagaagatgacggaagttctcgatcacgaagaacgcgtgattagcaatttatcaaaggtgttggagatggtggaggaatgtgagaggcgaatgcagcctgactgctccaacccgctgacactggatgagtgtgcaagaatctttgaaacactgcaagacaagtactatgaggaataccggatgtcagaccgagtggacctggcagtagcgattgtgtaccccttgatgaaagaatacttcaaagagtgggacccactgaaagactgcacatatggcactgaaatcatcagcaagtggaaatcgctcttggaaaacgaccaactgctgtcccacggcggccaggacttaagcgccgacgctttccaccggctcatatgggaggtttggatgccctttgtaaggaacatcgtgacccaatggcaaccaaggaattgtgacccaatggtggattttctcgacagttgggtgcatattattcccgtgtggattcttgacaacatcctcgaccaactgatctttccgaagctccagaaggaagtggaaaattggaatcctctgaccgacaccgtcccgatccattcctggatacatccctggctccctttgatgcaggcgcgtcttgagcctttatactcacctatcaggtccaagctgtcaagcgccctgcagaagtggcatcccagcgacagttccgctaagctcattctccagccttggaaggacgttttcacccccgggagctgggaggcctttatggtcaaaaacatcgtccctaagctggggatgtgccttggcgaactggttataaacccccatcagcaacacatggatgcattttactgggttatcgactgggagggcatgatctccgtttcttctctggtgggccttcttgagaagcatttcttcccgaagtggcttcaggtgctgtgttcctggctgtctaactctccaaactacgaagaaataactaagtggtatttgggttggaaaagcatgttctctgaccaggtcctcgcgcaccctagcgtgaaagacaagttcaacgaggctcttgatataatgaatcgcgccgtctcttctaatgtcggcgcctatatgcagcccggtgcaagagagaatatcgcctatcttactcacacagagcggagaaaggacttccagtacgaggcgatgcaggagaggagggaagccgagaatatggctcagcgtggtatcggggtggcagctagctccgtacccatgaattttaaggatctgatcgaaacaaaggctgaagagcataatattgtattcatgcctgtaattggcaaacgacatgagggtaagcagctctacactttcggtagaatcgttatttacattgacaggggggtcgttttcgttcaaggcgaaaagacctgggtccctacctctctgcaatccctgatcgatatggccaagtag

SEQ ID NO: 323458 - DNA, 576 bp, Artificial Sequence
  derived and/or modified sequence
tgaggccggggcctgggcaagaacgcccagggcatcatcaaccccatagaagctaagcagcgcaaaggcaagggggcggtgggcgcatacgggtcagaaaggaccacccagtcaatgcaggacttcccggttgtcgatagtgaagaggaggccgaggaatggctgttcctggcggcaagtgactgtatcctgctggtgcaggagtttcagaaagagctgtcccagtggagaaaagatccatctggaagcaagaagaagccaaagtacagctacaaaaccgtagaagaactcaaggcgaagggccgtatatcaaagaaactgacagctccacagaaagagctctcccaagtgaaggtaatcgatatgactggtcgagagcagaaggtgtattacagctacagccagatatctcataagcacaacgtgcccgatgatggattacccttacagagccagcaactgccccagagcggcaaggaggccaaggcacccgggtttgctttgccagagctggagcataacctccagctcctcattgacctgactgaacaagagatcatccagaatgataggtag

SEQ ID NO: 323459 - DNA, 366 bp, Artificial Sequence
  derived and/or modified sequence
atgagcctgagccacctgtaccgggacggcgagggccggatcgacgatgacgacgacgagcgcgagaacttcgaaatcacagattgggatcttcagaacgagttcaaccccaatcggcaaaggcactggcagacaaaggaggaggcgacttacggagtgtgggctgagagagactctgacgatgagagacctagctttggcggcaaaagggcccgcgattatagcgcccctgtgaacttcatttctgccggcttgaagaagggcgccgctgaagaagctgaattggaggatagtgatgatgaggagaagcccgtcaagcaggacgattttcccaaggactttggcccacgcaagctaaagacttag

SEQ ID NO: 323460 - DNA, 2514 bp, Artificial Sequence
  derived and/or modified sequence
atgtctctgtcacacctatacagagatggagaagggcgtatcgatgacgacgacgacgagcgggagaacttcgaaattaccgactgggacttgcagaacgaattcaatcctaatcggcaacggcactggcagactaaggaagaggccacatacggagtatgggctgagcgcgattctgatgatgagcgaccaagtttcgggggtaaacgtgccagagactatagtgcccctgtgaattttataagcgccggactgaaaaaaggagccgctgaggaagctgagctggaggattcagatgatgaagagaaaccagtgaagcaagatgattttcccaaagactttggcccaagaaagctgaaaaccgggggaaactttaaaccgtcccaaaaggggtttgccggtggaactaagtcttttatggatttcggctcttgggagcgccacacaaagggaatcggccagaaactgctccagaagatgggatatgtgcctggtagaggtctcggaaaaaatgcccagggaatcatcaatccaattgaggcgaagcagcgcaagggaaagggagctgtcggcgcatacgggtctgagaggaccacgcaatctatgcaggactttccagtggtcgactcagaggaagaggcagaagaagagttccagaaagaactctcccagtggcggaaagacccttctggctccaaaaagaaaccgaaatacagttataagacagtggaagagctgaaagcaaaagggaggattagcaaaaagttaacggcaccccagaaagaattatcgcaggtcaaagtcatcgacatgacgggtagggagcagaaggtctactattcttacagtcaaatatcccacaaacacaacgtcccagatgacggcctccctctgcagtctcagcagcttccacagtccggcaaagaggctaaggcccctggtttcgcactccctgaacttgaacacaatctgcagcttctaattgatcttaccgagcaggagattatccagaacgaccggcagctgcagtatgaacgcgatatggtcgttaacctgtttcacgagctggaaaagatgacggaggtcctggaccatgaggagagggtgatctctaaccttagtaaagtgttggaaatggtagaagaatgcgagcgacggatgcagccagactgtagtaacccactgaccctggatgaatgcgccagaatcttcgagactttgcaagataagtactatgaggagtaccgcatgtctgacagggtggacctggccgtggctatagtataccctctcatgaaagagtatttcaaggaatgggaccctctaaaagactgcacttacggtactgaaatcatctccaaatggaagagtctcttagagaatgatcagttgctgtctcacggcggtcaagatctgtctgccgacgcgtttcacagacttatttgggaagtttggatgccttttgtccgcaatatcgttacgcaatggcagccaaggaactgcgaccccatggtggatttcttagactcctgggtgcacataattccagtctggatccttgataacattctcgatcagctgatcttccccaaactacagaaagaagtcgaaaattggaacccattaactgatacggtgcctatccacagctggatacatccctggcttcccctcatgcaggcgaggcttgagccactctattctcccatccggtccaagctgagcagtgctctgcagaaatggcaccccagtgattcctcagcaaagctgatcttgcagccctggaaagacgtctttacgcccggttcctgggaggcttttatggtcaagaacatcgtgcccaagctagggatgtgcttgggcgagctagttatcaatccccaccagcagcacatggacgccttctactgggtgatagactgggaggggatgatctctgtctcgtctcttgtgggcctgctggagaagcatttctttccaaagtggctgcaggttctgtgctcttggctgtctaattcacctaactacgaggagataacaaaatggtacctgggatggaaatcaatgttcagtgatcaggtcttggcccatccatctgtgaaggataagttcaatgaggctctggatatcatgaatcgagctgtctcctccaacgttggggcttacatgcagcccggtgcccgtgagaatattgcctatctgacccacacagagcggaggaaagatttccagtacgaagccatgcaggaacggagagaagcagagaacatggctcaacgcggaataggtgtcgctgcaagttctgtccctatgaactttaaagacctaatcgaaacgaaagcagaagaacataatatcgtatttatgccggtcatcggcaagagacacgaggggaagcagctttacacattcgggaggatcgtgatttacatcgacagaggtgtagtgtttgtgcagggcgagaaaacttgggttcctacatccttgcaaagccttattgacatggcaaaatag

SEQ ID NO: 323461 - DNA, 2514 bp, Artificial Sequence
  derived and/or modified sequence
atgtctttatctcatttatatagagatggcgagggcagaatcgacgatgacgatgacgagagagagaattttgagattactgactgggacctgcagaatgagttcaatccaaacaggcagcgccactggcagaccaaggaggaggcaacctacggagtctgggccgagcgcgacagtgacgatgagcggcctagcttcggcggaaaacgggcaagggactattcagcacctgtcaactttataagcgcgggactgaagaaaggtgccgctgaggaagcggagcttgaggactccgatgatgaggaaaagccagtcaagcaggacgactttcccaaagatttcggaccgagaaaactaaagacaggcggtaatttcaagccatcccagaagggctttgcgggtggcaccaagtcgttcatggacttcggttcatgggaaagacacaccaaagggatcgggcaaaagctcttgcaaaagatgggatacgtcccagggcgaggcttaggaaagaatgcacaggggattataaatccaattgaagcaaaacagaggaagggaaaaggcgcagtgggagcttatggcagtgaaagaaccacacagtcaatgcaggattttccggtggtcgactctgaagaagaggctgaggaagagtttcagaaggaactgtctcagtggaggaaagatccttctggatccaagaaaaagcccaagtatagctataagaccgtcgaagagttgaaagcaaagggcagaattagcaaaaagctcacagcacctcagaaagaattgtcacaggtgaaggttattgacatgacaggtagggagcagaaagtgtactactcatactcacagatttcccataagcacaatgtgcccgatgacgggctgcctctacaaagccagcagctgccccagtctggtaaggaggccaaggcccctgggtttgctctgccagaattagagcacaatctccaactccttatagacctaacggagcaagagattattcagaacgatcgccagctccaatatgagagggatatggtagtcaatctgttccacgaactggagaagatgaccgaggtacttgaccacgaagaaagagtgatctccaacctcagtaaggtccttgagatggtggaggaatgcgagcgccgaatgcagccagactgttctaaccccctaaccctggatgaatgtgctcgaattttcgaaactctgcaggacaaatattacgaagagtaccgtatgtctgatcgagtggacctagcggtggctattgtgtaccccctcatgaaagaatactttaaagaatgggatcccctgaaggactgtacatacgggaccgagatcatctcaaagtggaagagtcttctcgagaacgaccagctgttgagtcacggtgggcaagacctgagtgccgacgcgttccatcgcctaatttgggaagtgtggatgccattcgtgcgcaacatcgtgacgcagtggcaacctcgcaactgcgatcctatggtagactttctggactcctgggtacacataatccctgtgtggattctagataatatcctggaccagctgatctttcccaaactccaaaaggaagtggaaaactggaatccactcacagacactgtgcctattcattcatggatccatccatggcttccgctgatgcaggccagactcgaacccctctactctcccataagatccaagttgagcagtgccctccagaaatggcatccatcggatagctcagccaaactcattctgcaaccttggaaggacgtattcacccccggaagctgggaggctttcatggttaagaatattgtgcccaaactcggtatgtgcttgggcgaattggtgatcaaccctcaccaacagcacatggacgccttttattgggtgatcgactgggaggggatgatcagcgtatctagcctggtgggcctgttagagaagcacttctttcctaaatggcttcaggtgctctgttcatggcttagcaactcccccaactacgaggaaattacaaagtggtacctcggatggaaatccatgttcagtgatcaggtgttggcccacccatctgtgaaggacaaatttaatgaagccttggatatcatgaaccgggctgtgagctctaacgtcggagcttacatgcagcccggtgcacgcgaaaatatagcctatctgacacacacggagcgcagaaaggatttccaatacgaggccatgcaggaaaggagggaagccgaaaacatggcccagagagggattggtgtggccgcttcttccgtgcccatgaatttcaaggacctgatcgaaacaaaagccgaagagcacaatatcgtgtttatgcctgtcatcggtaaaagacacgaaggcaaacaactgtatacctttgggcgtattgtaatatatattgatcgcggtgtagtgttcgttcagggggagaagacttgggttcccactagcctacagtctctgatcgatatggctaaatag

SEQ ID NO: 323462 - DNA, 2514 bp, Artificial Sequence
  derived and/or modified sequence
atgtcgctgagccacctgtaccgcgacggtgaagggcgtatcgatgacgacgacgacgaacgagagaactttgaaattactgattgggatctgcagaacgaattcaatcctaacaggcagcgccattggcagacaaaggaggaggcaacatacggcgtgtgggccgagcgcgattctgacgacgagagaccctcattcggtggaaaacgcgctcgcgattattcagcccctgtgaattttattagcgccggactgaagaagggcgctgctgaggaagctgaactggaagactccgatgatgaagaaaaacccgtcaagcaggatgatttccccaaggatttcggcccacggaagctgaaaacaggtggcaacttcaagccctcccagaaggggttcgcaggaggcaccaagagctttatggactttggttcatgggagcgccatacgaagggaattggacagaagctgttgcagaagatgggctacgtgcccggtagggggctaggcaaaaacgctcagggcattatcaaccccatcgaagcgaaacaacgcaaaggaaaaggcgcagtgggcgcttacggttctgaaagaactacacaatctatgcaggatttccccgtggtcgattcagaggaggaggccgaggaggagtttcagaaggaactctctcaatggaggaaggaccctagtggtagcaaaaagaaaccaaagtattcctataagacagtggaggaattaaaggccaagggtcgaatctcaaagaaactgacagctcctcaaaaggagctaagccaagtgaaggtgatcgatatgacagggcgtgaacagaaggtgtactatagctactctcagatttcgcataagcacaatgtgcctgacgatggactcccactgcaaagccagcagctgccacaatcgggcaaggaggccaaagccccaggattcgcactgcccgagctggagcataatctccagctattaatcgatttgaccgaacaagaaattattcaaaatgacagacagcttcagtacgaacgcgatatggttgtgaatctgtttcatgaactcgaaaaaatgactgaggtgctggatcacgaagagcgggtgatttccaacttgagcaaggtgttggagatggtcgaggagtgtgagcggaggatgcagcccgactgcagcaaccccctgactctcgatgaatgtgcccgaatatttgaaaccctacaggacaaatattatgaagaatatcgtatgtccgacagagtggatctagccgtggctatcgtgtacccactgatgaaagagtactttaaagaatgggaccccctcaaggattgtacttacggtacagagattatttcaaaatggaagtctctgcttgagaatgaccagctcttaagccacggcggtcaggacctctccgcagatgcatttcatcgactgatttgggaagtctggatgccgttcgtgaggaatattgttactcagtggcagccaaggaattgcgaccctatggtggactttttagactcatgggtccacataatccccgtttggatcctagataatatcttggatcagctcatattcccgaaactccagaaagaggttgagaattggaaccctttaactgatactgtgcctatccattcctggattcatccatggctgcctctaatgcaggccaggctcgagccactgtattcccccatccggtctaagttgtcctctgcccttcagaaatggcacccttcggactctagcgccaaacttatcctacaaccttggaaggatgtcttcaccccgggatcctgggaggcctttatggtcaaaaacatcgtcccaaaactcggcatgtgtctgggtgaacttgtcattaatcctcaccagcaacatatggatgcgttctactgggtgattgattgggagggcatgatatccgtcagtagtcttgttggtttgctagagaaacatttctttcccaagtggctgcaagtgctgtgcagctggctcagcaatagcccgaattacgaggaaattaccaaatggtacctcggatggaaaagtatgttttctgatcaagtgttggcccacccgtcagtgaaggataagtttaatgaggcgttggatattatgaaccgggcagtgtcctccaatgttggggcttacatgcagcccggtgccagggaaaacattgcctatctcacacacactgagcgacggaaagattttcaatacgaagcaatgcaagaaagaagagaggcagagaatatggctcaaaggggcattggagttgccgcttccagcgtgccaatgaacttcaaggacttaattgaaaccaaggccgaggagcacaatattgtctttatgcccgttatcgggaaacggcatgagggaaaacagttgtatacgttcggacgaatcgtcatctacattgaccgcggagttgtctttgtccagggtgagaagacatgggtgcctaccagccttcagagtttgatagacatggccaagtag

SEQ ID NO: 323463 - DNA, 2514 bp, Artificial Sequence
  derived and/or modified sequence
atgagcctgtctcatctgtacagagacggcgaaggcagaattgacgatgatgatgatgagcgagagaatttcgagattactgactgggacctgcaaaatgaattcaaccctaaccgacagcggcattggcagacgaaagaagaagctacctatggcgtgtgggccgagcgcgattctgacgatgaacgccctagtttcggaggtaagcgcgcacgcgattattctgccccagtaaactttatcagtgcgggactgaaaaagggagccgctgaggaggcagagttagaagacagtgatgacgaggaaaagccagtgaagcaagatgacttcccgaaagatttcggccctcgcaaacttaagaccggtgggaactttaaaccaagccagaaggggtttgccggtgggaccaaaagctttatggattttgggtcctgggagcgccacactaagggcattgggcagaagttgctgcaaaagatgggctatgtgccagggcgaggattgggcaaaaacgctcagggcattataaaccctatcgaggccaagcagagaaaaggcaagggagctgtaggggcttacggtagcgaacgaaccacacagtcaatgcaagatttcccggtggtggattccgaggaagaagcagaagaggagtttcaaaaagaactatcgcagtggcggaaggaccctagcgggagcaagaaaaagccgaaatacagctacaagaccgtggaggagctgaaggccaaggggcgaatcagtaagaagctcacggcacctcagaaagagttatcgcaggtaaaggtcatcgacatgacggggagggaacagaaggtgtattacagttacagtcaaatcagtcataagcataatgtgcccgatgatgggctgccccttcaatctcagcagctccctcagtcggggaaggaagccaaagcaccaggttttgcgctccccgagttggagcacaacctccagctcttgattgatcttactgaacaggagattatccagaatgaccgtcaactgcagtacgaacgggacatggtggtgaacctgttccacgaactcgagaaaatgacagaggtcctggatcatgaggaaagagtgatttctaacctaagtaaagtgctggagatggttgaagagtgcgaacgacgcatgcaacctgattgcagcaatcccctcacacttgatgagtgtgcacgcatctttgaaactttgcaggataaatattatgaggaataccgcatgtccgacagggtggatctggccgtggctattgtgtaccccctcatgaaagagtatttcaaggagtgggaccctctcaaagattgcacctacggcaccgagatcatcagtaaatggaagagtctgctcgaaaatgatcagctgctttctcacggtggccaggacttgtctgccgacgcctttcatagacttatctgggaggtgtggatgcccttcgttagaaatatcgtaacacagtggcagccacgaaattgcgatcctatggtcgactttctggatagctgggtgcacatcattcccgtctggattctggataatatcctggatcaactgatttttccgaagctgcagaaggaagtggaaaattggaaccccctgacagataccgttcccatccactcgtggatccatccctggctgccactgatgcaggcgcgactggagcccctctactccccgattcgaagtaaattatcctctgccttacagaagtggcacccttcagactcatcagcgaagctaattttgcagccgtggaaggatgtgtttacccccggaagctgggaagcttttatggtgaagaacatagtaccgaagctgggtatgtgcctcggagaactcgtgatcaacccccaccaacagcacatggatgccttttactgggtaatcgactgggaggggatgatttcggtgagcagtctcgtggggctcctggagaaacattttttccccaaatggcttcaggtcctgtgctcctggctgagcaattctcctaactacgaggaaatcaccaaatggtacctgggctggaaaagcatgttctcggatcaggttctggctcatcctagtgtcaaagataaatttaatgaggcactggacatcatgaaccgtgccgtgtccagcaacgtcggggcatacatgcaacccggagccagagaaaatattgcctacctgacccacacagaacgtcgcaaagatttccagtacgaggccatgcaggagcgtcgcgaggcggaaaatatggcccagcgcggaatcggggtggccgcatcttcagtccctatgaattttaaagacctgatagagaccaaggcggaggagcacaacatagtgtttatgcccgtgattgggaaacggcatgagggcaagcaactctacacctttggtcggatagttatttatatcgacaggggggtagtgttcgtccagggagagaagacatgggtccccacatccctgcagtctcttatagacatggccaagtag

SEQ ID NO: 323464 - DNA, 267 bp, Artificial Sequence
  derived and/or modified sequence
atgagcctgtcccatctgtatagggacggggaaggaaggattgatgacgatgacgacgagagggaaaactttgagataactgactgggacctgcagaacgaatttaaccccaataggcagaggcactggcagaccaaggaagaagccacttacggtgtgtgggctgagcgagactctgacgatgagcggcctagctttgggggaaagcgggcaagggattattctgccccagtgaatttcatatcagctgggctgaagaagggttag

SEQ ID NO: 323465 - DNA, 261 bp, Artificial Sequence
  derived and/or modified sequence
atgtcgctcagtcacctctatagggacggagaaggcagaatagacgatgacgatgacgaacgagaaaatttcgaaatcaccgactgggatctgcagaatgaattcaacccaaacaggcagcgccattggcagactaaggaagaagccacctacggagtgtgggccgaaagagactccgacgacgaacggccttcatttggcggaaagcgggctagggactacagcgctcccgtcaactttatctctgctggactcaagtag

SEQ ID NO: 323466 - DNA, 129 bp, Artificial Sequence
  derived and/or modified sequence
atgagcctgtcccatctctaccgcgacggtgagggtcggattgacgacgatgacgatgaacgggagaattttgagatcaccgattgggacttgcaaaatgaattcaatcccaacaggcagcggcactag

SEQ ID NO: 323467 - DNA, 1569 bp, Artificial Sequence
  derived and/or modified sequence
atgagcctttcacatctgtacagggatggtgaagggaggatcgatgatgacgacgacgaacgtgagaacttcgagatcacggactgggacctgcagaacgagttcaacttatttcatgaactggaaaaaatgacagaagtcctcgaccatgaggaacgcgtcataagtaatctgagcaaagtgctggaaatggtcgaggaatgcgagcgacgcatgcagcctgactgcagcaacccccttacgcttgatgaatgtgctagaatttttgaaaccctccaagacaagtactatgaggagtaccgcatgagtgatcgggtcgacttggctgtcgccatagtgtaccctctcatgaaagaatattttaaggagtgggaccccctgaaagattgcacctacggaactgagatcatcagcaaatggaaaagcctgttggaaaacgatcagttactgagtcacggagggcaggatctgtcagctgatgctttccacaggctcatctgggaggtttggatgccgttcgtgagaaatatagtcacccagtggcagccacgcaattgcgacccaatggttgattttttagacagctgggtgcatattataccggtctggatactggacaacattctggatcaactgatatttcctaagttacagaaagaggtggaaaattggaacccattgaccgacaccgtgccaattcactcctggattcatccatggctgcccctcatgcaggctaggctggagcctttgtacagtccgatccggagtaaactgagctcggccctgcagaagtggcatccttccgacagctccgcaaagctgatcctgcagccttggaaagatgtattcacccccggatcttgggaagcctttatggttaaaaacattgtaccaaaactcggcatgtgtctcggagaactcgtcattaatccccatcaacagcacatggacgctttctattgggtgatcgactgggagggtatgatcagtgtgtcctctttggtgggacttctagagaagcattttttccctaagtggttacaagtcctctgctcttggctatccaattctcccaactatgaagaaattaccaagtggtacttaggctggaagagcatgttttctgatcaggttctcgcacacccaagtgtcaaagataagttcaatgaggccctagacatcatgaaccgggctgtttctagcaacgtaggtgcttatatgcaacccggtgccagggaaaatatcgcctacctcacccacaccgagaggaggaaggatttccagtatgaagcaatgcaggagcggagggaagcagaaaatatggcacagagaggaattggtgtggccgcaagttctgtgccaatgaactttaaagacctcattgagacaaaggccgaggagcataatatagtcttcatgccagttataggcaagagacacgaaggcaaacagctttatactttcggcagaatcgttatatacattgaccggggagttgtttttgtacagggtgagaaaacctgggtccccacttccttgcagtcactcattgacatggctaaatag

SEQ ID NO: 323468 - DNA, 576 bp, Artificial Sequence
  derived and/or modified sequence
taaggaaggggtctgggcaaaaatgcacagggaattatcaaccccatagaagccaagcaacggaaaggcaagggagcagtaggtgcttacggctctgaacggacaacccagagcatgcaggactttcctgtagtggactccgaggaagaggctgaggagtggctgtttctcgcagcctccgactgcattttactggtgcaggaattccaaaaagagctgtcccagtggcgaaaggatccctcaggaagtaaaaaaaaaccgaaatatagttacaaaactgtggaggaactgaaggctaaaggcaggatatccaagaaattaaccgcaccccaaaaagaattaagccaagtaaaagtgattgatatgaccggcagggaacagaaagtttactactcatactcacagataagccacaagcacaacgtccccgacgatggcctccctctccagtcccagcagctgccccaatccggtaaggaagctaaagcccctggcttcgcactgcctgagctggaacataatctgcaactgcttatcgatctgactgaacaggagatcatccagaacgatcgttag

SEQ ID NO: 323469 - DNA, 366 bp, Artificial Sequence
  derived and/or modified sequence
atgtctctttctcacctttaccgcgacggagaagggcgaatcgacgacgatgacgatgagagggaaaatttcgagatcacagactgggatctgcagaacgagttcaatcccaaccgacaacgccactggcagacgaaggaagaagctacgtatggggtctgggccgagagggattcagacgatgagcggccatctttcggaggcaaaagggctagagattattccgcccctgtgaatttcatctcagctggactcaagaaaggggcagccgaggaggctgagctggaagactcagatgatgaagaaaaacctgtgaaacaggatgacttcccgaaagatttcgggccacgcaagctgaagacctag

SEQ ID NO: 323470 - DNA, 2896 bp, Artificial Sequence
  derived and/or modified sequence
gtcatttccggcgcgccggccacggtgcttccgggttctggtgtaggagcggcgtcttctcgcgcggatggtgaagctgaatttggtacgctggaccctcggacagacagcaagagagagacaagcccgaggcctgacttctagcactcctgagtttgagccctatgagcagtggaacctaggttcttcagctttggaacttgactggctctccttgctcctcagcctgcagacagcctattgtgggaccttttgatcgtgaccaccaaggatccagatataattctttcctcagtaatagaaaaaagaatctgggatctaagaagatacctactcattttctaagtgactggccatgtcattgtcccacttataccgggatggggaaggccgcattgatgatgatgatgacgagcgggagaactttgagatcactgactgggatctccagaatgagttcaaccccaaccgacagcgccactggcagaccaaggaagaagccacctacggggtgtgggcagagcgagactcggatgatgagaggcccagctttggaggcaaacgggcccgtgactactctgcgccagtcaacttcatcagcgcagggctcaagaaaggggcagcggaggaggcagagttggaagattctgatgacgaagagaaacctgttaagcaggacgactttcctaaggattttggaccaaggaagctaaaaacgggtggcaattttaagcccagccagaaaggttttgcaggaggaaccaaatctttcatggacttcggcagctgggaaagacacacaaaaggaattggacagaagcttcttcagaagatgggctacgtccctggacggggcctcgggaagaatgcacaaggtatcattaacccaattgaagccaagcagagaaagggaaaaggtgctgtgggggcttatggatccgagcgcaccactcagtccatgcaagacttccctgtggttgactcagaggaagaagctgaagaggagtttcagaaggagctgagccagtggaggaaagacccaagtggaagcaagaagaagcccaaatactcttacaagaccgtggaagagttgaaggccaagggcaggattagcaagaagctcactgctccccagaaggaactttctcaagtcaaggtcatagacatgacaggccgggagcagaaggtctactacagctacagtcagatcagccacaagcacaacgttcccgatgatgggctgccgctacagtcccaacagctgccacagtctggcaaagaggccaaggcccccggcttcgcgctgcccgagctggagcacaacctgcagctgctcatcgacctcacggagcaggagatcatccagaatgaccggcagctacagtatgagcgggacatggtggtcaacctcttccacgagctggagaagatgaccgaggtcctggaccacgaggagcgggtcatctcgaacctcagcaaggtcctggagatggtggaggagtgcgagcggcggatgcagcccgactgcagcaaccccctcaccctggacgagtgtgcccgcatcttcgaaaccctgcaggacaagtactatgaggagtacaggatgtccgaccgtgtggaccttgctgtggccatcgtctatccactcatgaaggagtacttcaaggagtgggatcccctcaaagactgcacttatggcaccgagatcatctctaagtggaaaagcctcctagagaatgaccagctcttgtcccatggcggacaggacctctcagcagatgcctttcacaggttgatatgggaagtctggatgccttttgttcgaaatattgtcacccagtggcagccaaggaactgtgacccgatggtggactttttggatagttgggtgcacattattcctgtgtggatcttagataacatactggaccaactcatcttccccaagctgcaaaaggaggtggaaaactggaacccgctcacagacactgttcccatccactcttggatccacccatggctgccccttatgcaggcacggctggagccactctattcccccatccgtagtaagctgtccagcgccctgcagaagtggcaccccagcgactcctctgccaagctcatcctccagccctggaaggatgtcttcactcctggctcctgggaagcattcatggtcaaaaacatagtgcccaagctggggatgtgtcttggtgagctagtcattaacccccaccagcagcacatggatgcattctattgggtgattgactgggaagggatgatctctgtctctagcctggtgggacttcttgaaaagcacttcttccccaagtggcttcaggtgctgtgctcttggctcagtaacagcccaaattatgaggagatcaccaagtggtacctgggttggaagtcgatgttctcagaccaagtgctggcacatccatctgtcaaggacaaatttaatgaggcacttgatatcatgaaccgggcggtgtcctccaacgttggtgcctacatgcagccaggagcacgggagaacattgcctatctcacccacacggagcggaggaaggacttccagtacgaggccatgcaggagaggcgggaggctgagaacatggctcagaggggcattggcgtggccgctagctctgtgcccatgaactttaaggacctcattgagaccaaggctgaggagcacaacattgtcttcatgcccgtcattgggaagcgacacgaagggaagcagctctacacctttggccgcattgtgatctacatcgaccggggagtggtctttgtccagggcgagaagacgtgggtgcccacctcactgcagagcctgatcgacatggccaagtgaactgtggcaggtccagaaccagtcaga

SEQ ID NO: 323471 - DNA, 2789 bp, Artificial Sequence
  derived and/or modified sequence
atttccggcgcgccggccacggtgcttccgggttctggtgtaggagcggcgtcttctcgcgcggatggtgaagctgaatttggtacgctggaccctcggacagacagcaagagagagacaagcccgaggcctgacttctagcactcctgagtttgagccctatgagcagtggaacctaggtgactggccatgtcattgtcccacttataccgggatggggaaggccgcattgatgatgatgatgacgagcgggagaactttgagatcactgactgggatctccagaatgagttcaaccccaaccgacagcgccactggcagaccaaggaagaagccacctacggggtgtgggcagagcgagactcggatgatgagaggcccagctttggaggcaaacgggcccgtgactactctgcgccagtcaacttcatcagcgcagggctcaagaaaggggcagcggaggaggcagagttggaagattctgatgacgaagagaaacctgttaagcaggacgactttcctaaggattttggaccaaggaagctaaaaacgggtggcaattttaagcccagccagaaaggttttgcaggaggaaccaaatctttcatggacttcggcagctgggaaagacacacaaaaggaattggacagaagcttcttcagaagatgggctacgtccctggacggggcctcgggaagaatgcacaaggtatcattaacccaattgaagccaagcagagaaagggaaaaggtgctgtgggggcttatggatccgagcgcaccactcagtccatgcaagacttccctgtggttgactcagaggaagaagctgaagaggagtttcagaaggagctgagccagtggaggaaagacccaagtggaagcaagaagaagcccaaatactcttacaagaccgtggaagagttgaaggccaagggcaggattagcaagaagctcactgctccccagaaggaactttctcaagtcaaggtcatagacatgacaggccgggagcagaaggtctactacagctacagtcagatcagccacaagcacaacgttcccgatgatgggctgccgctacagtcccaacagctgccacagtctggcaaagaggccaaggcccccggcttcgcgctgcccgagctggagcacaacctgcagctgctcatcgacctcacggagcaggagatcatccagaatgaccggcagctacagtatgagcgggacatggtggtcaacctcttccacgagctggagaagatgaccgaggtcctggaccacgaggagcgggtcatctcgaacctcagcaaggtcctggagatggtggaggagtgcgagcggcggatgcagcccgactgcagcaaccccctcaccctggacgagtgtgcccgcatcttcgaaaccctgcaggacaagtactatgaggagtacaggatgtccgaccgtgtggaccttgctgtggccatcgtctatccactcatgaaggagtacttcaaggagtgggatcccctcaaagactgcacttatggcaccgagatcatctctaagtggaaaagcctcctagagaatgaccagctcttgtcccatggcggacaggacctctcagcagatgcctttcacaggttgatatgggaagtctggatgccttttgttcgaaatattgtcacccagtggcagccaaggaactgtgacccgatggtggactttttggatagttgggtgcacattattcctgtgtggatcttagataacatactggaccaactcatcttccccaagctgcaaaaggaggtggaaaactggaacccgctcacagacactgttcccatccactcttggatccacccatggctgccccttatgcaggcacggctggagccactctattcccccatccgtagtaagctgtccagcgccctgcagaagtggcaccccagcgactcctctgccaagctcatcctccagccctggaaggatgtcttcactcctggctcctgggaagcattcatggtcaaaaacatagtgcccaagctggggatgtgtcttggtgagctagtcattaacccccaccagcagcacatggatgcattctattgggtgattgactgggaagggatgatctctgtctctagcctggtgggacttcttgaaaagcacttcttccccaagtggcttcaggtgctgtgctcttggctcagtaacagcccaaattatgaggagatcaccaagtggtacctgggttggaagtcgatgttctcagaccaagtgctggcacatccatctgtcaaggacaaatttaatgaggcacttgatatcatgaaccgggcggtgtcctccaacgttggtgcctacatgcagccaggagcacgggagaacattgcctatctcacccacacggagcggaggaaggacttccagtacgaggccatgcaggagaggcgggaggctgagaacatggctcagaggggcattggcgtggccgctagctctgtgcccatgaactttaaggacctcattgagaccaaggctgaggagcacaacattgtcttcatgcccgtcattgggaagcgacacgaagggaagcagctctacacctttggccgcattgtgatctacatcgaccggggagtggtctttgtccagggcgagaagacgtgggtgcccacctcactgcagagcctgatcgacatggccaagtgaactgtggcaggtccagaaccagtcagagacttgcccctaagagggatgtactgtaaataaacagtatttttagatcaccttcaaaa

SEQ ID NO: 323472 - DNA, 2974 bp, Artificial Sequence
  derived and/or modified sequence
acaaggggactcagcgccagtgagagtagggacgaaggctcagggaaggcgagcttcggtccaagccgttggggtgtggggaggggaatccatttcgtagacagctctgccgaggcacggagaggggcggtgctgcttggggtcaactgggatttagggcttggattcatttaagaacctgagcttccttcaccaaacctagacagcaagagagagacaagcccgaggcctgacttctagcactcctgagtttgagccctatgagcagtggaacctagggaccaccaaggatccagatataattctttcctcagtaatagaaaaaagaatctgggatctaagaagatacctactcattttctaagtgactggccatgtcattgtcccacttataccgggatggggaaggccgcattgatgatgatgatgacgagcgggagaactttgagatcactgactgggatctccagaatgagttcaaccccaaccgacagcgccactggcagaccaaggaagaagccacctacggggtgtgggcagagcgagactcggatgatgagaggcccagctttggaggcaaacgggcccgtgactactctgcgccagtcaacttcatcagcgcagggctcaagaaaggggcagcggaggaggcagagttggaagattctgatgacgaagagaaacctgttaagcaggacgactttcctaaggattttggaccaaggaagctaaaaacgggtggcaattttaagcccagccagaaaggttttgcaggaggaaccaaatctttcatggacttcggcagctgggaaagacacacaaaaggaattggacagaagcttcttcagaagatgggctacgtccctggacggggcctcgggaagaatgcacaaggtatcattaacccaattgaagccaagcagagaaagggaaaaggtgctgtgggggcttatggatccgagcgcaccactcagtccatgcaagacttccctgtggttgactcagaggaagaagctgaagaggagtttcagaaggagctgagccagtggaggaaagacccaagtggaagcaagaagaagcccaaatactcttacaagaccgtggaagagttgaaggccaagggcaggattagcaagaagctcactgctccccagaaggaactttctcaagtcaaggtcatagacatgacaggccgggagcagaaggtctactacagctacagtcagatcagccacaagcacaacgttcccgatgatgggctgccgctacagtcccaacagctgccacagtctggcaaagaggccaaggcccccggcttcgcgctgcccgagctggagcacaacctgcagctgctcatcgacctcacggagcaggagatcatccagaatgaccggcagctacagtatgagcgggacatggtggtcaacctcttccacgagctggagaagatgaccgaggtcctggaccacgaggagcgggtcatctcgaacctcagcaaggtcctggagatggtggaggagtgcgagcggcggatgcagcccgactgcagcaaccccctcaccctggacgagtgtgcccgcatcttcgaaaccctgcaggacaagtactatgaggagtacaggatgtccgaccgtgtggaccttgctgtggccatcgtctatccactcatgaaggagtacttcaaggagtgggatcccctcaaagactgcacttatggcaccgagatcatctctaagtggaaaagcctcctagagaatgaccagctcttgtcccatggcggacaggacctctcagcagatgcctttcacaggttgatatgggaagtctggatgccttttgttcgaaatattgtcacccagtggcagccaaggaactgtgacccgatggtggactttttggatagttgggtgcacattattcctgtgtggatcttagataacatactggaccaactcatcttccccaagctgcaaaaggaggtggaaaactggaacccgctcacagacactgttcccatccactcttggatccacccatggctgccccttatgcaggcacggctggagccactctattcccccatccgtagtaagctgtccagcgccctgcagaagtggcaccccagcgactcctctgccaagctcatcctccagccctggaaggatgtcttcactcctggctcctgggaagcattcatggtcaaaaacatagtgcccaagctggggatgtgtcttggtgagctagtcattaacccccaccagcagcacatggatgcattctattgggtgattgactgggaagggatgatctctgtctctagcctggtgggacttcttgaaaagcacttcttccccaagtggcttcaggtgctgtgctcttggctcagtaacagcccaaattatgaggagatcaccaagtggtacctgggttggaagtcgatgttctcagaccaagtgctggcacatccatctgtcaaggacaaatttaatgaggcacttgatatcatgaaccgggcggtgtcctccaacgttggtgcctacatgcagccaggagcacgggagaacattgcctatctcacccacacggagcggaggaaggacttccagtacgaggccatgcaggagaggcgggaggctgagaacatggctcagaggggcattggcgtggccgctagctctgtgcccatgaactttaaggacctcattgagaccaaggctgaggagcacaacattgtcttcatgcccgtcattgggaagcgacacgaagggaagcagctctacacctttggccgcattgtgatctacatcgaccggggagtggtctttgtccagggcgagaagacgtgggtgcccacctcactgcagagcctgatcgacatggccaagtgaactgtggcaggtccagaaccagtcagagacttgcccctaagagggatgtactgtaaataaacagtatttttagatcaccttcaaaa

SEQ ID NO: 323473 - DNA, 3586 bp, Artificial Sequence
  derived and/or modified sequence
actaacgtcatttccggcgcgccggccacggtgcttccgggttctggtgtaggagcggcgtcttctcgcgcggatggtgaagctgaatttggtacgctggaccctcggacagacagcaagagagagacaagcccgaggcctgacttctagcactcctgagtttgagccctatgagcagtggaacctagggaccaccaaggatccagatataattctttcctcagtaatagaaaaaagaatctgggatctaagaagatacctactcattttctaagtgactggccatgtcattgtcccacttataccgggatggggaaggccgcattgatgatgatgatgacgagcgggagaactttgagatcactgactgggatctccagaatgagttcaaccccaaccgacagcgccactggcagaccaaggaagaagccacctacggggtgtgggcagagcgagactcggatgatgagaggcccagctttggaggcaaacgggcccgtgactactctgcgccagtcaacttcatcagcgcagggctcaagaaaggggcagcggaggaggcagagttggaagattctgatgacgaagagaaacctgttaagcaggacgactttcctaaggattttggaccaaggaagctaaaaacgggtggcaattttaagcccagccagaaaggttttgcaggaggaaccaaatctttcatggacttcggcagctgggaaagacacacaaaaggaattggacagaagcttcttcagaagatgggctacgtccctggacggggcctcgggaagaatgcacaaggtatcattaacccaattgaagccaagcagagaaagggaaaaggtgctgtgggggcttatggatccgagcgcaccactcagtccatgcaagacttccctgtggttgactcagaggaagaagctgaagaggagtttcagaaggagctgagccagtggaggaaagacccaagtggaagcaagaagaagcccaaatactcttacaagaccgtggaagagttgaaggccaagggcaggattagcaagaagctcactgctccccagaaggaactttctcaagtcaaggtcatagacatgacaggccgggagcagaaggtctactacagctacagtcagatcagccacaagcacaacgttcccgatgatgggctgccgctacagtcccaacagctgccacagtctggcaaagaggccaaggcccccggcttcgcgctgcccgagctggagcacaacctgcagctgctcatcgacctcacggagcaggagatcatccagaatgaccggcagctacagtatgagcgggacatggtggtcaacctcttccacgagctggagaagatgaccgaggtcctggaccacgaggagcgggtcatctcgaacctcagcaaggtcctggagatggtggaggagtgcgagcggcggatgcagcccgactgcagcaaccccctcaccctggacgagtgtgcccgcatcttcgaaaccctgcaggacaagtactatgaggagtacaggatgtccgaccgtgtggaccttgctgtggccatcgtctatccactcatgaaggagtacttcaaggagtgggatcccctcaaagactgcacttatggcaccgagatcatctctaagtggaaaagcctcctagagaatgaccagctcttgtcccatggcggacaggacctctcagcagatgcctttcacaggttgatatgggaagtctggatgccttttgttcgaaatattgtcacccagtggcagccaaggaactgtgacccgatggtggactttttggatagttgggtgcacattattcctgtgtggatcttagataacatactggaccaactcatcttccccaagctgcaaaaggaggtggaaaactggaacccgctcacagacactgttcccatccactcttggatccacccatggctgccccttatgcaggcacggctggagccactctattcccccatccgtagtaagctgtccagcgccctgcagaagtggcaccccagcgactcctctgccaagctcatcctccagccctggaaggatgtcttcactcctggctcctgggaagcattcatggtcaaaaacatagtgcccaagctggggatgtgtcttggtgagctagtcattaacccccaccagcagcacatggatgcattctattgggtgattgactgggaagggatgatctctgtctctagcctggtgggacttcttgaaaagcacttcttccccaagtggcttcaggtgctgtgctcttggctcagtaacagcccaaattatgaggagatcaccaagtggtacctgggttggaagtcgatgttctcagaccaagtgctggcacatccatctgtcaaggacaaatttaatgaggcacttgatatcatgaaccgggcggtgtcctccaacgttggtgcctacatgcagccaggagcacgggagaacattgcctatctcacccacacggagcggaggaaggacttccagtacgaggccatgcaggagaggcgggaggctgagaacatggctcagaggggcattggcgtggccgctagctctgtgcccatgaactttaaggacctcattgagaccaaggctgaggagcacaacattgtcttcatgcccgtcattgggaagcgacacgaagggaagcagctctacacctttggccgcattgtgatctacatcgaccggggagtggtctttgtccagggcgagaagacgtgggtgcccacctcactgcagagcctgatcgacatggccaagtgaactgtggcaggtccagaaccagtcagagacttgcccctaagagggatgtactgtaaataaacagtatttttagatcaccttcaaaagggtaacttctttactcaggagctactccacatcaggccaggtcatgagggaaggatgtaaaatgggacaatgccacgtagggcaggaatctttataccaagtcctcatgtggggtatcgtcctcaaaacaggacagccaagttgatgttctttcctggcaaaggagttctctgtagttcctccatagcagccttccctttagtctctggtggcagcttctacctcagccaacactgagtacctcacaacgagttcagtcagtagcagaaggatcttctctcttgttcctgatgatttcaaggtcctcacagtcctgataatctggttcttcccgaaactcccaaatatctatggagagctgttctagcttttgcacagggaaccagtggacagaggtatcattaaatatgtccatgtattgtgaagtctgaggaaactcaagctcctccagtccttttaaaatctgagcagaaaaattcaagtataaaaacttcagatagtcacagtaatccccactcttctgggataaatttccactttacttgtcatccccactttactttttaaaaaaataacaaatagggtattttgatttaaatgcttttgcacaatgaattgggcgccccaaggacagtggatatcatggactgtgatactaagaataaaggaaataaggaaaaaactaagagatgcattaaaga

SEQ ID NO: 323474 - DNA, 563 bp, Artificial Sequence
  derived and/or modified sequence
acggtgcttccgggttctggtgtaggagcggcgtcttctcgcgcggatggtgaagctgaatttggtacgctggaccctcggacagacagcaagagagagacaagcccgaggcctgacttctagcactcctgagtttgagccctatgagcagtggaacctaggttcttcagctttggaacttgactggctctccttgctcctcagcctgcagacagcctattgtgggaccttttgatcgttaatagaaaaaagaatctgggatctaagaagatacctactcattttctaagtgactggccatgtcattgtcccacttataccgggatggggaaggccgcattgatgatgatgatgacgagcgggagaactttgagatcactgactgggatctccagaatgagttcaaccccaaccgacagcgccactggcagaccaaggaagaagccacctacggggtgtgggcagagcgagactcggatgatgagaggcccagctttggaggcaaacgggcccgtgactactctgcgccagtcaacttcatcagcgcagggctcaagaaaggg

SEQ ID NO: 323475 - DNA, 525 bp, Artificial Sequence
  derived and/or modified sequence
atttccggcgcgccggccacggtgcttccgggttctggtgtaggagcggcgtcttctcgcgcggatggtgaagctgaatttggtacgctggaccctcggacagacagcaagagagagacaagcccgaggcctgacttctagcactcctgagtttgagccctatgagcagtggaacctagggatccagatataattctttcctcagtaatagaaaaaagaatctgggatctaagaagatacctactcattttctaagtgactggccatgtcattgtcccacttataccgggatggggaaggccgcattgatgatgatgatgacgagcgggagaactttgagatcactgactgggatctccagaatgagttcaaccccaaccgacagcgccactggcagaccaaggaagaagccacctacggggtgtgggcagagcgagactcggatgatgagaggcccagctttggaggcaaacgggcccgtgactactctgcgccagtcaacttcatcagcgcagggctcaagaa

SEQ ID NO: 323476 - DNA, 595 bp, Artificial Sequence
  derived and/or modified sequence
gcgcgccggccacggtgcttccgggttctggtgtaggagcggcgtcttctcgcgcggatggtgaagctgaatttggtacgctggaccctcggacagacagcaagagagagacaagcccgaggcctgacttctagcactcctgagtttgagccctatgagcagtggaacctaggctgccagcacggcaagaatataagcaggcagaaaaatgtgaaaagagagactggcctagcctcccagcctatatctttctcctgtgctggatgcttcctgccctcgaacattggacttcaagttcttcagctttggaacttgactggctctccttgctcctcagcctgcagacagcctattgtgggaccttttgatcgtgaccaccaaggatccagatataattctttcctcagtaatagaaaaaagaatctgggatctaagaagatacctactcattttctaagtgactggccatgtcattgtcccacttataccgggatggggaaggccgcattgatgatgatgatgacgagcgggagaactttgagatcactgactgggatctccagaatgagttcaaccccaaccgacagcgccactg

SEQ ID NO: 323477 - DNA, 1650 bp, Artificial Sequence
  derived and/or modified sequence
atgtcattgtcccacttataccgggatggggaaggccgcattgatgatgatgatgacgagcgggagaactttgagatcactgactgggatctccagaatgagttcaacctcttccacgagctggagaagatgaccgaggtcctggaccacgaggagcgggtcatctcgaacctcagcaaggtcctggagatggtggaggagtgcgagcggcggatgcagcccgactgcagcaaccccctcaccctggacgagtgtgcccgcatcttcgaaaccctgcaggacaagtactatgaggagtacaggatgtccgaccgtgtggaccttgctgtggccatcgtctatccactcatgaaggagtacttcaaggagtgggatcccctcaaagactgcacttatggcaccgagatcatctctaagtggaaaagcctcctagagaatgaccagctcttgtcccatggcggacaggacctctcagcagatgcctttcacaggttgatatgggaagtctggatgccttttgttcgaaatattgtcacccagtggcagccaaggaactgtgacccgatggtggactttttggatagttgggtgcacattattcctgtgtggatcttagataacatactggaccaactcatcttccccaagctgcaaaaggaggtggaaaactggaacccgctcacagacactgttcccatccactcttggatccacccatggctgccccttatgcaggcacggctggagccactctattcccccatccgtagtaagctgtccagcgccctgcagaagtggcaccccagcgactcctctgccaagctcatcctccagccctggaaggatgtcttcactcctggctcctgggaagcattcatggtcaaaaacatagtgcccaagctggggatgtgtcttggtgagctagtcattaacccccaccagcagcacatggatgcattctattgggtgattgactgggaagggatgatctctgtctctagcctggtgggacttcttgaaaagcacttcttccccaagtggcttcaggtgctgtgctcttggctcagtaacagcccaaattatgaggagatcaccaagtggtacctgggttggaagtcgatgttctcagaccaagtgctggcacatccatctgtcaaggacaaatttaatgaggcacttgatatcatgaaccgggcggtgtcctccaacgttggtgcctacatgcagccaggagcacgggagaacattgcctatctcacccacacggagcggaggaaggacttccagtacgaggccatgcaggagaggcgggaggctgagaacatggctcagaggggcattggcgtggccgctagctctgtgcccatgaactttaaggacctcattgagaccaaggctgaggagcacaacattgtcttcatgcccgtcattgggaagcgacacgaagggaagcagctctacacctttggccgcattgtgatctacatcgaccggggagtggtctttgtccagggcgagaagacgtgggtgcccacctcactgcagagcctgatcgacatggccaagtgaactgtggcaggtccagaaccagtcagagacttgcccctaagagggatgtactgtaaataaacagtatttttagatcacctt

SEQ ID NO: 323478 - DNA, 571 bp, Artificial Sequence
  derived and/or modified sequence
ctggacggggcctcgggaagaatgcacaaggtatcattaacccaattgaagccaagcagagaaagggaaaaggtgctgtgggggcttatggatccgagcgcaccactcagtccatgcaagacttccctgtggttgactcagaggaagaagctgaagagtggttgttccttgctgcatctgactgtattcttctggttcaggagtttcagaaggagctgagccagtggaggaaagacccaagtggaagcaagaagaagcccaaatactcttacaagaccgtggaagagttgaaggccaagggcaggattagcaagaagctcactgctccccagaaggaactttctcaagtcaaggtcatagacatgacaggccgggagcagaaggtctactacagctacagtcagatcagccacaagcacaacgttcccgatgatgggctgccgctacagtcccaacagctgccacagtctggcaaagaggccaaggcccccggcttcgcgctgcccgagctggagcacaacctgcagctgctcatcgacctcacggagcaggagatcatccagaatgaccg

SEQ ID NO: 323479 - DNA, 638 bp, Artificial Sequence
  derived and/or modified sequence
ggtgtaggagcggcgtcttctcgcgcggatggtgaagctgaatttggtacgctggaccctcggacagacagcaagagagagacaagcccgaggcctgacttctagcactcctgagtttgagccctatgagcagtggaacctaggcctgcagacagcctattgtgggaccttttgatcgtgaccaccaaggatccagatataattctttcctcagtaatagaaaaaagaatctgggatctaagaagatacctactcattttctaagtgactggccatgtcattgtcccacttataccgggatggggaaggccgcattgatgatgatgatgacgagcgggagaactttgagatcactgactgggatctccagaatgagttcaaccccaaccgacagcgccactggcagaccaaggaagaagccacctacggggtgtgggcagagcgagactcggatgatgagaggcccagctttggaggcaaacgggcccgtgactactctgcgccagtcaacttcatcagcgcagggctcaagaaaggggcagcggaggaggcagagttggaagattctgatgacgaagagaaacctgttaagcaggacgactttcctaaggattttggaccaaggaagctaaaaacgg

SEQ ID NO: 323480 - protein, 264 aa, Artificial Sequence
  derived and/or modified sequence
MEKPILKNLNEMLCPIIASEVKALNANLSTLEVLTKIDNYTLLDYSLISSPEITENYLDLNLKGVFYPLENLTDPPFSPVPFVLPERSNSMLYIGIAEYFFKSASFAHFTAGVFNVTLSTEEISNHFVQNSQGLGNVLSRVASTSVGLVILGQRLVCSLSLNRFRLALPESNRSNIEVLRFENILSSILHFGVLPLANAKLQQGFPLSNPHKFLFVNSDIEVLEGFLLISTDLKYETSSKQQPSFHVWEGLNLISRQWRGKSAP

SEQ ID NO: 323481 - DNA, 1487 bp, Artificial Sequence
  derived and/or modified sequence
aacacatcagcttcaaaggcagagagaatcgaaggtgctctccagctttggacacttcctctgcttgaggacaccttgactaacctccaagggcaactaaaggatcaagaaaggcccagcacagcagaagatcagctggatctagctcctgcaggagatgtgtacaaagacaatcccagtcctctggggatgtttcctcctgtggaatctctatgtctcatcctctcagaccatttaccctggaatcaaggtgttcaagctggaatgaagatgattgagcaaatgctaaaagaaaagaaactcccagatttaagcggttctgagtctcttgaatttctaaaagttgattatgtaaactacaatttttcaaatataaaaatcagtgccttttcatttccaaatacctcattggcttttgtgcctggagtgggaatcaaagcgctaaccaaccatggcactgccaacatcagcacagactgggggttcgagtctccacttttctctgtcccattattgcaagtgaagtcaaagcgctaaatgccaacctcagcacactggaggttttaaccaagattgacaactacactctgctggattactccctaatcagttctccagaaattactgagaactaccttgacctgaacttgaagggtgtattctacccactggaaaacctcaccgacccccccttctcaccagttccttttgtgctcccagaacgcagcaactccatgctctacattggaatcgccgagtatttctttaaatctgcgtcctttgctcatttcacagctggggttttcaatgtcactctctccaccgaagagatttccaaccattttgttcaaaactctcaaggccttggcaacgtgctctcccggattgcagagatctacatcttgtcccagcccttcatggtgaggatcatggccacagagcctcccataatcaatctacaaccaggcaatttcaccctggacatccctgcctccatcatgatgctcacccaacccaagaactccacagttgaaaccatcgtttccatggacttcgttgctagtaccagtgttggcctggttattttgggacaaagactggtctgctccttgtctctgaacagattccgccttgctttgccagagtccaatcgcagcaacattgaggtcttgaggtttgaaaatattctatcgtccattcttcactttggagtcctcccactggccaatgcaaaattgcagcaaggatttcctctgtccaatccacacaaattcttattcgtcaattcagatattgaagttcttgagggtttccttttgatttccaccgacctgaagtatgaaacatcctcaaagcagcagccaagtttccacgtatgggaaggtctgaacctgataagcagacagtggagggggaagtcagccccttgattgccggtttgcaattcaccccaggaagtaaatggtccttaatcctacaactactgt

SEQ ID NO: 323482 - protein, 231 aa, Artificial Sequence
  derived and/or modified sequence
MLYIGIAEYFFKSASFAHFTAGVFNVTLSTEEISNHFVQNSQGLGNVLSRIAEIYILSQPFMVRIMATEPPIINLQPGNFTLDIPASIMMLTQPKNSTVETIVSMDFVASTSVGLVILGQRLVCSLSLNRFRLALPESNRSNIEVLRFENILSSILHFGVLPLANAKLQQGFPLSNPHKFLFVNSDIEVLEGFLLISTDLKYETSSKQQPSFHVWEGLNLISRQWRGKSAP

SEQ ID NO: 323483 - DNA, 795 bp, Artificial Sequence
  derived and/or modified sequence
atggaaaagcccattctgaaaaacctcaatgaaatgctgtgtcctatcatcgccagcgaggtgaaggccctgaacgcaaatctcagcaccttggaagttcttacaaagatcgacaattacactctattagattattcactcatctcttctcccgagatcactgagaactatcttgacctgaatcttaagggggttttttaccccttggaaaacctgacagaccctcctttctcaccagtaccttttgtactgcctgagaggagtaacagtatgctgtatatcggcatcgctgaatatttcttcaagagtgccagctttgctcatttcacagccggagtgttcaacgtgaccctctccacagaagagatcagcaatcacttcgtccaaaactcccagggtcttggcaacgtgctgtcccgcgtcgctagtacctcagtggggctggtaattctcggccagcgcctagtgtgctcgctgtctctcaaccgctttaggttagccctgcctgagagtaatagatcgaacattgaagtgctacgtttcgagaatattctgtcatccatcttgcatttcggcgtgctccctctggcaaacgccaaactccagcagggcttcccgctgagtaacccacacaaattcctcttcgtaaattctgatattgaagttctggagggtttcctattgatctctacggatcttaagtacgagaccagctcaaaacagcaaccctcctttcatgtgtgggaggggctgaacctaataagtcgacaatggagaggcaaatctgcaccctag

SEQ ID NO: 323484 - DNA, 696 bp, Artificial Sequence
  derived and/or modified sequence
atgctctacattggtattgcagagtatttcttcaaaagcgcctctttcgcccattttaccgcgggagtgtttaatgtgacactcagtacagaggagatcagtaaccactttgtgcagaattcacagggtttagggaacgtgctgtctcggatcgctgagatttacatactgtctcagccgttcatggtgcggataatggccacagagccacccattataaacttgcagccaggtaacttcactctggatattcctgccagcatcatgatgctgacccagcctaaaaactctacggttgaaaccatcgtatcgatggactttgtggcgtccacgtccgtggggctggtgattcttggacagaggcttgtttgttccctttcccttaataggttccgcctggcactgccagaatctaaccgttctaatattgaggtgttgcgctttgagaacatcttgtcctctattcttcatttcggggtactgcctttggccaacgcgaagctgcaacagggttttcctttgtctaacccacataagtttctgttcgtgaacagcgacatcgaggtccttgagggatttctcctcatctctaccgatttgaaatacgaaacatcaagcaagcagcagccaagcttccatgtttgggagggcctgaacctgatttcacgtcagtggcgcggaaagtctgcaccttag

SEQ ID NO: 323485 - DNA, 795 bp, Artificial Sequence
  derived and/or modified sequence
atggaaaaacctatcctgaaaaatcttaacgagatgctttgcccaatcattgcttctgaagtgaaagctctcaatgctaatctgagtaccttagaggtgcttaccaaaattgataactatacactcctcgactattcgcttatatcatctcctgagattacagaaaactatctcgatttaaacctcaagggcgtcttctaccccctcgagaatctgaccgacccaccattctcgccagtgccttttgtgctgcctgagagatcaaatagcatgctttacataggcatcgcagaatatttcttcaagtcggcgtcctttgcccatttcacagccggagtgttcaacgtgaccttaagtacagaggagatcagtaaccattttgtccagaattctcaaggtctcggcaatgtcctgagccgcgtggccagtaccagcgtggggctagtgattctcggtcaaagattggtgtgctctttgtccctcaacaggtttagactggctctcccagaatccaatagatctaatatcgaggtactgcgttttgagaacatactgagcagcatcctgcattttggtgtcttacctcttgcgaacgccaaactccagcaggggttccccctgtcaaatccacacaaattcctgttcgtgaatagcgatatcgaggtcctcgaaggctttcttctcatcagcacggatctcaaatatgaaacctcttccaagcagcagccatcgtttcacgtgtgggaaggactaaatcttatatctcgccaatggcgcggtaagtctgcaccatag

SEQ ID NO: 323486 - DNA, 696 bp, Artificial Sequence
  derived and/or modified sequence
atgttatatataggcatcgccgaatacttttttaaatcagcctcatttgcccactttaccgctggcgtgttcaatgtgaccctctccacggaagaaatttctaatcatttcgtccagaattctcaaggattgggcaatgtgcttagcaggatagctgaaatatatatcctctcccagccgtttatggtcaggattatggctaccgagccacctattatcaacctgcagcctggaaactttacccttgacattcctgctagcattatgatgctaacccaaccaaaaaattcaaccgtcgaaacaattgtctcaatggactttgttgcatctaccagtgtagggctggtgattcttgggcagagactcgtttgctccctctcgctcaaccggttccgccttgccctcccggaaagcaaccgctcaaacattgaagttctacgcttcgagaatattcttagctctatactccactttggcgtgcttcccttagcaaatgcgaaactccagcaggggttccctttgtccaatccacacaagttcttgttcgtgaacagcgatatcgaggtccttgagggatttctgctcatcagcaccgaccttaagtacgaaacgtcatcgaagcaacagccctcttttcacgtttgggaaggactgaatctgatttcccgccagtggcgcggcaaatccgccccttag

SEQ ID NO: 323487 - DNA, 795 bp, Artificial Sequence
  derived and/or modified sequence
atggaaaagccgatcttaaaaaacctcaacgaaatgctctgtccaatcattgctagcgaagtgaaagcgctgaatgccaatctgagcacacttgaggtccttactaaaattgataactacacactgctggactattctttaatctcctcccccgaaatcaccgagaactacctggacctaaatttgaagggtgtcttctatcccctcgagaaccttactgatccgccattctcccctgtcccatttgtgctacctgaacgcagcaactccatgctctacataggtattgccgagtacttctttaagagcgccagtttcgctcactttactgccggcgtattcaacgtgaccctatctactgaagagatatccaatcattttgttcagaacagtcagggactgggcaatgtactttcacgtgtagcttcaaccagcgtggggcttgtcatcttgggccaaagacttgtctgttccctttcactgaaccgctttagacttgcacttccagaatcgaatcgttctaatattgaggttttacgtttcgaaaacatcttgtcaagcatcctgcatttcggtgtcctcccactggccaatgccaagctgcagcaaggatttcctttatctaatcctcataaattcctctttgttaattctgatattgaagtcctagaaggatttctgctcatatccacggacctcaaatacgagacctcctctaaacagcagccgagttttcacgtctgggagggtctcaatcttatctctaggcaatggcgcggcaaatctgccccttag

SEQ ID NO: 323488 - DNA, 696 bp, Artificial Sequence
  derived and/or modified sequence
atgttatatataggcatcgccgaatacttttttaaatcagcctcatttgcccactttaccgctggcgtgttcaatgtgaccctctccacggaagaaatttctaatcatttcgtccagaattctcaaggattgggcaatgtgcttagcaggatagctgaaatatatatcctctcccagccgtttatggtcaggattatggctaccgagccacctattatcaacctgcagcctggaaactttacccttgacattcctgctagcattatgatgctaacccaaccaaaaaattcaaccgtcgaaacaattgtgagtatggactttgtggccagcacctctgtcggtttagttatcctcggacaacgactagtctgctcattgtccctgaataggtttcgcttagcccttcccgagtccaataggtccaatatcgaggtccttcgtttcgaaaacattctctcaagtatcttgcattttggagtgcttcctctcgccaatgccaagttgcagcaaggctttccactcagtaacccacataagttccttttcgtgaacagcgacatcgaagtcctggaggggtttctcctaatttcaacggacctaaaatatgagactagttcaaagcaacaaccaagcttccacgtgtgggaaggacttaatctgattagccgtcagtggaggggcaagagtgcaccatag

SEQ ID NO: 323489 - DNA, 795 bp, Artificial Sequence
  derived and/or modified sequence
atggagaagcccatcctgaagaacctgaacgagatgctgtgccccatcatcgccagcgaggtgaaggccctgaacgccaacctgagcaccctggaggtgctgaccaagatcgacaactacaccctgctggactacagcctgatcagcagccccgagatcaccgagaactacctggacctgaacctgaagggcgtgttctaccccctggagaacctgaccgacccccccttcagccccgtgcccttcgtgctgcccgagagaagcaacagcatgctgtacatcggcatcgccgagtacttcttcaagagcgccagcttcgcccacttcaccgccggcgtgttcaacgtgaccctgagcaccgaggagatcagcaaccacttcgtgcagaacagccagggcctgggcaacgtgctgagcagagtggccagcaccagcgtgggcctggtgatcctgggccagagactggtgtgcagcctgagcctgaacagattcagactggccctgcccgagagcaacagaagcaacatcgaggtgctgagattcgagaacatcctgagcagcatcctgcacttcggcgtgctgcccctggccaacgccaagctgcagcagggcttccccctgagcaacccccacaagttcctgttcgtgaacagcgacatcgaggtgctggagggcttcctgctgatcagcaccgacctgaagtacgagaccagcagcaagcagcagcccagcttccacgtgtgggagggcctgaacctgatcagcagacagtggagaggcaagagcgccccctag

SEQ ID NO: 323490 - DNA, 696 bp, Artificial Sequence
  derived and/or modified sequence
atgctgtacatcggcatcgccgagtacttcttcaagagcgccagcttcgcccacttcaccgccggcgtgttcaacgtgaccctgagcaccgaggagatcagcaaccacttcgtgcagaacagccagggcctgggcaacgtgctgagcagaatcgccgagatctacatcctgagccagcccttcatggtgagaatcatggccaccgagccccccatcatcaacctgcagcccggcaacttcaccctggacatccccgccagcatcatgatgctgacccagcccaagaacagcaccgtggagaccatcgtgagcatggacttcgtggccagcaccagcgtgggcctggtgatcctgggccagagactggtgtgcagcctgagcctgaacagattcagactggccctgcccgagagcaacagaagcaacatcgaggtgctgagattcgagaacatcctgagcagcatcctgcacttcggcgtgctgcccctggccaacgccaagctgcagcagggcttccccctgagcaacccccacaagttcctgttcgtgaacagcgacatcgaggtgctggagggcttcctgctgatcagcaccgacctgaagtacgagaccagcagcaagcagcagcccagcttccacgtgtgggagggcctgaacctgatcagcagacagtggagaggcaagagcgccccctag

SEQ ID NO: 323491 - DNA, 795 bp, Artificial Sequence
  derived and/or modified sequence
atggaaaagcctatactcaagaatttaaatgagatgctgtgccccatcattgctagtgaggtgaaggcattgaatgccaacctgagtacacttgaggtgcttaccaaaatagacaactatacattgttggactactctctcatcagctcaccggagattacagagaattacctcgacctcaatctgaagggggtattttatccccttgagaatttgaccgaccccccctttagccctgtgccttttgtcctccccgagaggagtaattctatgctgtacatcggcattgccgagtatttctttaaaagcgcctcattcgctcacttcactgctggcgttttcaatgtcaccctctctacagaagagataagtaatcactttgtccagaattctcagggcctcgggaatgtcttatcaagggttgccagtacatcggtgggattggtgatcctcgggcagcgcctagtgtgcagcctctccctgaacagatttcgccttgccttgcccgagtctaatcgctcgaacattgaggtactcaggtttgagaacatcctaagcagtatcctccattttggcgtcttgcccctggccaatgccaagctccagcaggggttcccccttagcaaccctcacaaattcctgttcgtaaatagtgacatcgaggtgctggagggcttcttgctgattagtaccgatctcaaatatgagacgtcgagcaaacagcagccatctttccacgtatgggagggattgaacctgataagccggcaatggagaggtaagtctgccccatag

SEQ ID NO: 323492 - DNA, 696 bp, Artificial Sequence
  derived and/or modified sequence
atgctgtacatcgggattgcagagtacttcttcaagtctgcctcctttgcccatttcacagcaggagtgtttaatgtgacattgtctactgaagaaatttctaatcatttcgtacagaatagtcaaggcttagggaacgtcctatcccgaattgctgagatctacatcctgagtcagcctttcatggtccggataatggccacggaacccccaatcatcaaccttcagcccgggaatttcacactcgatatccctgcgtcaattatgatgctcacccaaccaaaaaatagcaccgtggaaaccatcgtgtcaatggactttgtcgccagtacgtcggttgggctcgtgatcctgggccaacggctggtgtgcagcttatccctgaatcgtttccgactggcactccccgaatctaacaggagcaatatcgaagttctgcggttcgagaacattctcagttcaatcctccactttggcgtcctgcctcttgcaaacgccaagcttcagcagggttttccactgtcaaatccccacaaattcctgttcgttaattccgatatcgaggtgcttgaaggctttctgctcatcagcaccgacctaaaatacgaaacctcctcgaagcagcagccatcctttcacgtttgggagggactcaacctgatctctaggcagtggcgaggaaaaagcgctccatag

SEQ ID NO: 323493 - DNA, 795 bp, Artificial Sequence
  derived and/or modified sequence
atggagaagcccatcctgaagaacctgaatgagatgctgtgccccatcatcgccagcgaggtgaaggccctgaatgccaacctgagcaccctggaggtgctgaccaagattgacaactacaccctgctggactacagcctcatcagcagccctgagatcacagagaactacctggacctgaacctgaagggcgtcttctaccccctggagaacctgacagatcctcccttcagccctgtgccctttgtgctgcctgagaggagcaacagcatgctgtacatcggcattgctgagtacttcttcaagagcgccagctttgcccacttcaccgctggggtcttcaacgtgaccctgagcacagaggagatcagcaaccactttgtgcagaacagccagggcctgggcaatgtgctgagccgggtggccagcacctctgtgggcctggtgatcctgggccagaggctggtgtgcagcctgagcctgaaccgcttccggctggccctgcctgagagcaacagaagcaacatcgaggtgctgcgctttgagaacatcctgagcagcatcctgcactttggagtgctgcccctggccaatgccaagctgcagcagggcttccccctgagcaacccccacaagttcctgtttgtgaacagcgacatcgaggtgctggagggcttcctgctgatcagcacagacctgaagtatgagaccagcagcaagcagcagcccagcttccacgtgtgggagggcctgaacctgatcagccggcagtggaggggcaagagcgccccctag

SEQ ID NO: 323494 - DNA, 696 bp, Artificial Sequence
  derived and/or modified sequence
atgctgtacatcggcattgctgagtacttcttcaagagcgccagctttgcccacttcaccgctggggtcttcaacgtgaccctgagcacagaggagatcagcaaccactttgtgcagaacagccagggcctgggcaatgtgctgagcagaattgctgagatctacatcctgagccagcccttcatggtgcgcatcatggccacagagccccccatcatcaacctgcagcccggcaacttcaccctggacatcccagccagcatcatgatgctgacccagcccaagaacagcacagtggagaccatcgtgtccatggactttgtggccagcacctctgtgggcctggtgatcctgggccagaggctggtgtgcagcctgagcctgaaccgcttccggctggccctgcctgagagcaacagaagcaacatcgaggtgctgcgctttgagaacatcctgagcagcatcctgcactttggagtgctgcccctggccaatgccaagctgcagcagggcttccccctgagcaacccccacaagttcctgtttgtgaacagcgacatcgaggtgctggagggcttcctgctgatcagcacagacctgaagtatgagaccagcagcaagcagcagcccagcttccacgtgtgggagggcctgaacctgatcagccggcagtggaggggcaagagcgccccctag

SEQ ID NO: 323495 - DNA, 795 bp, Artificial Sequence
  derived and/or modified sequence
atggagaagcccatcctgaagaacctgaacgagatgctgtgccccataattgcgtccgaggtcaaagctctgaacgcaaacttatctaccctcgaagtcctgactaagatcgataactacaccttgctggactattcgctgatatcttcccctgagattacagagaactacctcgatttgaaccttaagggagtcttctatcccttagagaatcttacggaccctccattctcacctgtgcccttcgtgttgcctgagcggtccaattccatgctctacattggaatcgctgaatattttttcaaaagtgctagttttgctcactttaccgcaggtgtctttaatgtcaccctgtccaccgaagaaattagcaatcattttgtccagaatagccaaggcctaggtaacgtcctgtcccgcgtggcctctacctccgtgggcctggtgatcctgggtcaacggcttgtttgtagcctgtcactcaaccgctttcgcctggctctgcccgagtcgaaccggtctaacatcgaagtcttgcggttcgagaacattttaagctcaattctgcattttggcgtccttcctttggctaacgcgaaactacagcaggggtttcctctgtctaacccacacaaatttctctttgtgaactccgacattgaggtcctagaaggctttttgcttatcagcaccgatttgaaatatgagactagcagcaagcagcaaccatcttttcacgtttgggagggtcttaacttgataagcagacagtggcgcggtaaatctgccccttag

SEQ ID NO: 323496 - DNA, 696 bp, Artificial Sequence
  derived and/or modified sequence
atgctgtacatcggcatcgccgagtacttcttcaagagcgccagcttcgcccacttcactgctggggtctttaatgttactctgtccaccgaagagattagtaaccatttcgtccagaacagccaaggcctgggcaacgttcttagccggatcgctgagatctacatcctgtcgcagcccttcatggtgaggataatggcaactgagccaccgattataaatttgcagccaggcaattttactctcgacatccccgctagtattatgatgctgacccagccaaagaacagtacagtcgagacaatcgtctccatggatttcgtggcctccacgtcagtaggcttggttatcctcgggcaacggctggtctgttccctgtccttaaatcgcttcaggctcgcactgcctgagagcaaccggtccaacatcgaggtgcttaggtttgagaatatactgtcctcgatactgcacttcggtgtgctccccctggccaatgccaaattgcagcagggattcccgctaagcaacccccataaattcttgttcgtcaattcagacatagaggtgttggaaggtttcctgctaatatctacagacctgaaatatgaaactagctcaaaacaacagccctcgttccatgtttgggaagggctgaacctgatcagcaggcagtggcgaggcaaatcagccccctag

SEQ ID NO: 323497 - RNA, 795 nt, Artificial Sequence
  derived and/or modified sequence
auggaaaaaccuauccugaaaaaucuuaacgagaugcuuugcccaaucauugcuucugaagugaaagcucucaaugcuaaucugaguaccuuagaggugcuuaccaaaauugauaacuauacacuccucgacuauucgcuuauaucaucuccugagauuacagaaaacuaucucgauuuaaaccucaagggcgucuucuacccccucgagaaucugaccgacccaccauucucgccagugccuuuugugcugccugagagaucaaauagcaugcuuuacauaggcaucgcagaauauuucuucaagucggcguccuuugcccauuucacagccggaguguucaacgugaccuuaaguacagaggagaucaguaaccauuuuguccagaauucucaaggucucggcaauguccugagccgcguggccaguaccagcguggggcuagugauucucggucaaagauuggugugcucuuugucccucaacagguuuagacuggcucucccagaauccaauagaucuaauaucgagguacugcguuuugagaacauacugagcagcauccugcauuuuggugucuuaccucuugcgaacgccaaacuccagcagggguucccccugucaaauccacacaaauuccuguucgugaauagcgauaucgagguccucgaaggcuuucuucucaucagcacggaucucaaauaugaaaccucuuccaagcagcagccaucguuucacgugugggaaggacuaaaucuuauaucucgccaauggcgcgguaagucugcaccauag

SEQ ID NO: 323498 - RNA, 696 nt, Artificial Sequence
  derived and/or modified sequence
auguuauauauaggcaucgccgaauacuuuuuuaaaucagccucauuugcccacuuuaccgcuggcguguucaaugugacccucuccacggaagaaauuucuaaucauuucguccagaauucucaaggauugggcaaugugcuuagcaggauagcugaaauauauauccucucccagccguuuauggucaggauuauggcuaccgagccaccuauuaucaaccugcagccuggaaacuuuacccuugacauuccugcuagcauuaugaugcuaacccaaccaaaaaauucaaccgucgaaacaauugucucaauggacuuuguugcaucuaccaguguagggcuggugauucuugggcagagacucguuugcucccucucgcucaaccgguuccgccuugcccucccggaaagcaaccgcucaaacauugaaguucuacgcuucgagaauauucuuagcucuauacuccacuuuggcgugcuucccuuagcaaaugcgaaacuccagcagggguucccuuuguccaauccacacaaguucuuguucgugaacagcgauaucgagguccuugagggauuucugcucaucagcaccgaccuuaaguacgaaacgucaucgaagcaacagcccucuuuucacguuugggaaggacugaaucugauuucccgccaguggcgcggcaaauccgccccuuag

SEQ ID NO: 323499 - RNA, 795 nt, Artificial Sequence
  derived and/or modified sequence
auggaaaagccgaucuuaaaaaaccucaacgaaaugcucuguccaaucauugcuagcgaagugaaagcgcugaaugccaaucugagcacacuugagguccuuacuaaaauugauaacuacacacugcuggacuauucuuuaaucuccucccccgaaaucaccgagaacuaccuggaccuaaauuugaagggugucuucuauccccucgagaaccuuacugauccgccauucuccccugucccauuugugcuaccugaacgcagcaacuccaugcucuacauagguauugccgaguacuucuuuaagagcgccaguuucgcucacuuuacugccggcguauucaacgugacccuaucuacugaagagauauccaaucauuuuguucagaacagucagggacugggcaauguacuuucacguguagcuucaaccagcguggggcuugucaucuugggccaaagacuugucuguucccuuucacugaaccgcuuuagacuugcacuuccagaaucgaaucguucuaauauugagguuuuacguuucgaaaacaucuugucaagcauccugcauuucgguguccucccacuggccaaugccaagcugcagcaaggauuuccuuuaucuaauccucauaaauuccucuuuguuaauucugauauugaaguccuagaaggauuucugcucauauccacggaccucaaauacgagaccuccucuaaacagcagccgaguuuucacgucugggagggucucaaucuuaucucuaggcaauggcgcggcaaaucugccccuuag

SEQ ID NO: 323500 - RNA, 696 nt, Artificial Sequence
  derived and/or modified sequence
auguuauauauaggcaucgccgaauacuuuuuuaaaucagccucauuugcccacuuuaccgcuggcguguucaaugugacccucuccacggaagaaauuucuaaucauuucguccagaauucucaaggauugggcaaugugcuuagcaggauagcugaaauauauauccucucccagccguuuauggucaggauuauggcuaccgagccaccuauuaucaaccugcagccuggaaacuuuacccuugacauuccugcuagcauuaugaugcuaacccaaccaaaaaauucaaccgucgaaacaauugugaguauggacuuuguggccagcaccucugucgguuuaguuauccucggacaacgacuagucugcucauugucccugaauagguuucgcuuagcccuucccgaguccaauagguccaauaucgagguccuucguuucgaaaacauucucucaaguaucuugcauuuuggagugcuuccucucgccaaugccaaguugcagcaaggcuuuccacucaguaacccacauaaguuccuuuucgugaacagcgacaucgaaguccuggagggguuucuccuaauuucaacggaccuaaaauaugagacuaguucaaagcaacaaccaagcuuccacgugugggaaggacuuaaucugauuagccgucaguggaggggcaagagugcaccauag

SEQ ID NO: 323501 - protein, 124 aa, Artificial Sequence
  derived and/or modified sequence
MSRRSQRLTRYSQGDDDGSSSSGGSSVAGSQSTLFKDSPLRTLKRKSSNMKRLSPAPQLGPSSDAHTSYYSESLVHESWFPPRSSLEELHGDANWDPTFQKLLEAQKSPWFFPAQVRTCGCGGG

SEQ ID NO: 323502 - protein, 127 aa, Artificial Sequence
  derived and/or modified sequence
MSRRSQRLTRYSQGDDDGSSSSGGSSVAGSQSTLFKDSPLRTLKRKSSNMKRLSPAPQLGPSSDAHTSYYSESLVHESWFPPRSSLEELHGDANWGYSDVDQQSSSSRLRSAVSRAGSLLWMVATSP

SEQ ID NO: 323503 - protein, 224 aa, Artificial Sequence
  derived and/or modified sequence
MSRRSQRLTRYSQGDDDGSSSSGGSSVAGSQSTLFKDSPLRTLKRKSSNMKRLSPAPQLGPSSDAHTSYYSESLVHESWFPPRSSLEELHGDANWGYSDVDQQSSSSRLRSAVSRAGSLLWMVATSPGRLFRLLYWWAGTTWYRLTTAASLLDVFVLTRRFSSLKTFLWFLLPLLLLTCLTYGAWYFYPYGLQTFHPALVSWWAAKDSRRPDEGWEARDSSPHF

SEQ ID NO: 323504 - DNA, 375 bp, Artificial Sequence
  derived and/or modified sequence
atgtctagaagatcccagcggctcacaaggtattctcagggtgacgatgatgggagttcttcaagtggggggtcttcagtagctgggtcccaatcaactttatttaaggacagtcctcttcgaacgttaaaaaggaagtcttccaacatgaaacgtctgtccccagctccccagctgggtccgtcaagcgacgctcatacgtcctactacagcgaatctttagtgcacgagtcctggttccctcccagaagtagccttgaggagttgcatggagatgcgaattgggaccccacgttccagaaacttctcgaggcgcagaagtccccttggttcttcccggcccaggtgaggacctgcggatgcgggggtggctag

SEQ ID NO: 323505 - DNA, 384 bp, Artificial Sequence
  derived and/or modified sequence
atgtcacgccgctcccagcggcttactagatacagtcagggggacgatgacggttcctcctcctcgggtgggtcttcggtagctgggtcccagagtacacttttcaaagacagccccctgagaaccctgaagagaaagtccagcaatatgaagaggctgtcccccgcaccccaactaggcccatcatctgacgcgcataccagttattattcagagtccctggttcacgaatcatggtttcccccgcgcagttctctggaggagcttcatggagatgctaattgggggtactctgacgtggaccaacagagcagttcctcccgtctgcgaagcgcggtctccagggctggatctttgctgtggatggttgccacctctccctag

SEQ ID NO: 323506 - DNA, 675 bp, Artificial Sequence
  derived and/or modified sequence
atgagcagacgatcccagcggctcacgcgttactcccagggggatgacgacggctcgtctagctccggtggaagtagcgttgcgggatcccaatccacactattcaaggatagtcctctgagaactcttaaaaggaaaagcagtaatatgaaaaggctgagtcccgccccccagctgggaccctcttcagacgctcatacgtcctattactcagaatcactggtgcacgagtcttggttccctcctcgatccagcttagaggagctacatggggatgcaaactggggttacagtgatgtggaccagcagtccagcagcagccggttgcggtctgctgtgagtagggcaggatccctcctgtggatggtagccacttctcctggacggctatttcggttactttactggtgggctggcactacctggtatcgcttgaccaccgctgcgtccctgcttgacgtgttcgtgctcacccggcgttttagttctctcaagaccttcctctggtttttactgcctcttctgctgttaacctgtctcacatatggcgcatggtacttctacccttacgggttgcagacttttcatcccgcccttgtctcttggtgggctgctaaagattcacggcgacctgatgaaggatgggaggcccgagatagttcaccccacttttag

SEQ ID NO: 323507 - DNA, 375 bp, Artificial Sequence
  derived and/or modified sequence
atgagcagaagaagccagaggctgacccgctacagccagggagatgatgatggcagcagcagcagcggcggcagctctgtggccggcagccagagcaccctcttcaaggacagccccctgcggaccctgaagaggaagagcagcaacatgaagaggctgagccctgccccccagctgggccccagcagtgatgcccacaccagctactacagcgagagcctggtgcatgagagctggttccccccaagaagcagcctggaggagctgcatggagatgccaactgggaccccaccttccagaagctgctggaggcccagaagagcccctggttcttccctgcccaggtgaggacctgtggctgcggcggcggctag

SEQ ID NO: 323508 - DNA, 384 bp, Artificial Sequence
  derived and/or modified sequence
atgagcagaagaagccagaggctgacccgctacagccagggagatgatgatggcagcagcagcagcggcggcagctctgtggccggcagccagagcaccctcttcaaggacagccccctgcggaccctgaagaggaagagcagcaacatgaagaggctgagccctgccccccagctgggccccagcagtgatgcccacaccagctactacagcgagagcctggtgcatgagagctggttccccccaagaagcagcctggaggagctgcatggagatgccaactggggctacagtgatgtggaccagcagagcagcagcagccggctgcggtctgctgtgtcccgggccggcagcctgctgtggatggtggccaccagcccctag

SEQ ID NO: 323509 - DNA, 675 bp, Artificial Sequence
  derived and/or modified sequence
atgagcagaagaagccagaggctgacccgctacagccagggagatgatgatggcagcagcagcagcggcggcagctctgtggccggcagccagagcaccctcttcaaggacagccccctgcggaccctgaagaggaagagcagcaacatgaagaggctgagccctgccccccagctgggccccagcagtgatgcccacaccagctactacagcgagagcctggtgcatgagagctggttccccccaagaagcagcctggaggagctgcatggagatgccaactggggctacagtgatgtggaccagcagagcagcagcagccggctgcggtctgctgtgtcccgggccggcagcctgctgtggatggtggccaccagccctggccgcctcttccggctgctgtactggtgggccggcaccacctggtaccgcctgaccacagctgccagcctgctggatgtgtttgtgctgacccggcgcttcagcagcctgaagaccttcctgtggttcctgctgcccctgctgctgctgacctgcctgacctacggggcctggtacttctacccctacggcctgcagaccttccacccagccctggtgtcctggtgggccgccaaggacagcagaagaccagatgagggctgggaggcccgggacagcagcccccacttctag

SEQ ID NO: 323510 - DNA, 375 bp, Artificial Sequence
  derived and/or modified sequence
atgagccggcggagccagcggctgacccggtacagccagggcgacgatgacggttcatctagcagtggagggagctccgtcgccggatcccagagtactctgttcaaagacagccccctgcgcacactgaagcggaagagctccaacatgaaacgtcttagtcctgcaccacagcttggcccctctagcgacgcccacacaagctactactcagagagcctcgtgcacgagtcatggttcccccccagaagctctctagaggagttgcacggagacgccaactgggatcccacattccagaagctgctagaggcacagaaatcgccttggtttttccccgcccaagtccggacatgtggatgtgggggaggttag

SEQ ID NO: 323511 - DNA, 384 bp, Artificial Sequence
  derived and/or modified sequence
atgagccggcggagccagcggctgacccggtacagccagggcgacgacgacggaagttcgtcatccggaggttcatcagttgcgggctcacagagcaccctgtttaaagattcccccttacggaccctcaagaggaaaagctcaaacatgaaaagactgagccctgcaccccagcttggaccatcatccgacgcacatacctcttactacagcgagagtcttgtgcacgaaagctggttccccccaaggagttctcttgaggaattacacggggatgccaactggggttattcagacgtggaccagcaatcttctagcagcaggctgcggagcgccgtgagtcgcgcaggctctctgttatggatggtcgcaaccagcccctag

SEQ ID NO: 323512 - DNA, 675 bp, Artificial Sequence
  derived and/or modified sequence
atgagccggcggagccagcggctgacccggtacagccagggcgacgatgatggctcatcctccagtggcggaagcagtgttgctgggtcacagtcgaccctcttcaaagattctcctctccgcacattgaagagaaagtcttcaaacatgaagagattgagccccgctccacagctgggcccatcgtcagatgcgcatacctcatactactccgagtccctggttcacgagtcttggttcccacccaggagcagtctggaggaactgcatggcgacgcaaattgggggtactccgatgtggaccagcagtcctcatctagccggttaaggtccgccgtctcacgcgccggaagtctgctgtggatggtggcaacctcgccagggcgactatttagactcctttactggtgggccgggaccacatggtaccgactcactacggcggctagtctgctggacgtgtttgtgctaactaggcgattctcttctcttaagactttcctttggttcttgctcccactattgctacttacatgccttacatatggtgcctggtatttttatccttacggcctacagaccttccaccccgctctggtgtcgtggtgggctgcaaaagattcccggaggccagacgaaggctgggaggctcgcgatagtagtccacatttttag

SEQ ID NO: 323513 - DNA, 375 bp, Artificial Sequence
  derived and/or modified sequence
atgtctagaagatctcagagactcactaggtattcacagggtgatgatgacggctcctccagctctggagggagcagcgtggcagggtcacagagcactttgtttaaggattctcccctgagaacgctcaagcgaaagtcatctaatatgaaaagactctctcccgcaccacagctgggtcccagcagtgacgcccatactagctattatagtgaaagcttagtgcacgaatcttggtttccacccaggtcttccctggaggaacttcatggcgacgcaaattgggaccctacctttcagaagctcctggaggcccagaaaagcccatggttctttcccgcacaggtccgaacctgcgggtgcggcggtggctag

SEQ ID NO: 323514 - DNA, 384 bp, Artificial Sequence
  derived and/or modified sequence
atgagcaggagatcccagagactaacgaggtactcccaaggcgatgacgacggctcatcttcaagcggcggttcttccgtggcaggaagtcagtctacactcttcaaagattctccccttaggacactcaagcgaaaatcaagcaatatgaagcgcttgtctcctgcccctcagctcggaccttcatccgacgcacacacatcctattactctgagagtctggttcacgagagctggtttcctccaagaagctccctagaagagctgcatggcgatgcgaattggggctactcagacgttgatcaacagtcctcttcttcacgattaaggtctgcagtgagcagggctggcagcctgctgtggatggttgctacttccccttag

SEQ ID NO: 323515 - DNA, 675 bp, Artificial Sequence
  derived and/or modified sequence
atgtcccgacgtagccaacgtctgactcggtacagccagggggacgacgatggttcaagcagtagcggtggctcttctgttgccggatcccagagcactctcttcaaagacagccccctgagaaccttaaaacgcaagtcttcaaatatgaaacgcctctctccagctccccagctgggaccttcttctgacgcacatacatcttactactctgagagcctcgttcatgaatcttggttccctcctagatctagccttgaagagctacacggggacgccaattggggatattcagacgttgaccagcagagctcaagtagcagactgaggtctgctgtgtcacgggctggttccttgttatggatggtggccactagccccggacgtctgttccggttgctctactggtgggcaggaaccacatggtaccggctgactaccgccgcatcacttcttgatgttttcgtgttaaccaggcgcttctcatccctgaagacttttctctggtttctccttcctcttctcctccttacatgcctgacctacggggcttggtacttctacccctatggactgcagactttccatccagcactcgtgtcctggtgggcagcaaaagattcaaggcggcctgatgaaggttgggaggccagggactccagccctcacttctag

SEQ ID NO: 323516 - DNA, 375 bp, Artificial Sequence
  derived and/or modified sequence
atgagcagaagaagccagagactgaccagatacagccagggcgacgacgacggcagcagcagcagcggcggcagcagcgtggccggcagccagagcaccctgttcaaggacagccccctgagaaccctgaagagaaagagcagcaacatgaagagactgagccccgccccccagctgggccccagcagcgacgcccacaccagctactacagcgagagcctggtgcacgagagctggttcccccccagaagcagcctggaggagctgcacggcgacgccaactgggaccccaccttccagaagctgctggaggcccagaagagcccctggttcttccccgcccaggtgagaacctgcggctgcggcggcggctag

SEQ ID NO: 323517 - DNA, 384 bp, Artificial Sequence
  derived and/or modified sequence
atgagcagaagaagccagagactgaccagatacagccagggcgacgacgacggcagcagcagcagcggcggcagcagcgtggccggcagccagagcaccctgttcaaggacagccccctgagaaccctgaagagaaagagcagcaacatgaagagactgagccccgccccccagctgggccccagcagcgacgcccacaccagctactacagcgagagcctggtgcacgagagctggttcccccccagaagcagcctggaggagctgcacggcgacgccaactggggctacagcgacgtggaccagcagagcagcagcagcagactgagaagcgccgtgagcagagccggcagcctgctgtggatggtggccaccagcccctag

SEQ ID NO: 323518 - DNA, 675 bp, Artificial Sequence
  derived and/or modified sequence
atgagcagaagaagccagagactgaccagatacagccagggcgacgacgacggcagcagcagcagcggcggcagcagcgtggccggcagccagagcaccctgttcaaggacagccccctgagaaccctgaagagaaagagcagcaacatgaagagactgagccccgccccccagctgggccccagcagcgacgcccacaccagctactacagcgagagcctggtgcacgagagctggttcccccccagaagcagcctggaggagctgcacggcgacgccaactggggctacagcgacgtggaccagcagagcagcagcagcagactgagaagcgccgtgagcagagccggcagcctgctgtggatggtggccaccagccccggcagactgttcagactgctgtactggtgggccggcaccacctggtacagactgaccaccgccgccagcctgctggacgtgttcgtgctgaccagaagattcagcagcctgaagaccttcctgtggttcctgctgcccctgctgctgctgacctgcctgacctacggcgcctggtacttctacccctacggcctgcagaccttccaccccgccctggtgagctggtgggccgccaaggacagcagaagacccgacgagggctgggaggccagagacagcagcccccacttctag

SEQ ID NO: 323519 - protein, 706 aa, Artificial Sequence
  derived and/or modified sequence
MVSPPSAGQRLRGVPVWAAGAFRFSSGEESTSHLIMSRRSQRLTRYSQGDDDGSSSSGGSSVAGSQSTLFKDSPLRTLKRKSSNMKRLSPAPQLGPSSDAHTSYYSESLVHESWFPPRSSLEELHGDANWGYSDVDQQSSSSRLRSAVSRAGSLLWMVATSPGRLFRLLYWWAGTTWYRLTTAASLLDVFVLTRRFSSLKTFLWFLLPLLLLTCLTYGAWYFYPYGLQTFHPALVSWWAAKDSRRPDEGWEARDSSPHFQAEQRVMSRVHSLERRLEALAAEFSSNWQKEAMRLERLELRQGAPGQGGGGGLSHEDTLALLEGLVSRREAALKEDFRRETAARIQEELSALRAEHQQDSEDLFKKIVRASQESEARIQQLKSEWQSMTQESFQESSVKELRRLEDQLAGLQQELAALALKQSSVAEEVGLLPQQIQAVRDDVESQFPAWISQFLARGGGGRVGLLQREEMQAQLRELESKILTHVAEMQGKSAREAAASLSLTLQKEGVIGVTEEQVHHIVKQALQRYSEDRIGLADYALESGGASVISTRCSETYETKTALLSLFGIPLWYHSQSPRVILQPDVHPGNCWAFQGPQGFAVVRLSARIRPTAVTLEHVPKALSPNSTISSAPKDFAIFGFDEDLQQEGTLLGKFTYDQDGEPIQTFHFQAPTMATYQVVELRILTNWGHPEYTCIYRFRVHGEPAH

SEQ ID NO: 323520 - DNA, 2121 bp, Artificial Sequence
  derived and/or modified sequence
atggtgtcaccaccctccgccggacagcggttaaggggagtaccagtgtgggctgccggcgcgtttcggttctcgagtggagaggagtccacaagtcatcttatcatgagccgaaggagtcagagactgacccggtattcccaaggagacgacgatggatcaagctcatctggcggatccagcgtggccggctctcagtctaccttgttcaaagacagcccccttcgcaccctgaaacgtaaatcaagcaacatgaagcgcctatcccccgccccccaattaggaccatcgtccgatgcccacaccagctattatagcgaatccctggtgcacgagtcatggtttccacccagatcaagcttggaggagcttcacggagacgccaattggggttatagtgatgtggaccaacagtcctcttcttcacggctgagaagcgccgtgtccagagcaggcagcctgctttggatggtggcgacgtcacctgggagactgtttagactgctctactggtgggccgggacaacttggtaccggctcaccactgcagcatccctgctggacgtctttgtgctgacccgaaggttcagctcactgaagacatttctgtggtttcttttgccgctgctgctattaacttgtctgacttacggcgcatggtatttctacccctatggactacaaacgttccacccggcgcttgtttcctggtgggcagccaaggattctaggcggccggacgaagggtgggaagcacgggactcttcccctcatttccaggccgaacaacgagtcatgtcgcgagtgcacagcctcgaaagacgactggaggccttggccgccgaattctccagcaattggcagaaggaagctatgcggctggaaagactggaacttcgtcagggtgccccaggccagggcggtggggggggcctttcccatgaagatacacttgccttgctcgagggcctggtgtcacggcgggaggcagcgctgaaggaggatttccggcgagaaaccgctgcgcgcatccaagaggagctgtctgccctgcgggccgaacaccagcaggattctgaagacttgtttaaaaaaattgtgagggcaagtcaggagagcgaggcccggatccagcagctaaaatctgagtggcagtccatgacccaagagtctttccaggaaagctctgttaaagaactgcggagactggaggaccagttagctggacttcagcaggagttggccgctcttgcactaaaacagagttctgtcgctgaagaagttggcctgctgccacaacaaatccaggctgtgcgggacgatgtggagtcgcagttccccgcctggatctctcaattcctcgcaagaggtgggggtggaagggtaggattactgcaaagagaggagatgcaagcacagctgagggagctggagagcaaaattcttacgcatgttgcagagatgcagggtaagagtgctcgagaagctgctgctagcctctcattgacactacagaaggaaggtgtaatcggtgtgactgaagaacaggtacaccatattgttaaacaggctctgcaaaggtactccgaggaccgcatcggcctggcagactatgccctggagtccggaggagcgtcagttatatcaactaggtgcagcgagacctatgaaaccaaaacggcccttctctccctgtttggcattcccctttggtatcactcccaatcgccccgtgtgattctccagcctgatgtgcaccctggcaactgctgggcttttcagggaccacaaggcttcgccgtcgtgcggctgagcgcgcgcatccgcccaactgcggtgactctggaacacgtgccaaaagccctgagtcctaattcaacaatctctagcgctccgaaggacttcgctattttcggattcgatgaagatctccaacaggagggtactctgctgggaaaattcacttatgaccaggacggggagccgattcagaccttccatttccaggcaccaacgatggccacatatcaagtggtggagttgcgaatcctgaccaactggggacacccagaatacacctgcatttatagattccgggtgcacggagagccagcccattag

SEQ ID NO: 323521 - DNA, 2121 bp, Artificial Sequence
  derived and/or modified sequence
atggtgagcccccccagcgctggccagaggctgcggggcgtgcctgtgtgggccgccggggccttccgcttcagcagcggggaggagagcaccagccacctgatcatgagccgccgcagccagaggctgacccgctacagccagggagatgatgatggcagcagcagcagcggcggcagctctgtggccggcagccagagcaccctcttcaaggacagccccctgcggaccctgaagaggaagagcagcaacatgaagaggctgagccctgccccccagctgggccccagcagtgatgcccacaccagctactacagcgagagcctggtgcatgagagctggttcccccccaggagcagcctggaggagctgcatggagatgccaactggggctacagtgatgtggaccagcagagcagcagcagccggctgcggtctgctgtgtccagagctggcagcctgctgtggatggtggccaccagccctggccgcctcttccggctgctgtactggtgggccggcaccacctggtaccgcctgaccacagctgccagcctgctggatgtgtttgtgctgacccggcgcttcagcagcctgaagaccttcctgtggttcctgctgcccctgctgctgctgacctgcctgacctatggagcctggtacttctacccctacggcctgcagaccttccacccagccctggtgtcctggtgggccgccaaggacagccggcggccagatgagggctgggaggcccgggacagcagcccccacttccaggccgagcagagggtgatgagccgggtgcacagcctggagcggcggctggaggccctggccgctgagttcagcagcaactggcagaaggaggccatgaggctggagcggctggagctgcggcagggcgcccctggccagggcggcggcggcggcctgagccatgaggacaccctggccctgctggagggcctggtgtccagaagagaggccgccctgaaggaggacttcagaagagaaacagctgcccgcatccaggaggagctgagcgccctgcgggcagagcaccagcaggacagcgaggacctcttcaagaagatcgtgcgggccagccaggagagcgaggcccgcatccagcagctgaagtctgagtggcagagcatgacccaggagagcttccaggagagctctgtgaaggagctgcggcggctggaggaccagctggccggcctgcagcaggagctggccgccctggccctgaagcagagctctgtggccgaggaggtgggcctgctgccccagcagatccaggccgtgagagatgatgtggagagccagtttcctgcctggatcagccagttcctggcccggggcggcggcggccgggtgggcctgctgcagcgggaggagatgcaggcccagctgcgggagctggagagcaagatcctgacccacgtggccgagatgcagggcaagagcgcccgggaggccgccgccagcctgagcctgaccctgcagaaggagggcgtcatcggcgtgacagaggagcaggtgcaccacatcgtgaagcaggccctgcagcgctacagcgaggacagaattggcctggccgactatgccctggagagcggcggggccagcgtcatcagcacccgctgcagcgagacctatgagaccaagacagccctgctgagcctgtttggcatccccctgtggtaccacagccagagccccagggtcatcctgcagccagatgtgcaccctggcaactgctgggccttccagggcccccagggctttgctgtggtgcggctgagcgcccgcatccggcccacagctgtgaccctggagcacgtgcccaaggccctgagccccaacagcaccatcagcagcgcccccaaggactttgccatcttcggctttgatgaggacctgcagcaggagggcaccctgctgggcaagttcacctatgaccaggatggagagcccatccagaccttccacttccaggcccccaccatggccacctaccaggtggtggagctgcgcatcctgaccaactggggccaccctgagtacacctgcatctaccgcttccgggtgcatggagagcccgcccactag

SEQ ID NO: 323522 - DNA, 2121 bp, Artificial Sequence
  derived and/or modified sequence
atggtgagcccccccagcgccggccagcggctgcggggcgtgcccgtttgggccgcaggagctttcagattttcaagcggggaagagagtacaagccatctgattatgagtcgccgatcccagaggctgacgcgctatagccagggtgacgacgacggcagctccagtagcggaggaagctcggtagctggaagtcagtccaccctgttcaaggattctccacttaggactctcaagcgaaaaagctctaacatgaagcgtctcagccccgctcctcagctagggcctagctccgatgcgcacacatcatattacagtgagagtctcgtgcacgagtcttggttcccacctcggtcatcgctcgaggaactgcacggcgacgctaactggggctattctgacgtagaccagcaatcgtcatcaagcaggttaaggtctgcggtttcaagagctggctctctgctctggatggtcgctacatctcccggaagactgtttagactgctatattggtgggcagggaccacttggtaccgactgacaactgcggcctctctgctcgatgtgttcgtcctgacccgcagattctcttcactgaagacgttcctctggtttctgctgccacttcttctgctgacttgcttgacctacggcgcctggtacttttatccgtatggtctccagacgtttcatcccgccctggtcagctggtgggctgcgaaggattcacggaggcccgatgaaggctgggaggccagagactcgagccctcacttccaggccgagcagcgggtaatgtcgcgggtacactctcttgagagacgacttgaagctttggcagctgagttcagctcaaactggcagaaagaggccatgaggctcgagaggttggaattgagacagggtgctcctggccagggcgggggaggcgggctgagccacgaggacacattagcgctcttagaaggcctcgtttcacgccgcgaggcagccctcaaggaggactttcggcgcgaaaccgctgcaagaatacaggaggaactgtcggctctaagagccgaacatcagcaggattctgaggatctattcaagaagatcgttcgggccagccaggagtccgaggctaggatccagcagctgaaatcagagtggcaatctatgacgcaggagagtttccaagaaagttccgtaaaggaattaagacggctggaggaccaactggcgggacttcagcaggaactggctgccctggccctaaaacagtctagcgtcgcagaagaggtgggattactcccccagcaaatccaggccgtgcgggatgacgtagaatctcagttcccggcatggatctctcaatttttggctcgtggtggaggaggccgggttggtctactgcaaagagaagaaatgcaagcccagctgcgagaattagagtctaagatcttaacccacgttgccgaaatgcaaggaaagagcgccagagaggcggccgcaagcctgtccctcactctgcagaaggaaggtgtgattggggtgactgaggaacaggttcaccatatcgtgaaacaagcccttcaacgctacagcgaagatagaattggcctggctgattacgcattggagtctggaggggcgtccgtgatcagcacgaggtgtagcgaaacctatgagaccaaaacagcactgctttccctcttcgggatcccactctggtatcattcccagtcgcctagagtgatcttgcaacccgacgtacaccctggaaattgttgggcctttcagggcccccaaggatttgctgtggttagactcagcgccaggattcgtccaacggcagtaacactggaacacgtccccaaagccctgtctcctaactcgacaattagcagtgccccaaaagattttgccatatttggctttgacgaagacttgcagcaggaaggtacactcctcggtaaattcacctatgatcaagacggggaaccgatacagacgtttcattttcaggcccccactatggctacctaccaggtagtggagctgcgtatattaactaactgggggcatcccgagtatacctgcatctaccgtttccgggtgcatggagagcccgcccattag

SEQ ID NO: 323523 - DNA, 2121 bp, Artificial Sequence
  derived and/or modified sequence
atggtgagccccccttccgctggacaacgattgcgcggagtccctgtctgggcggctggggctttccggttctcttcaggagaagaatccacaagtcacctgattatgtcaaggcgctcccagcgcctgactcgatactcccagggagatgatgacggctcttcatcttcgggtggaagcagtgtggcgggttctcaaagtaccctatttaaggattcgcccctgagaacacttaagcgaaaatcgagcaatatgaagcgtctatcacctgcaccccagctgggcccttccagtgatgcacatacatcatactattctgagtcgcttgtccacgagagctggttccctccacgctctagcctggaagaactccatggcgatgctaactgggggtactccgatgtagatcagcagtccagttccagtagactccggtctgccgtcagtagggcaggaagcctcctgtggatggtcgctacctcgccgggaagactttttcggttgctgtactggtgggctggcactacctggtaccgcttgaccaccgctgcatccctgctggatgtgttcgttttgactaggcgcttctcttcgttgaaaacttttttatggttcctgctgcctcttttgttattgacatgccttacttatggggcttggtacttctatccgtacggactacagacgttccaccctgccctggtgtcctggtgggctgctaaagactctcgtaggcccgatgaaggatgggaggcgagggattcctccccccactttcaggccgagcagagagttatgtcccgggtgcacagcctggaacggagactcgaagctctggctgctgagttcagttccaattggcagaaggaagcgatgagactcgaaagacttgagctgcggcaaggggcacctggacagggagggggtggcggtctgtcacacgaggataccttagctttgttagaggggcttgtgagccgcagggaggccgctttgaaagaagatttcaggagggaaaccgcagcccgtatccaagaagagctgtccgccctgcgggctgaacaccagcaagactctgaggacctgttcaaaaagatcgtgcgtgcttcccaggagagtgaggcacgaattcagcagctgaagagtgagtggcagagtatgacccaggagtcatttcaagagagtagtgttaaggaacttcgcagactggaggaccagctggcaggactccagcaggagttagccgctctagctctgaaacagagctccgtggccgaagaggtaggtctgttgcctcagcagatacaggccgtaagggacgatgtagagagccagttcccagcctggatttctcaatttctggctcgaggtggtggaggcagagtcggattgctacaacgagaagagatgcaggctcagctacgggagctggagtccaaaatattgacccatgtcgccgagatgcaaggaaagtcagctcgtgaagccgcagcttccctgagcttgactttgcagaaggagggggttattggcgtgacagaagaacaagtgcatcatatcgttaaacaggccctgcagaggtacagcgaagaccgtattggtctggccgactacgcactcgagagcggcggtgctagtgtcatttctactagatgcagtgaaacatacgagaccaaaacagctcttctcagtctgttcgggatcccactctggtatcacagccagagcccaagagtgattctccagcccgacgtgcaccccggaaattgctgggctttccaggggccacagggtttcgcggtggtgcggctgtccgcacgtataaggcctacagcggtgaccctggaacatgtgccgaaggctctcagtcctaacagcactatttcctccgccccaaaagactttgcaatcttcggtttcgatgaagacctgcagcaggagggcacacttctggggaaatttacatacgatcaagacggcgagccaatccaaactttccattttcaggctcctactatggctacgtaccaggtggttgagttgcgcatacttacaaactggggtcatccggaatacacctgcatttacagatttcgagtgcacggagagccagcccattag

SEQ ID NO: 323524 - DNA, 2486 bp, Artificial Sequence
  derived and/or modified sequence
gttttggagaatggggcctcgacctttttcatcttgtgaaacccagactcaatggtgtcacctccttcagcaggacagaggctaagaggagtccctgtgtgggcagctggagccttcagattctcttcaggggaagagtccacatcccacctcatcatgtcccgaagaagccagcgcctcacgcgctactcccagggtgacgatgacggcagcagcagcagcggagggagctcggtggctgggagtcagagcaccctgtttaaagacagtcctctcaggaccttgaagaggaaatccagcaacatgaagcgcctgtccccagcgccacagctgggcccgtcctctgatgcacacacctcctactacagtgagtcgctggtccacgagtcctggttcccacccaggagctccctggaggaactgcatggtgacgccaactggggctactcggatgtggaccagcagagttccagctcgcggctccgaagcgccgtctcacgggcgggctccttactctggatggtggccacttcgccaggccggctcttcagacttctctactggtgggctggcaccacctggtaccgcctgaccacagctgcctccctccttgacgtcttcgttttaaccaggcgcttctcgtccctgaagacgttcctctggttcctgctgccgctgctcttgctgacgtgcctgacgtatggtgcttggtatttctacccctatgggctgcagacattccaccctgctttggtttcctggtgggcagcgaaggacagcaggaggccggatgagggctgggaagccagagactcatcgccacatttccaggctgagcagcgtgttatgtcccgggtacactctctggagcggcgtctggaagctcttgctgctgaattttcctccaactggcagaaggaggccatgcggctggaacgtctggagctgcggcaaggggctcctggccagggaggtggtggtggcctgagccacgaggacaccctggcgctgctggaggggctagtgagccgccgtgaagctgccctgaaggaggatttccgcagggaaactgctgctcgcatccaggaagaactgtctgccctgagagcagagcatcagcaagactcagaagacctcttcaagaagatcgtccgggcctcccaggagtccgaggctcgcatccagcagctgaagtcagagtggcaaagcatgacccaggagtccttccaggagagctctgtgaaggagctgaggcggctggaggaccagctggccggcctgcagcaggagctggcggctctggcactgaagcagagctcggtggcggaagaagtgggcctgctgccccagcagatccaggccgtgcgggacgacgtggaatctcagttcccggcctggatcagtcagttccttgcccgaggtggagggggccgcgtggggctccttcagagagaggagatgcaagctcagctgcgagagctggagagcaagatcctcacccatgtggcagagatgcagggcaagtcggccagggaagccgcggcctccctgagcctgacgctgcagaaagaaggtgtgattggagtgacagaggagcaggtgcaccacatcgtgaagcaggccctgcagcgctacagtgaggaccgcatcgggctggcagactacgccctggagtcaggaggggccagcgtcatcagcacccgatgttctgagacctacgagaccaagacggccctcctcagcctcttcggcatccccctgtggtaccactcccagtcaccccgagtcatcctccagccagatgtgcacccaggcaactgctgggccttccaggggccacaaggcttcgccgtggtccgcctctctgcccgcatccgccccacagccgttaccttagagcatgtgcccaaggccttgtcacccaacagcactatctccagtgcccccaaggacttcgccatctttgggtttgacgaagacctgcagcaggaggggacactccttggcaagttcacttacgatcaggacggcgagcctattcagacgtttcactttcaggcccctacgatggccacgtaccaggtggtggagctgcggatcctgactaactggggccaccccgagtacacctgcatctaccgcttcagagtgcatggggagcccgcccactagccctgcttactggtgcctgctgccagccatctgggagtgggtgaacagcaccccgccgcttcccccacacgcttgctcggcgctctgacttctaggagcacaagagaggagcctgtggccccatgcagatgaaaaggacgggcagggtctcctgagcagcaggtggctcgaggcggttagcaggctccagcagctcccttcttccttccctctgtgcccgtggcgtctgcttcccatcctgggagtgtgtatatatgtagcatatcatgggggactgggaagttgggagaggtaggacctgactggtcttggct

SEQ ID NO: 323525 - DNA, 545 bp, Artificial Sequence
  derived and/or modified sequence
atttagttcttcccagcggcagcttgggtatggtataaacatgttgccttgtttctgccctgggcaaaggtgtcacctccttcagcaggacagaggctaagaggagtccctgtgtgggcagctggagccttcagattctcttcaggggaagagtccacatcccacctcatcatgtcccgaagaagccagcgcctcacgcgctactcccagggtgacgatgacggcagcagcagcagcggagggagctcggtggctgggagtcagagcaccctgtttaaagacagtcctctcaggaccttgaagaggaaatccagcaacatgaagcgcctgtccccagcgccacagctgggcccgtcctctgatgcacacacctcctactacagtgagtcgctggtccacgagtcctggttcccacccaggagctccctggaggaactgcatggtgacgccaactgggaccccacttttcagaagctcttggaggcccagaagagcccctggttcttccctgcacaggtgaggacctgcgggtgcggaggaggaga

SEQ ID NO: 323526 - DNA, 538 bp, Artificial Sequence
  derived and/or modified sequence
gttttggagaatggggcctcgacctttttcatcttgtgaaacccagactcaatggtgtcacctccttcagcaggacagaggctaagaggagtccctgtgtgggcagctggagccttcagattctcttcaggggaagagtccacatcccacctcatcatgtcccgaagaagccagcgcctcacgcgctactcccagggtgacgatgacggcagcagcagcagcggagggagctcggtggctgggagtcagagcaccctgtttaaagacagtcctctcaggaccttgaagaggaaatccagcaacatgaagcgcctgtccccagcgccacagctgggcccgtcctctgatgcacacacctcctactacagtgagtcgctggtccacgagtcctggttcccacccaggagctccctggaggaactgcatggtgacgccaactggggctactcggatgtggaccagcagagttccagctcgcggctccgaagcgccgtctcacgggcgggctccttactctggatggtggccacttcgccag

SEQ ID NO: 323527 - DNA, 1012 bp, Artificial Sequence
  derived and/or modified sequence
ccacacgcgcgccgcccggccccactcgcgcagcgcgggcctccgccggccgcattgtccgcccgcccgccttgtcccgcgtcgccgctcttcgcgtgcccgcgcgccccgggcccggccgctgtgtcgccctgagcggagcgccgcccgcgggatccccacgcggaaagggggcgcgccccggcggcggcctggcctcggacgcccccggccgggctagaagccgccgcggcagcaggtgtcacctccttcagcaggacagaggctaagaggagtccctgtgtgggcagctggagccttcagattctcttcaggggaagagtccacatcccacctcatcatgtcccgaagaagccagcgcctcacgcgctactcccagggtgacgatgacggcagcagcagcagcggagggagctcggtggctgggagtcagagcaccctgtttaaagacagtcctctcaggaccttgaagaggaaatccagcaacatgaagcgcctgtccccagcgccacagctgggcccgtcctctgatgcacacacctcctactacagtgagtcgctggtccacgagtcctggttcccacccaggagctccctggaggaactgcatggtgacgccaactggggctactcggatgtggaccagcagagttccagctcgcggctccgaagcgccgtctcacgggcgggctccttactctggatggtggccacttcgccaggccggctcttcagacttctctactggtgggctggcaccacctggtaccgcctgaccacagctgcctccctccttgacgtcttcgttttaaccaggcgcttctcgtccctgaagacgttcctctggttcctgctgccgctgctcttgctgacgtgcctgacgtatggtgcttggtatttctacccctatgggctgcagacattccaccctgctttggtttcctggtgggcagcgaaggacagcaggaggccggatgagggctgggaagccagagactcatcgccacatttc

SEQ ID NO: 323528 - DNA, 546 bp, Artificial Sequence
  derived and/or modified sequence
tccagggacaggcagttcccagcctctgcctgtcagaactcagggcctcagaggaaggcccgttttgttcagttctaaaacaaaacaaaacaaagcaatggggggcgcggtgtgacttagagagccaggaggcgcgcctttggtgacaatttctgcagcaggacagaggctaagaggagtccctgtgtgggcagctggagccttcagattctcttcaggggaagagtccacatcccacctcatcatgtcccgaagaagccagcgcctcacgcgctactcccagggtgacgatgacggcagcagcagcagcggagggagctcggtggctgggagtcagagcaccctgtttaaagacagtcctctcaggaccttgaagaggaaatccagcaacatgaagcgcctgtccccagcgccacagctgggcccgtcctctgatgcacacacctcctactacagtgagtcgctggtccacgagtcctggttcccacccaggagctccctggaggaactgcatggtgacgccaactggggtgaggacctgcgggt

SEQ ID NO: 323529 - DNA, 621 bp, Artificial Sequence
  derived and/or modified sequence
gtagatttcagctcccagaggctcacttcttgttttggagaatggggcctcgacctttttcatcttgtgaaacccagactcaatggtgtcacctccttcagcaggacagaggctaagaggagtccctgtgtgggcagctggagccttcagattctcttcaggggaagagtccacatcccacctcatcatgtcccgaagaagccagcgcctcacgcgctactcccagggtgacgatgacggcagcagcagcagcggagggagctcggtggctgggagtcagagcaccctgtttaaagacagtcctctcaggaccttgaagaggaaatccagcaacatgaagcgcctgtccccagcgccacagctgggcccgtcctctgatgcacacacctcctactacagtgagtcgctggtccacgagtcctggttcccacccaggagctccctggaggaactgcatggtgacgccaactggggtgaggacctgcgggtgcggaggaggagaggcacgggtggctcagagagcagcagggccagcgggcttgtggggcgcaaggccaccgaggacttcctgggctcttcctcgggctactcctctgaggacgactacgtgggtaggcgatg

SEQ ID NO: 323530 - DNA, 2121 bp, Artificial Sequence
  derived and/or modified sequence
atggtgagcccccccagcgccggccagagactgagaggcgtgcccgtgtgggccgccggcgccttcagattcagcagcggcgaggagagcaccagccacctgatcatgagcagaagaagccagagactgaccagatacagccagggcgacgacgacggcagcagcagcagcggcggcagcagcgtggccggcagccagagcaccctgttcaaggacagccccctgagaaccctgaagagaaagagcagcaacatgaagagactgagccccgccccccagctgggccccagcagcgacgcccacaccagctactacagcgagagcctggtgcacgagagctggttcccccccagaagcagcctggaggagctgcacggcgacgccaactggggctacagcgacgtggaccagcagagcagcagcagcagactgagaagcgccgtgagcagagccggcagcctgctgtggatggtggccaccagccccggcagactgttcagactgctgtactggtgggccggcaccacctggtacagactgaccaccgccgccagcctgctggacgtgttcgtgctgaccagaagattcagcagcctgaagaccttcctgtggttcctgctgcccctgctgctgctgacctgcctgacctacggcgcctggtacttctacccctacggcctgcagaccttccaccccgccctggtgagctggtgggccgccaaggacagcagaagacccgacgagggctgggaggccagagacagcagcccccacttccaggccgagcagagagtgatgagcagagtgcacagcctggagagaagactggaggccctggccgccgagttcagcagcaactggcagaaggaggccatgagactggagagactggagctgagacagggcgcccccggccagggcggcggcggcggcctgagccacgaggacaccctggccctgctggagggcctggtgagcagaagagaggccgccctgaaggaggacttcagaagagagaccgccgccagaatccaggaggagctgagcgccctgagagccgagcaccagcaggacagcgaggacctgttcaagaagatcgtgagagccagccaggagagcgaggccagaatccagcagctgaagagcgagtggcagagcatgacccaggagagcttccaggagagcagcgtgaaggagctgagaagactggaggaccagctggccggcctgcagcaggagctggccgccctggccctgaagcagagcagcgtggccgaggaggtgggcctgctgccccagcagatccaggccgtgagagacgacgtggagagccagttccccgcctggatcagccagttcctggccagaggcggcggcggcagagtgggcctgctgcagagagaggagatgcaggcccagctgagagagctggagagcaagatcctgacccacgtggccgagatgcagggcaagagcgccagagaggccgccgccagcctgagcctgaccctgcagaaggagggcgtgatcggcgtgaccgaggagcaggtgcaccacatcgtgaagcaggccctgcagagatacagcgaggacagaatcggcctggccgactacgccctggagagcggcggcgccagcgtgatcagcaccagatgcagcgagacctacgagaccaagaccgccctgctgagcctgttcggcatccccctgtggtaccacagccagagccccagagtgatcctgcagcccgacgtgcaccccggcaactgctgggccttccagggcccccagggcttcgccgtggtgagactgagcgccagaatcagacccaccgccgtgaccctggagcacgtgcccaaggccctgagccccaacagcaccatcagcagcgcccccaaggacttcgccatcttcggcttcgacgaggacctgcagcaggagggcaccctgctgggcaagttcacctacgaccaggacggcgagcccatccagaccttccacttccaggcccccaccatggccacctaccaggtggtggagctgagaatcctgaccaactggggccaccccgagtacacctgcatctacagattcagagtgcacggcgagcccgcccactag

SEQ ID NO: 323531 - protein, 171 aa, Artificial Sequence
  derived and/or modified sequence
MAESEAETPSTPGEFESKYFEFHGVRLPPFCRGKMEEIANFPVRPSDVWIVTYPKSVGYGSWFEHVQEFWEHRMDSNVLFLKYEDMHRDLVTMVEQLARFLGVSCDKAQLEALTEHCHQLVDQCCNAEALPVGRGRVGLWKDIFTVSMNEKFDLVYKQKMGKCDLTFDFYL

SEQ ID NO: 323532 - DNA, 516 bp, Artificial Sequence
  derived and/or modified sequence
atggccgagagcgaggccgagacccccagcacccccggcgagttcgagagcaagtacttcgagttccacggcgtgagactgccccccttctgcagaggcaagatggaggagatcgccaacttccccgtgagacccagcgacgtgtggatcgtgacctaccccaagagcgtgggctacggcagctggttcgagcacgtgcaggagttctgggagcacagaatggacagcaacgtgctgttcctgaagtacgaggacatgcacagagacctggtgaccatggtggagcagctggccagattcctgggcgtgagctgcgacaaggcccagctggaggccctgaccgagcactgccaccagctggtggaccagtgctgcaacgccgaggccctgcccgtgggcagaggcagagtgggcctgtggaaggacatcttcaccgtgagcatgaacgagaagttcgacctggtgtacaagcagaagatgggcaagtgcgacctgaccttcgacttctacctgtag

SEQ ID NO: 323533 - DNA, 516 bp, Artificial Sequence
  derived and/or modified sequence
atggcagaaagcgaagctgaaaccccctctaccccgggagaatttgaatcgaagtactttgagttccatggggttcgcttgcctccattctgtagaggcaaaatggaagagattgcaaacttcccagtgcgaccatcagatgtgtggatcgtgacatatcctaaatctgttgggtacggatcatggtttgagcacgtgcaggagttctgggaacaccgtatggactcgaatgtgctatttttgaagtatgaagatatgcatcgagacctcgtcaccatggtcgagcagttggcaaggttcttgggagtctcttgtgataaggcccagttggaggcgctaaccgagcattgtcatcaactcgtggaccagtgttgtaatgctgaggccctgcctgttgggcgcggacgcgtcggtttgtggaaggacatttttacggtttctatgaatgagaagtttgatctggtgtataagcaaaaaatgggcaagtgtgacttgacttttgacttttatctctag

SEQ ID NO: 323534 - DNA, 516 bp, Artificial Sequence
  derived and/or modified sequence
atggccgagagcgaggccgagacccccagcaccccaggagaatttgagagcaagtactttgagttccatggagtgcggctgccccccttctgccggggcaagatggaggagatcgccaacttccctgtgcggcccagtgatgtgtggatcgtgacctaccccaagtctgtgggctacggctcctggtttgaacatgtgcaggagttctgggagcacaggatggacagcaatgtgctcttcctgaagtatgaggacatgcaccgggacctggtgaccatggtggagcagctggcccgcttcctgggcgtgtcctgtgacaaggcccagctggaggccctgacagagcactgccaccagctggtggaccagtgctgcaatgctgaggccctgcctgtgggccggggccgggtgggcctgtggaaggacatcttcaccgtgtccatgaatgagaagtttgacctggtgtacaagcagaagatgggcaaatgtgacctgacctttgacttctacctgtag

SEQ ID NO: 323535 - DNA, 516 bp, Artificial Sequence
  derived and/or modified sequence
atggccgagagcgaggccgagacccccagcacccccggcgagttcgaatccaaatactttgagtttcatggagtgaggctgcctccattctgtcgggggaagatggaagagattgctaatttcccagtgagacctagtgatgtgtggattgtgacgtatcccaaatctgtcgggtacgggtcttggttcgagcatgtccaggaattttgggagcaccggatggacagcaacgtgttgttcttgaagtacgaggatatgcatagggacctggtcacaatggtcgaacagttggcccgcttcctgggtgtctcctgtgacaaagcccagttggaagcccttaccgagcactgtcaccaactggtggatcagtgttgcaatgctgaggctttgcccgtgggccggggccgagtgggactgtggaaggacatatttaccgtttccatgaatgaaaaattcgacctggtatataaacaaaagatgggaaaatgcgatctaacattcgacttctacttgtag

SEQ ID NO: 323536 - DNA, 516 bp, Artificial Sequence
  derived and/or modified sequence
atggcagagagtgaagcagagacgccttccacaccaggggagtttgagagtaagtacttcgaattccatggcgttcggctgcctcctttttgtcgcggaaaaatggaggaaatcgcaaattttccagtgcgacctagcgacgtttggatcgtgacctatccaaagagcgttggctatggtagttggttcgagcacgtgcaggagttttgggaacatcggatggactcgaatgtgcttttcctaaagtatgaggatatgcatagagacctggtgactatggtcgaacagctcgctcgtttcctcggcgtgagctgcgacaaggctcagctggaggcattgacagagcactgccatcaacttgtggaccagtgctgcaatgccgaagccttacccgtcggtaggggacgcgtgggcctttggaaagatatcttcaccgtttcgatgaatgagaaattcgacttagtgtataagcaaaaaatgggtaaatgcgacctaaccttcgatttttacctctag

SEQ ID NO: 323537 - DNA, 1100 bp, Artificial Sequence
  derived and/or modified sequence
gcgtgcgggctgcgagccgggaggcggcggcggcgacggcgacggcggcggcatggcggagagcgaggccgagacccccagcaccccgggggagttcgagagcaagtacttcgagttccatggcgtgcggctgccgcccttctgccgcgggaagatggaggagatcgccaacttcccggtgcggcccagcgacgtgtggatcgtcacctaccccaagtccgtgggctacggctcctggtttgagcacgtgcaggagttctgggagcaccgcatggactcgaacgtgctttttctcaagtatgaagacatgcatcgggacctggtgacgatggtggagcagctggccagattcctgggggtgtcctgtgacaaggcccagctggaagccctgacggagcactgccaccagctggtggaccagtgctgcaacgctgaggccctgcccgtgggccggggaagagttgggctgtggaaggacatcttcaccgtctccatgaatgagaagtttgacttggtgtataaacagaagatgggaaagtgtgacctcacgtttgacttttatttataataacagaaacaacaacctgcatgctcacaatacccagacagtctactagccaaaagtcctgtatgcattcatttattccttgctggacaaactctggaagcagcgtgtgaaacagcgggggaagggaagagcggcgtgagcggagggagtgtgatgattcccaaccgaaagcagctgtctcgcctttagaacgtgcagcctctccatgtctgattacaaacagtctccacattgcagttccaatggcctggaccgtaaggataaagcctgtaatatatgcaactagaatgtctgccttttcaaccccgtattattgtattttatagagcttttcactggaaatctacataaatgtcagtaaaccaaataaaagttcatttccaaggggaatcaggagcgagccacacccgaatggtagaaagatctcagggttaactctttatttttgtagttttattatctaaggcacagccattctgttctcacttggttctgagatagtggtgagaacagaggatgagttgggtctgtt

SEQ ID NO: 323538 - protein, 656 aa, Artificial Sequence
  derived and/or modified sequence
MEPAMEPETLEARINRATNPLNKELDWASINGFCEQLNEDFEGPPLATRLLAHKIQSPQEWEAIQALTVRRGEATIRPPPCDDTKVLETCMKSCGKRFHDEVGKFRFLNELIKVVSPKYLGSRTSEKVKNKILELLYSWTVGLPEEVKIAEAYQMLKKQGIVKSDPKLPDDTTFPLPPPRPKNVIFEDEEKSKMLARLLKSSHPEDLRAANKLIKEMVQEDQKRMEKISKRVNAIEEVNNNVKLLTEMVMSHSQGGAAAGSSEDLMKELYQRCERMRPTLFRLASDTEDNDEALAEILQANDNLTQVINLYKQLVRGEEVNGDATAGSIPGSTSALLDLSGLDLPPAGTTYPAMPTRPGEQASPEQPSASVSLLDDELMSLGLSDPTPPSGPSLDGTGWNSFQSSDATEPPAPALAQAPSMESRPPAQTSLPASSGLDDLDLLGKTLLQQSLPPESQQVRWEKQQPTPRLTLRDLQNKSSSCSSPSSSATSLLHTVSPEPPRPPQQPVPTELSLASITVPLESIKPSNILPVTVYDQHGFRILFHFARDPLPGRSDVLVVVVSMLSTAPQPIRNIVFQSAVPKVMKVKLQPPSGTELPAFNPIVHPSAITQVLLLANPQKEKVRLRYKLTFTMGDQTYNEMGDVDQFPPPETWGSL

SEQ ID NO: 323539 - protein, 89 aa, Artificial Sequence
  derived and/or modified sequence
MEPAMEPETLEARINRATNPLNKELDWASINGFCEQLNEDFEGPPLATRLLAHKIQSPQEWEAIQALTVRRGEATIRPPPCDDTKGGQD

SEQ ID NO: 323540 - DNA, 1971 bp, Artificial Sequence
  derived and/or modified sequence
atggaacctgcaatggaacctgaaaccttggaggcccgtattaaccgcgccactaaccctctgaataaagaactggactgggccagtatcaacggcttctgcgagcaacttaatgaggattttgagggcccccctctcgcgacacgtctgctggctcacaagatacagtcgccccaagaatgggaagctatccaggctctcaccgtcagacgaggtgaggctactatccgaccgccaccgtgtgacgacacaaaagtgttggaaacctgtatgaaatcgtgcggcaaacggtttcacgacgaggtgggaaagttccgcttcctaaatgaactcataaaggtcgtctcacctaaatacctgggaagccgcaccagtgagaaggtcaagaataaaattcttgaactgctgtactcctggaccgtggggctgcccgaagaagtcaaaattgctgaggcttaccagatgcttaaaaagcaaggcattgtgaaaagcgaccccaagctgcctgacgacacaaccttccccctgcccccgcctcgacccaagaacgtaatttttgaggacgaggagaagtcgaaaatgttagctcgtttgctgaagagctcccatcctgaagacctgcgggcagctaacaaactcattaaggagatggtgcaggaggatcaaaagcgcatggagaagattagtaagcgagtcaatgccatcgaggaagtcaataataacgttaagcttctgacagaaatggtgatgtcgcactcccagggaggcgctgccgctggctcaagcgaagatctcatgaaagagctttaccagaggtgcgaacgaatgcggccaaccctgtttcgactggccagtgatacggaagacaacgacgaggcactggccgagatcttacaggccaacgacaatctcacgcaggttatcaacctatacaagcagttggtgaggggggaggaggtgaatggcgacgccaccgctggatccatccctgggtctacgtctgccctcctggatctgtctggtctggacctaccgcccgcaggtaccacttacccagctatgcccactcggcccggcgagcaggcatcgcctgaacagcctagcgcttcagtgtccttgcttgatgatgaactgatgagccttgggctctccgaccctactccccccagcggaccgtctttggacggaaccgggtggaattcgttccaatcaagcgatgctacagagccccctgcacctgccctcgctcaggctccctctatggagagtcgcccacctgcccaaacctctttgcctgcctcttcaggactggacgacttagacctgctcggtaagaccctgttacagcagagtttacctcctgagagtcagcaggttcgctgggagaagcaacaaccaaccccgagactcacactaagagatttgcagaacaagtcctctagctgctctagtcccagcagttctgctaccagcctgctacacactgtcagtcccgaaccgccccgtcccccacagcagcccgttcctaccgagttgtcccttgcaagcatcaccgtccctctcgaatcaattaaaccttctaacatcctcccagtgacggtgtacgatcaacacgggttccgcattctgttccactttgctcgtgacccactacctgggcgtagcgacgtattagtcgtcgtggtttccatgctgtcaactgctccccagcccattagaaatatcgtgtttcagtctgccgtgcccaaagtcatgaaggtcaaattgcaaccaccaagtgggacagaactgcccgcgttcaaccccatagtccatccctctgcaattacacaggtacttttgctggctaacccacagaaggaaaaagttaggctcaggtacaagctgacttttaccatgggggatcaaacatacaatgaaatgggtgatgttgatcagttccctccgcctgagacgtggggatccctgtag

SEQ ID NO: 323541 - DNA, 57 bp, Artificial Sequence
  derived and/or modified sequence
atgaagagttgtgggaagcgctttcacgacgaggtcgggaagttcaggtttctttag

SEQ ID NO: 323542 - DNA, 87 bp, Artificial Sequence
  derived and/or modified sequence
atgaaaagttgtggaaagcgattccacgacgaggtaggcaaatttaggttccttaatgaactgattaaggtcgtgtcgccaaagtag

SEQ ID NO: 323543 - DNA, 2107 bp, Artificial Sequence
  derived and/or modified sequence
ctcgttggcctctctatggtgccgagcgcgcccgttcggacgttgcccctttaatcggcagagggcggtgcccaggaggtcccgcgagagctgcggggggcgggggggcggtgccgaggctgggggccggtggcggatggagcccgcgatggagccggagactctggaggcgcgaatcaatagagccacgaaccccctgaacaaggagctcgactgggccagcatcaacggcttctgcgagcagctcaacgaggactttgaggggcctccactcgccacccggctgctggcccacaagatccagtccccacaggagtgggaggcgatccaggccttgacggtgagaaggggagaggccaccatccgtcccccgccatgtgacgacaccaaggtgctggaaacatgcatgaagagctgcggcaagcggttccacgacgaagtgggcaagttccgctttctcaacgagctcatcaaggtcgtgtctcccaagtatctgggctctcggacatcggagaaggtgaagaacaagatcttggagctcctctacagctggacagtgggcctgcccgaggaggtgaaaatcgcagaggcctaccagatgctaaagaagcaggggattgtaaagtccgaccccaagcttccagatgacactacctttccccttcctcctccacggccgaagaatgtgatctttgaagatgaggagaaatccaagatgctggcccgcctgctgaagagctcccatcccgaagacctccgcgcagccaataagctcatcaaagagatggtgcaggaggaccagaagcggatggagaagatctcgaagagggtgaatgccatcgaggaggtgaacaacaatgtgaaactgctcacggagatggtgatgagccacagccagggcggcgcagcagctggcagcagcgaggacctcatgaaggaactgtaccagcgctgtgagcggatgcggcccacgctcttccgactggcgagtgacacagaggacaatgatgaggccttagcggagatcctgcaggccaatgacaacctcacccaggtgatcaacctgtataagcagctggtgcggggtgaggaggtcaacggtgatgccacagccggctccatccctgggagcacctcggccctgctggatctctcaggcctggatctcccgcctgcgggcaccacctacccagctatgcccacccgccctggcgagcaggccagccctgagcagcccagtgcctcagtttccctgcttgacgacgagctcatgtctctgggcctcagtgaccccacacccccttcaggcccaagcctggatggtaccggatggaacagcttccagtcgtcggatgccactgagcccccagcccctgctctggcccaggcccccagtatggaaagccgacccccagcgcagacatccctgccagcaagcagcggtctggacgacctagacctcctggggaagaccctcctgcagcagtcgctgcccccggaatcccagcaagtgcggtgggagaagcagcagccaaccccccggctcacactccgggacctgcagaataagagcagcagctgcagctcccccagctccagcgccaccagccttctccacaccgtgtccccagagccccccaggcctccgcagcagcccgtaccaaccgagctctcactggccagcatcactgtgcccctggagtccatcaaacccagcaacatcctgcccgtgactgtgtatgaccagcacggcttccgcatcctcttccattttgcccgggacccactgccagggcgctccgacgtgctggtggtggtggtttccatgctgagcaccgccccccagcccatccgcaacatcgtgttccagtcagctgtccccaaggttatgaaggtgaagctgcagccaccctcgggcacggagctgccagcttttaaccccatcgtccacccctcagcaatcacccaggtcctgctgcttgccaacccccagaaggagaaggttcgcctccgctacaagctcaccttcaccatgggtgaccagacctacaacgagatgggggatgtggaccagttccccccacctgaaacctggggtagcctctag

SEQ ID NO: 323544 - DNA, 1971 bp, Artificial Sequence
  derived and/or modified sequence
atggagcccgccatggagcctgagaccctggaggcccgcatcaacagagccaccaaccccctgaacaaggagctggactgggccagcatcaatggcttctgtgagcagctgaatgaagattttgagggcccccccctggccacccggctgctggcccacaagatccagagcccccaggagtgggaggccatccaggccctgactgtgcggcggggggaggccaccatccggcccccaccctgtgatgacaccaaggtgctggagacctgcatgaagagctgtgggaagcgcttccatgatgaggtgggcaagttccgcttcctgaatgaactcatcaaggtggtgagccccaagtacctgggcagcaggaccagcgagaaggtgaagaacaagatcctggagctgctgtacagctggacagtgggcctgcctgaggaggtgaagattgctgaggcctaccagatgctgaagaagcagggcatcgtgaagagtgaccccaagctgcctgatgacaccaccttccccctgcccccaccccggcccaagaatgtcatctttgaagatgaggagaagagcaagatgctggcccggctgctgaagagcagccaccctgaggacctgcgggccgccaacaagctgatcaaggagatggtgcaggaggaccagaagaggatggagaagatcagcaagagggtgaatgccatcgaggaggtgaacaacaacgtgaagctgctgacagagatggtgatgagccacagccagggcggcgctgctgctggcagcagcgaggacctgatgaaggagctgtaccagagatgtgagaggatgaggcccaccctcttccggctggccagtgacacagaggacaatgatgaggccctggccgagatcctgcaggccaatgacaacctgacccaggtgatcaacctgtacaagcagctggtgcggggggaggaggtgaatggagatgccacagctggcagcatccctggcagcaccagcgccctgctggacctgagcggcctggacctgcccccagctggcaccacctacccagccatgcccaccaggcctggagagcaggccagccctgagcagcccagcgcctctgtgtccctgctggatgatgagctgatgagcctgggcctgagtgaccccaccccacccagcggccccagcctggatggcaccggctggaacagcttccagagcagtgatgccacagagcccccagccccagccctggcccaggcccccagcatggagagccggcccccagcccagaccagcctgcctgccagcagcggcctggatgacctggacctgctgggcaagaccctgctgcagcagagcctgcccccagagagccagcaggtgcgctgggagaagcagcagcccaccccccggctgaccctgcgggacctgcagaacaagagcagcagctgcagcagccccagcagcagcgccaccagcctgctgcacacagtgtccccagagccccccaggcctccccagcagcctgtgcccacagagctgagcctggccagcatcaccgtgcccctggagagcatcaagcccagcaacatcctgcctgtgacagtgtatgaccagcacggcttccgcatcctcttccactttgcccgggaccccctgcccggccgcagtgatgtgctggtggtggtggtgtccatgctgagcacagccccccagcccatcagaaatattgtgttccagagcgctgtgcccaaggtgatgaaggtgaagctgcagcccccatctggaacagagctgcctgccttcaaccccatcgtgcaccccagcgccatcacccaggtgctgctgctggccaacccccagaaggagaaggtgcggctgcgctacaagctgaccttcaccatgggagaccagacctacaatgagatgggagatgtggaccagttccccccacctgagacctggggcagcctgtag

SEQ ID NO: 323545 - DNA, 57 bp, Artificial Sequence
  derived and/or modified sequence
atgaagagctgtgggaagcgcttccatgatgaggtgggcaagttccgcttcctgtag

SEQ ID NO: 323546 - DNA, 87 bp, Artificial Sequence
  derived and/or modified sequence
atgaagagctgtgggaagcgcttccatgatgaggtgggcaagttccgcttcctgaatgaactcatcaaggtggtgagccccaagtag

SEQ ID NO: 323547 - DNA, 1971 bp, Artificial Sequence
  derived and/or modified sequence
atggagcccgccatggagcccgagaccctggaggcccggatcaacagggctacaaacccactgaataaagaactcgactgggcctccatcaacggattttgcgaacagcttaacgaggattttgagggtcctcctctcgcgacccgtctcttggcccataaaatccagagcccccaggagtgggaggccatccaggccctcactgtccgcaggggcgaggccacaattagaccgccaccatgcgacgataccaaggttctagagacatgcatgaagtcttgtggaaagcgattccacgatgaagtgggtaagttccggttcctcaacgaattgataaaagtggtctctccaaagtatcttggtagtaggacgtctgaaaaagttaaaaataagatcctggagctactatatagctggaccgtggggctccccgaagaagtgaagatcgctgaggcctaccagatgctgaagaagcaagggatcgtcaaatccgatcctaaactaccagacgacactacatttccactcccccctcctaggcccaaaaatgttatttttgaagacgaggagaaatccaaaatgctggcaaggttgctgaagtcttctcaccccgaggaccttcgcgcagctaataagcttattaaggagatggttcaggaagatcagaaaagaatggaaaagatctctaaacgcgtcaacgccatcgaggaagttaacaacaatgtgaaactgctcacagaaatggtgatgtcacatagtcagggaggcgcggcggcaggttcctctgaagatttgatgaaggaactgtaccagcgatgcgaacggatgcggcccaccctgtttagattggcttcggatactgaagacaacgacgaagctctcgcagagatccttcaagccaatgataacctgacccaggtcatcaatctgtacaagcagctggtacgcggagaagaggtcaatggggacgcaacggctgggagcatacctggcagtacaagcgccttgctggatcttagcgggctggatctgcctcccgcaggcactacctatccagctatgcctactcgacccggagaacaggcctccccagagcagccctccgcttctgtcagtttgcttgatgacgaactgatgtcattgggactgtctgaccctacgcctcccagcggaccatcgctggatggcaccggttggaactcgttccagtcatcagatgctacggagccgcctgcccctgccctggcccaggctccgagcatggaaagtcgcccaccagcgcagacctcgcttcctgcgagcagcggacttgacgatcttgatttactggggaaaacgctgcttcagcaatcacttccccctgagagccagcaggtgcggtgggagaagcagcagcccaccccccgcttgaccctccgcgacctgcaaaacaagtcaagttcctgctcctctcccagtagctccgcaacatcgctcttgcacacagtgtcccccgagccaccacgccccccccaacagccagtccccaccgaactgtcccttgccagtatcactgtgccattggagtctataaagccgtccaacattttacccgtaacagtctacgatcagcacggctttagaatccttttccatttcgcgcgcgaccccctgcccggacgtagcgacgtccttgtggtggtggtgtcaatgctcagcaccgcgcctcagccaatccgcaatatcgtgttccaaagcgcagtgccaaaagtaatgaaggtgaaactccagccaccctctggtacagagctgcctgccttcaatcccattgtgcatccatctgccatcactcaggtgctcctgttagcaaatccgcagaaagaaaaggttcgactgcggtacaagctaacctttaccatgggcgatcagacctacaacgagatgggtgacgttgaccagttcccccccccggaaacctgggggtcactttag

SEQ ID NO: 323548 - DNA, 57 bp, Artificial Sequence
  derived and/or modified sequence
atgaagagctgcggcaagcggttccacgacgaggtgggcaagttccgatttctttag

SEQ ID NO: 323549 - DNA, 87 bp, Artificial Sequence
  derived and/or modified sequence
atgaagagctgcggcaagcggttccacgacgaggtgggcaagttcagatttttgaatgaactgattaaggtggtgagtccaaagtag

SEQ ID NO: 323550 - DNA, 1971 bp, Artificial Sequence
  derived and/or modified sequence
atggaacctgccatggaaccagaaaccttggaagcacgaatcaatcgtgccactaaccctctaaacaaagagttggattgggccagcattaacggattctgcgagcaactgaacgaagactttgaagggcctcctctagcaacccgcctcctggcccacaaaatccagtctccccaggagtgggaggccatccaggccctcactgtaaggaggggcgaagctacaatacggcctcctccatgtgatgacaccaaagtgctcgagacttgtatgaaaagctgcggaaagagatttcacgatgaagtcgggaagtttaggtttcttaacgagttgatcaaggtggtctctcccaagtatctagggagtcggacctctgaaaaggtaaagaacaaaatcctggagctgctgtatagttggacagtggggctgcccgaggaagtgaagattgcagaggcttatcagatgctaaagaagcagggtattgttaaaagtgacccaaaactccctgacgacacaacctttccgctccccccacccaggcctaagaatgtgatctttgaagatgaagagaagagtaagatgttggcccgattgctgaagagtagtcacccggaagaccttcgggcagccaataagcttatcaaggagatggtgcaggaagatcagaagaggatggaaaaaattagcaagagagtgaatgcaatagaggaggttaacaacaacgttaaactgctcacggagatggtgatgtcccactcccaaggaggagctgcggcaggaagctcggaggatctgatgaaggaactctatcaacgctgcgaacgaatgcgaccgacactgttccggttggcctctgacacagaggacaacgacgaggcactagcggagatcctgcaggcgaacgacaacctcactcaggtgataaacctgtacaagcagctcgtgaggggggaagaggttaatggcgacgcaactgcgggttcgatccccggatccaccagcgctctgcttgatctgagcggcctcgacctgcctccagcgggtacaacttaccctgccatgccaactcggcctggcgaacaagcgagcccagagcagccatccgcttccgtctcactcctggacgatgaactcatgagtctgggactctccgatcctacccctccgagcgggccttctttggatggaacaggctggaactcattccagagctccgatgcaaccgagccaccagcgcctgctttagcccaggcaccttctatggagtctagaccacctgcccagacaagcctgccagcttcttccgggctcgacgatttggacctgctggggaagactctcctgcagcagtcactccctcccgaatcccagcaagtgcgctgggagaaacagcaaccaacacccaggctgacactaagggatctgcagaacaagagctcttcgtgctcatcaccctccagcagtgccacctccctactgcataccgtgagcccagagccacccagacctcctcagcagccagttccaaccgagctctctctggccagtatcaccgttcctcttgagagcataaagccatccaacattctgccggttaccgtgtacgaccaacacggattcagaattcttttccattttgcccgagatcccctgcctgggaggagcgatgttctggtcgtggtggtgagcatgctctccacagccccacagccaatccgcaatatcgtgtttcagagcgcagtccccaaggttatgaaagtcaaactgcagcctccctccggcaccgagctgcctgcatttaatcccatcgtccacccatctgcgatcacacaggtactgctgttagccaaccctcagaaagagaaagtacgcctccgttacaaactgactttcacgatgggtgatcagacctataacgagatgggcgacgtcgaccagttcccaccccctgagacttggggaagcttgtag

SEQ ID NO: 323551 - DNA, 57 bp, Artificial Sequence
  derived and/or modified sequence
atgaagtcatgtggtaagaggttccacgacgaggtggggaagttccgctttttgtag

SEQ ID NO: 323552 - DNA, 87 bp, Artificial Sequence
  derived and/or modified sequence
atgaaaagttgcgggaaacggttccacgacgaagttgggaagtttaggttcctgaatgagctgatcaaggtcgtaagcccaaagtag

SEQ ID NO: 323553 - DNA, 1971 bp, Artificial Sequence
  derived and/or modified sequence
atggagcccgccatggagcccgagaccctggaggccagaatcaacagagccaccaaccccctgaacaaggagctggactgggccagcatcaacggcttctgcgagcagctgaacgaggacttcgagggcccccccctggccaccagactgctggcccacaagatccagagcccccaggagtgggaggccatccaggccctgaccgtgagaagaggcgaggccaccatcagaccccccccctgcgacgacaccaaggtgctggagacctgcatgaagagctgcggcaagagattccacgacgaggtgggcaagttcagattcctgaacgagctgatcaaggtggtgagccccaagtacctgggcagcagaaccagcgagaaggtgaagaacaagatcctggagctgctgtacagctggaccgtgggcctgcccgaggaggtgaagatcgccgaggcctaccagatgctgaagaagcagggcatcgtgaagagcgaccccaagctgcccgacgacaccaccttccccctgcccccccccagacccaagaacgtgatcttcgaggacgaggagaagagcaagatgctggccagactgctgaagagcagccaccccgaggacctgagagccgccaacaagctgatcaaggagatggtgcaggaggaccagaagagaatggagaagatcagcaagagagtgaacgccatcgaggaggtgaacaacaacgtgaagctgctgaccgagatggtgatgagccacagccagggcggcgccgccgccggcagcagcgaggacctgatgaaggagctgtaccagagatgcgagagaatgagacccaccctgttcagactggccagcgacaccgaggacaacgacgaggccctggccgagatcctgcaggccaacgacaacctgacccaggtgatcaacctgtacaagcagctggtgagaggcgaggaggtgaacggcgacgccaccgccggcagcatccccggcagcaccagcgccctgctggacctgagcggcctggacctgccccccgccggcaccacctaccccgccatgcccaccagacccggcgagcaggccagccccgagcagcccagcgccagcgtgagcctgctggacgacgagctgatgagcctgggcctgagcgaccccaccccccccagcggccccagcctggacggcaccggctggaacagcttccagagcagcgacgccaccgagccccccgcccccgccctggcccaggcccccagcatggagagcagaccccccgcccagaccagcctgcccgccagcagcggcctggacgacctggacctgctgggcaagaccctgctgcagcagagcctgccccccgagagccagcaggtgagatgggagaagcagcagcccacccccagactgaccctgagagacctgcagaacaagagcagcagctgcagcagccccagcagcagcgccaccagcctgctgcacaccgtgagccccgagccccccagacccccccagcagcccgtgcccaccgagctgagcctggccagcatcaccgtgcccctggagagcatcaagcccagcaacatcctgcccgtgaccgtgtacgaccagcacggcttcagaatcctgttccacttcgccagagaccccctgcccggcagaagcgacgtgctggtggtggtggtgagcatgctgagcaccgccccccagcccatcagaaacatcgtgttccagagcgccgtgcccaaggtgatgaaggtgaagctgcagccccccagcggcaccgagctgcccgccttcaaccccatcgtgcaccccagcgccatcacccaggtgctgctgctggccaacccccagaaggagaaggtgagactgagatacaagctgaccttcaccatgggcgaccagacctacaacgagatgggcgacgtggaccagttccccccccccgagacctggggcagcctgtag

SEQ ID NO: 323554 - DNA, 57 bp, Artificial Sequence
  derived and/or modified sequence
atgaagagctgcggcaagagattccacgacgaggtgggcaagttcagattcctgtag

SEQ ID NO: 323555 - DNA, 87 bp, Artificial Sequence
  derived and/or modified sequence
atgaagagctgcggcaagagattccacgacgaggtgggcaagttcagattcctgaacgagctgatcaaggtggtgagccccaagtag

SEQ ID NO: 323556 - protein, 60 aa, Artificial Sequence
  derived and/or modified sequence
MKSCGKRFHDEVGKFRFLNELIKVVSPKYLGSRTSEKVKNKILELLYSWTVGLPEEVKIA

SEQ ID NO: 323557 - protein, 70 aa, Artificial Sequence
  derived and/or modified sequence
MKSCGKRFHDEVGKFRFLNELIKVVSPKYLGSRTSEKVKNKILELLYSWTVGLPEEVKIAEAYQMLKKQG

SEQ ID NO: 323558 - DNA, 270 bp, Artificial Sequence
  derived and/or modified sequence
atggagccggccatggagccagagacattagaagcgcgcataaatcgggcaactaaccccctgaacaaagagctggattgggcatctatcaatggattttgtgagcaattgaacgaagatttcgaggggccaccactggccactcggctgctcgcccataagatccagtcaccacaggaatgggaagcaatccaagccctaactgtcagaagaggagaggccaccatccgtccccccccctgtgatgacacgaagggcggccaggactag

SEQ ID NO: 323559 - DNA, 1714 bp, Artificial Sequence
  derived and/or modified sequence
ggaagtggcctcagagcccctcagcaacatgcccgcagagaattcttccggaggcggtcacagacatctccgtgacgcagaacgagttagagcgtcccttggggtttccatggtgctgcccttagcctgcagtatctccacttcctctcccgcctgagcgccgggaacggaaaagcaggcggccggtcccagctgcgacgtagacgccgcgtgggggtggggttgggcgagtaggtgacgctctaggcgagctcgttggcctctctatggtgccgagcgcgcccgttcggacgttgcccctttaatcggcagagggcggtgcccaggaggtcccgcgagagctgcggggggcgggggggcggtgccgaggctgggggccggtggcggatggagcccgcgatggagccggagactctggaggcgcgaatcaatagagccacgaaccccctgaacaaggagctcgactgggccagcatcaacggcttctgcgagcagctcaacgaggactttgaggggcctccactcgccacccggctgctggcccacaagatccagtccccacaggagtgggaggcgatccaggccttgacggtgagaaggggagaggccaccatccgtcccccgccatgtgacgacaccaagggaggccaagactgaggttcttggggtccataaggctcttcagagcccaagagagttgtgctaagatggcccaggatggaggtccgggcctgccccaagggtcccaccacagccagcgggctggcctcccaccccagcatccatacacgtaggcctgttgctgagggaaggccctctagggtcatctggtccaggggttctttgcttcagctgcacatcggctgcctctccaggaagcgtgttcaacacatggaatcagggctccacccagacctgccgaggccacactcctggagtatctgcatccagagatctgcacgtttgtaaagctaaggggtggtgcttgggctcaggcctgaggttttgcatctgttcaatagcagaggagagaggggtgtactgtctgtggcccccagcatgggccacataccaacccaccatggagcaaagctgattttaagtggtggtagagatacagtttctcttttaatacttacgtgtttagttgggtgcagtggcttatacctgtaatttcagcacttggggaggccaaggcaggaggcttgcttgaggcaaggagttcaaggctacagtgagctatgattgtgccactgtactccagactggacaacagagtgagaccccatctctaaataataatcattattgttacatatttgttttaacatttttttctcaagtataactagtcctatgatttcatagatgtagcttaggataaggccaaggtaggtgttgcctatataaggtttttttaaaaaaggaaaaataggccgggctggtggctcacgcctgtaatcccagcactttggcaggctgaggcgggcagatcacctgagatcaggagttcaagatcagcctgaccaacatggagaagccccatgtctactaaaaataaaaaattagcgaggcgtggtgggcgggcgcctgtaatcccagctacttgggaggctgaggcagaagaatcatttgaacccaggaggcagaggttacagtgagccgagatcgtgctactgcattccaacctgggcaacaagagtgaaactctgtc

SEQ ID NO: 323560 - DNA, 270 bp, Artificial Sequence
  derived and/or modified sequence
atggagcccgccatggagcctgagaccctggaggcccgcatcaacagagccaccaaccccctgaacaaggagctggactgggccagcatcaatggcttctgtgagcagctgaatgaagattttgagggcccccccctggccacccggctgctggcccacaagatccagagcccccaggagtgggaggccatccaggccctgactgtgcggcggggggaggccaccatccggcccccaccctgtgatgacaccaagggcggccaggactag

SEQ ID NO: 323561 - DNA, 270 bp, Artificial Sequence
  derived and/or modified sequence
atggagcccgccatggagcccgagaccctggaggcccggatcaaccgtgctacgaatccactcaacaaagagttggactgggcatcaattaacggcttttgcgagcagctcaatgaggacttcgagggcccaccattagccactagactgcttgctcataagatccaaagcccacaggagtgggaggccatccaggctcttaccgtacggcgaggggaggccacaattcgccctcctccctgtgatgacaccaaagggggccaggactag

SEQ ID NO: 323562 - DNA, 270 bp, Artificial Sequence
  derived and/or modified sequence
atggaacctgctatggaaccagagactctagaagctcggatcaatagagctactaatccattgaataaagagctcgactgggcatccatcaatgggttttgtgagcagctgaacgaagatttcgagggccctcctcttgctactcgcctgctggctcataaaatccagagcccacaggaatgggaagctattcaagcattgaccgtcagacgcggtgaagccacaatccggccacctccttgtgatgatacaaaaggaggacaggattag

SEQ ID NO: 323563 - DNA, 270 bp, Artificial Sequence
  derived and/or modified sequence
atggagcccgccatggagcccgagaccctggaggccagaatcaacagagccaccaaccccctgaacaaggagctggactgggccagcatcaacggcttctgcgagcagctgaacgaggacttcgagggcccccccctggccaccagactgctggcccacaagatccagagcccccaggagtgggaggccatccaggccctgaccgtgagaagaggcgaggccaccatcagaccccccccctgcgacgacaccaagggcggccaggactag

SEQ ID NO: 323564 - protein, 38 aa, Artificial Sequence
  derived and/or modified sequence
MKSCGKRFHDEVGKFRFLNELIKVVSPKYLGSRTSEKV

SEQ ID NO: 323565 - protein, 566 aa, Artificial Sequence
  derived and/or modified sequence
MKSCGKRFHDEVGKFRFLNELIKVVSPKYLGSRTSEKVKNKILELLYSWTVGLPEEVKIAEAYQMLKKQGIVKSDPKLPDDTTFPLPPPRPKNVIFEDEEKSKMLARLLKSSHPEDLRAANKLIKEMVQEDQKRMEKISKRVNAIEEVNNNVKLLTEMVMSHSQGGAAAGSSEDLMKELYQRCERMRPTLFRLASDTEDNDEALAEILQANDNLTQVINLYKQLVRGEEVNGDATAGSIPGSTSALLDLSGLDLPPAGTTYPAMPTRPGEQASPEQPSASVSLLDDELMSLGLSDPTPPSGPSLDGTGWNSFQSSDATEPPAPALAQAPSMESRPPAQTSLPASSGLDDLDLLGKTLLQQSLPPESQQVRWEKQQPTPRLTLRDLQNKSSSCSSPSSSATSLLHTVSPEPPRPPQQPVPTELSLASITVPLESIKPSNILPVTVYDQHGFRILFHFARDPLPGRSDVLVVVVSMLSTAPQPIRNIVFQSAVPKVMKVKLQPPSGTELPAFNPIVHPSAITQVLLLANPQKEKVRLRYKLTFTMGDQTYNEMGDVDQFPPPETWGSL

SEQ ID NO: 323566 - protein, 40 aa, Artificial Sequence
  derived and/or modified sequence
MKSCGKRFHDEVGKFRFLNELIKVVSPKYLGSRTSEKVKN

SEQ ID NO: 323567 - protein, 109 aa, Artificial Sequence
  derived and/or modified sequence
MKSCGKRFHDEVGKFRFLNELIKVVSPKYLGSRTSEKVKNKILELLYSWTVGLPEEVKIAEAYQMLKKQGIVKSDPKLPDDTTFPLPPPRPKNVIFEDEEKSKMLARLL

SEQ ID NO: 323568 - protein, 18 aa, Artificial Sequence
  derived and/or modified sequence
MKSCGKRFHDEVGKFRFL

SEQ ID NO: 323569 - protein, 28 aa, Artificial Sequence
  derived and/or modified sequence
MKSCGKRFHDEVGKFRFLNELIKVVSPK

SEQ ID NO: 323570 - DNA, 1701 bp, Artificial Sequence
  derived and/or modified sequence
atgaaaagctgcggtaaacgattccacgacgaagtgggcaagttccgctttcttaacgaactaatcaaagtggtttcgcccaagtatctggggtctcgcacttccgagaaagtgaaaaacaagatcctcgaactgctgtactcttggaccgtggggctaccagaggaggtgaagattgctgaggcttatcagatgctcaaaaaacagggcattgtcaagagtgaccctaagctgcccgacgatacaacttttcccttacctcctcctagacctaaaaacgttattttcgaggacgaggagaagtctaaaatgcttgcccggcttctaaagagttcccatcccgaggatctgagagcagctaacaagctgataaaagaaatggtacaggaagaccagaaaaggatggaaaaaatcagtaagcgggtgaacgctatagaggaagtgaataataatgtcaagctgctgacggaaatggtgatgagccattctcagggcggggctgccgcaggatcctccgaagaccttatgaaagaattgtaccaacggtgtgagcgaatgagacctacactctttcgcctcgccagcgatacagaggataatgatgaggccctagctgaaatacttcaggccaacgataacctgactcaggttatcaacttgtacaagcagctggtgcggggagaggaagtgaatggtgatgcgacggcagggtcaatcccaggctcgacttcggcactgctcgacctgtcgggtttggacctgcctccagccggaactacttaccctgcaatgccaacgcggccaggcgagcaggcgtctcccgaacagccctctgcttccgtgtctctgctggatgatgagttaatgtctttaggcttgtcagatcccacaccaccatcaggcccctcactggacgggaccgggtggaatagcttccagtcctctgacgccaccgagccccccgctcccgctctggctcaggcccctagtatggagagtcgcccgccagcacagacatcactcccggctagttccggtctagacgacctggacctgctgggcaaaacactgctgcagcagtctctgccccccgagagccagcaggtaaggtgggagaagcagcagccaacgccccgcctgacccttagagatttgcagaataaatcctcttcatgttcttctccatccagttcagcaacttctctgctacatacagtgtcccccgagcctccaaggcccccccaacagcccgtgccaaccgagctcagcttagccagcatcacagtgcccctggaatccatcaaacctagtaatattctgcccgtcacggtctacgaccagcacgggtttcggatactgttccactttgctcgtgaccctctgcccgggcggtccgatgtactggttgtggttgtctctatgttatccacggcccctcaaccaataaggaacattgtattccagtctgccgtccctaaggtgatgaaagtcaaactacagccgccctctggtacagaacttcctgcttttaatcccatcgtacaccccagcgccattacccaggtcctgcttcttgcgaatccacaaaaagagaaagttcggctcagatacaaattaaccttcaccatgggagaccagacttacaacgagatgggcgacgtggatcagttccccccacccgagacgtggggtagcttatag

SEQ ID NO: 323571 - DNA, 1701 bp, Artificial Sequence
  derived and/or modified sequence
atgaagagctgtgggaagcgcttccatgatgaggtgggcaagttccgcttcctgaatgaactcatcaaggtggtgagccccaagtacctgggcagcaggaccagcgagaaggtgaagaacaagatcctggagctgctgtacagctggacagtgggcctgcctgaggaggtgaagattgctgaggcctaccagatgctgaagaagcagggcatcgtgaagagtgaccccaagctgcctgatgacaccaccttccccctgcccccaccccggcccaagaatgtcatctttgaagatgaggagaagagcaagatgctggcccggctgctgaagagcagccaccctgaggacctgcgggccgccaacaagctgatcaaggagatggtgcaggaggaccagaagaggatggagaagatcagcaagagggtgaatgccatcgaggaggtgaacaacaacgtgaagctgctgacagagatggtgatgagccacagccagggcggcgctgctgctggcagcagcgaggacctgatgaaggagctgtaccagagatgtgagaggatgaggcccaccctcttccggctggccagtgacacagaggacaatgatgaggccctggccgagatcctgcaggccaatgacaacctgacccaggtgatcaacctgtacaagcagctggtgcggggggaggaggtgaatggagatgccacagctggcagcatccctggcagcaccagcgccctgctggacctgagcggcctggacctgcccccagctggcaccacctacccagccatgcccaccaggcctggagagcaggccagccctgagcagcccagcgcctctgtgtccctgctggatgatgagctgatgagcctgggcctgagtgaccccaccccacccagcggccccagcctggatggcaccggctggaacagcttccagagcagtgatgccacagagcccccagccccagccctggcccaggcccccagcatggagagccggcccccagcccagaccagcctgcctgccagcagcggcctggatgacctggacctgctgggcaagaccctgctgcagcagagcctgcccccagagagccagcaggtgcgctgggagaagcagcagcccaccccccggctgaccctgcgggacctgcagaacaagagcagcagctgcagcagccccagcagcagcgccaccagcctgctgcacacagtgtccccagagccccccaggcctccccagcagcctgtgcccacagagctgagcctggccagcatcaccgtgcccctggagagcatcaagcccagcaacatcctgcctgtgacagtgtatgaccagcacggcttccgcatcctcttccactttgcccgggaccccctgcccggccgcagtgatgtgctggtggtggtggtgtccatgctgagcacagccccccagcccatcagaaatattgtgttccagagcgctgtgcccaaggtgatgaaggtgaagctgcagcccccatctggaacagagctgcctgccttcaaccccatcgtgcaccccagcgccatcacccaggtgctgctgctggccaacccccagaaggagaaggtgcggctgcgctacaagctgaccttcaccatgggagaccagacctacaatgagatgggagatgtggaccagttccccccacctgagacctggggcagcctgtag

SEQ ID NO: 323572 - DNA, 1701 bp, Artificial Sequence
  derived and/or modified sequence
atgaagagctgcggcaagcggttccacgacgaggtgggcaagttcagatttctgaatgagttaataaaggtagtgtctcctaagtacctcggcagccggacttccgaaaaagtaaaaaataagattctcgagctgctgtactcttggacggtaggtctgcccgaggaggttaaaatagccgaggcctaccagatgttgaagaagcagggaattgtaaagtccgacccgaaactcccagatgacacaactttcccacttccaccgccaagaccgaagaatgtgatctttgaggacgaggagaagtctaagatgctggctcgactgctgaagtccagccatccagaggacctacgcgccgctaacaaattgattaaggaaatggtgcaagaggatcagaagagaatggaaaagatctccaagcgagtgaatgcaatagaggaggttaataataatgttaagctgctaacagaaatggtgatgagtcacagtcaaggaggagccgccgctggaagcagcgaggacctcatgaaagagctctatcagcgctgtgagcgcatgcgcccgaccctgttccggctagccagcgacaccgaggataacgacgaagcactggccgaaatcctgcaggccaacgataacctcactcaggttatcaatttatacaaacaactcgtgcgcggagaagaggtgaacggcgacgctacggcaggatccataccaggatccacatcagccttactcgatttgtcgggtttagatctgccaccagccggtacgacatacccggccatgccaactaggcctggggagcaggcgagccctgaacagccttccgctagcgtgtcactgctggacgacgaactcatgagtctcgggctgagcgatcccaccccaccatccggccccagtctggatgggactgggtggaacagtttccaatcatccgacgcaaccgagcctcccgccccagcattagctcaggctccaagtatggaatcccggccaccagcccaaacctcattgccagcctcttcagggcttgacgacctcgatctgctgggaaagacattgcttcagcagagtctcccacctgagtcccagcaggtcagatgggaaaagcagcagcctaccccccgcctgactctgagggacttgcagaataaaagctccagctgttccagccccagttctagcgccacctccctcctccatacagtttctcccgagcccccacgaccaccccagcagcccgttcccaccgaactctcattggcctcaattaccgttcccctggaatccatcaaaccctcaaatatccttcctgtgacagtctacgaccagcatggcttcaggattctctttcatttcgctagggatccgttacctggccgaagcgacgttttggtagtagtggtcagcatgctctccacggctccccaacccatcagaaacatcgtattccaaagtgcagttccgaaggtgatgaaggtgaagttgcagccacctagcggcactgagctccctgcctttaatcccattgttcaccctagcgccatcacccaggtactattactggcgaacccacaaaaggagaaagtgaggctccggtataagctgaccttcaccatgggcgaccagacctacaatgagatgggggacgtcgaccagtttccgccccccgagacgtggggctctctgtag

SEQ ID NO: 323573 - DNA, 1701 bp, Artificial Sequence
  derived and/or modified sequence
atgaaaagctgcggcaaacgtttccacgacgaagtgggaaagtttcgttttctaaatgagctgattaaagtcgtgagtccaaagtatctcggctcacgtacttccgagaaagttaagaacaaaattctggagctgctctatagctggaccgtggggctgccagaagaggtgaaaatcgccgaagcctaccagatgctgaaaaagcaaggcatcgtcaagagtgatcctaagctacccgacgatacgactttccccctgcctcccccacggccaaaaaacgtcattttcgaagacgaggaaaagagcaagatgctggcccgtctgctgaaatcctctcaccctgaggatcttcgggctgccaacaagcttattaaggaaatggtgcaggaagatcaaaaacggatggagaagatttccaagagagtcaatgccattgaggaggtgaacaacaatgtcaaactgttaactgagatggttatgtctcattcacaggggggagcggcagccggttcctcagaggatcttatgaaagaattgtatcaaagatgtgagaggatgaggccgacactgtttagactcgccagcgatactgaggataatgacgaggccctcgccgaaatcttgcaggccaatgataacttgacacaggtgatcaacctgtacaaacaactcgttaggggtgaggaggtgaacggcgatgctacagccggatccatcccaggctccacttcagctctgctcgacctcagcggtctggatctcccgccagcaggaacaacctacccagctatgccgactaggcctggcgagcaggcatctccggagcaaccctccgcttccgtgagtctgttggacgacgagttaatgagcctaggcttgtctgatccgactccgccaagcggcccatcccttgatgggactggatggaactcatttcagagttctgatgctacagagccgccagcaccggctctggcccaggctccttccatggaatcccggccacccgctcagacgagtctcccggcttcctcaggcctagatgatctggacttgctgggaaagactcttttgcaacagtccctgcccccagagtcacagcaggtaaggtgggaaaagcaacaacccacgccaaggctcactctgcgggacctgcagaacaagtcgtccagctgctcaagcccctcaagctcggccacttccctgctccataccgtatcccccgagccaccccgacctccacagcagccggttccgaccgagctgtccctggcgtccataaccgtgcccctcgaaagcattaaaccatcgaatatattgcccgtgacggtctacgatcagcacggcttccgaatccttttccactttgcgcgtgatcctctgcccggaagaagcgacgtactggttgtggttgtgtctatgctctcgacagccccacagccaattaggaatattgtgtttcagagtgccgtcccgaaggtgatgaaggtcaagcttcagcccccatcgggcactgagctcccagcttttaacccgatcgtgcacccatccgccatcactcaggttctgctgctggcaaatccccaaaaagaaaaagtgcgcctgcggtacaaactgacgttcactatgggtgatcaaacctataatgagatgggagacgttgatcagtttccacccccagaaacctggggcagcttatag

SEQ ID NO: 323574 - DNA, 1701 bp, Artificial Sequence
  derived and/or modified sequence
atgaagagctgcggcaagagattccacgacgaggtgggcaagttcagattcctgaacgagctgatcaaggtggtgagccccaagtacctgggcagcagaaccagcgagaaggtgaagaacaagatcctggagctgctgtacagctggaccgtgggcctgcccgaggaggtgaagatcgccgaggcctaccagatgctgaagaagcagggcatcgtgaagagcgaccccaagctgcccgacgacaccaccttccccctgcccccccccagacccaagaacgtgatcttcgaggacgaggagaagagcaagatgctggccagactgctgaagagcagccaccccgaggacctgagagccgccaacaagctgatcaaggagatggtgcaggaggaccagaagagaatggagaagatcagcaagagagtgaacgccatcgaggaggtgaacaacaacgtgaagctgctgaccgagatggtgatgagccacagccagggcggcgccgccgccggcagcagcgaggacctgatgaaggagctgtaccagagatgcgagagaatgagacccaccctgttcagactggccagcgacaccgaggacaacgacgaggccctggccgagatcctgcaggccaacgacaacctgacccaggtgatcaacctgtacaagcagctggtgagaggcgaggaggtgaacggcgacgccaccgccggcagcatccccggcagcaccagcgccctgctggacctgagcggcctggacctgccccccgccggcaccacctaccccgccatgcccaccagacccggcgagcaggccagccccgagcagcccagcgccagcgtgagcctgctggacgacgagctgatgagcctgggcctgagcgaccccaccccccccagcggccccagcctggacggcaccggctggaacagcttccagagcagcgacgccaccgagccccccgcccccgccctggcccaggcccccagcatggagagcagaccccccgcccagaccagcctgcccgccagcagcggcctggacgacctggacctgctgggcaagaccctgctgcagcagagcctgccccccgagagccagcaggtgagatgggagaagcagcagcccacccccagactgaccctgagagacctgcagaacaagagcagcagctgcagcagccccagcagcagcgccaccagcctgctgcacaccgtgagccccgagccccccagacccccccagcagcccgtgcccaccgagctgagcctggccagcatcaccgtgcccctggagagcatcaagcccagcaacatcctgcccgtgaccgtgtacgaccagcacggcttcagaatcctgttccacttcgccagagaccccctgcccggcagaagcgacgtgctggtggtggtggtgagcatgctgagcaccgccccccagcccatcagaaacatcgtgttccagagcgccgtgcccaaggtgatgaaggtgaagctgcagccccccagcggcaccgagctgcccgccttcaaccccatcgtgcaccccagcgccatcacccaggtgctgctgctggccaacccccagaaggagaaggtgagactgagatacaagctgaccttcaccatgggcgaccagacctacaacgagatgggcgacgtggaccagttccccccccccgagacctggggcagcctgtag

SEQ ID NO: 323575 - protein, 353 aa, Artificial Sequence
  derived and/or modified sequence
MEFRKTMDIDHILDWQPPEVIQKYMPGGLCGYDRDGCPVWYDIIGPLDPKGLLFSVTKQDLLKTKMRDCERILHECDLQTERLGKKIETIVMIFDCEGLGLKHFWKPLVEVYQEFFGLLEENYPETLKFMLIVKATKLFPVGYNLMKPFLSEDTRRKIIVLGNNWKEGLLKLISPEELPAQFGGTLTDPDGNPKCLTKINYGGEIPKSMYVRDQVKTQYEHSVQINRGSSHQVEYEILFPGCVLRWQFSSDGADIGFGVFLKTKMGERQRAGEMTDVLPSQRYNAHMVPEDGNLTCSEAGVYVESESGKSCCHLPVIICSHELQNSHSNSQVMAYQMVRKCKLSRPLPLPASN

SEQ ID NO: 323576 - DNA, 1062 bp, Artificial Sequence
  derived and/or modified sequence
atggagttccgcaagaccatggatattgatcatattctggactggcagcccccagaagtgatacagaaatacatgccaggcggcttatgtggctatgaccgggatggctgccctgtctggtacgatattattgggcctctcgatcccaaggggctgttatttagtgtgaccaagcaggatctgctaaaaacgaaaatgcgggattgtgagaggattcttcacgagtgtgatctacaaactgaacggttaggcaagaaaatcgaaaccatcgtcatgattttcgactgcgaaggtctaggcttgaaacatttctggaaacctttggtggaggtctatcaagagtttttcggcttgttggaggaaaactaccctgaaacccttaagtttatgctgatcgtcaaagcaaccaaactcttccctgtcggatataatctgatgaagcccttcctgagcgaagacacccgacggaagattattgtcttggggaataactggaaagaagggctcctgaagcttatttcccctgaagaactccccgcccaattcggtggaaccttgacagaccccgacggcaacccaaaatgcctgacgaagataaactacgggggagaaattcccaaaagtatgtacgtccgcgatcaggtgaagacgcagtatgaacatagcgttcaaatcaacagaggctcctcccatcaggtcgagtacgaaattctgtttcctggatgtgtgctcagatggcagttcagtagtgatggcgccgatattggattcggcgtgtttctgaagacaaagatgggcgagagacagagagccggagagatgacagacgtcctgccttcccagaggtacaatgcccatatggtgccagaggacggtaatttgacatgcagcgaggccggcgtgtacgtcgagagcgagagcgggaagtcctgctgtcatctgcccgttataatttgcagtcacgagctgcagaattcgcactctaattctcaggttatggcgtatcaaatggtacgcaaatgcaagttgtcacggcctctgcctctgcccgcatcgaactag

SEQ ID NO: 323577 - DNA, 1062 bp, Artificial Sequence
  derived and/or modified sequence
atggagttcaggaagaccatggacatcgaccacatcctggactggcagcccccagaggtgatccagaagtacatgcctgggggcctgtgtggctatgacagagatggctgccctgtgtggtatgacatcatcggccccctggaccccaagggcctgctcttctctgtgaccaagcaggacctgctgaagaccaagatgagggactgtgagcgcatcctgcatgaatgtgacctgcagacagagcggctgggcaagaagattgagaccatcgtgatgatctttgactgtgagggcctgggcctgaagcacttctggaagcccctggtggaggtgtaccaggagttcttcggcctgctggaggagaactacccagagaccctgaagttcatgctgattgtgaaggccaccaagctgtttcctgtgggctacaacctgatgaagcccttcctgtctgaggacaccaggaggaagatcatcgtgctgggcaacaactggaaggagggcctgctgaagctgatcagccctgaggagctgcctgcccagtttggaggcaccctgacagatcctgatggcaaccccaagtgcctgaccaagatcaactatggaggagagatccccaagtccatgtatgtgcgggaccaggtgaagacccagtatgagcacagcgtgcagatcaacagaggcagcagccaccaggtggagtatgagatcctcttccctggctgtgtgctgcgctggcagttcagcagtgatggagctgacattggatttggagtcttcctgaagaccaagatgggagagcggcagagagctggggagatgacagatgtgctgcccagccagcgctacaatgcccacatggtgcctgaagatggcaacctgacctgcagcgaggccggcgtgtatgtggagagcgagagcggcaagagctgctgccacctgcctgtgatcatctgcagccatgagctgcagaacagccacagcaacagccaggtgatggcctaccagatggtgaggaagtgcaagctgagccggcccctgcccctgcctgccagcaactag

SEQ ID NO: 323578 - DNA, 1062 bp, Artificial Sequence
  derived and/or modified sequence
atggagttccggaagaccatggacatcgaccacatcctggactggcagcctcctgaggtaatccagaagtatatgccggggggactctgtgggtacgatcgggatggctgtcccgtgtggtacgatatcatcggcccacttgatcccaaggggctcctgttttctgtgacaaagcaggacttactgaagaccaagatgcgggattgtgagcgcattctgcatgagtgcgacctccagactgaaagacttgggaaaaaaatcgaaactattgtcatgatattcgactgtgaggggttgggacttaagcatttctggaaacccctggtggaggtataccaggaattttttggccttctcgaggagaattatccagaaactctcaagtttatgctcattgtgaaggctactaagctattcccagtgggttacaacctcatgaagccattcctgtctgaggatactagaaggaaaataatcgtgctagggaataactggaaagagggcttgctgaaactgatttcaccggaagagctgcctgcgcagttcggaggtacgctgaccgatccggacgggaacccaaagtgtctgactaagatcaattatgggggagagatccccaagagcatgtacgtgagggatcaggtcaagacccagtacgagcattctgtgcagataaatcgcggcagcagccaccaagtggaatacgaaattctttttcccggctgtgtgttgcgctggcagtttagctcagacggggccgacattgggtttggggttttcctgaagactaaaatgggcgaacggcagagggctggagagatgaccgacgttttgcctagccagcgatacaacgcccacatggtcccggaggatggaaatcttacttgcagcgaagccggagtgtacgtggagagcgagagtggcaagagttgctgccacttgcctgtcatcatctgcagccacgagctgcagaactcccatagcaatagccaggttatggcctaccagatggtgagaaagtgtaagctgagtaggcccctccctctcccggcgagtaactag

SEQ ID NO: 323579 - DNA, 1062 bp, Artificial Sequence
  derived and/or modified sequence
atggagttcagaaagacaatggatatagatcatattcttgactggcagcctccagaggtcattcagaaatatatgcccggtggcctctgcgggtatgaccgggacggatgtcctgtgtggtacgatatcataggccctctggacccaaaaggacttctctttagtgtgaccaaacaggaccttctcaaaactaagatgcgtgattgcgagagaatcctacacgagtgtgacctccagaccgaacgacttgggaagaagatcgagaccatcgtgatgatctttgattgcgaaggactgggcctaaagcatttttggaaaccacttgtggaagtgtaccaggagttctttggattgctcgaagaaaactacccagagactctcaagttcatgctgattgtaaaggccaccaaactatttcccgtcggctacaaccttatgaagccgtttcttagcgaagatacgcgcaggaaaatcattgttctgggcaataactggaaggagggcctgctcaaattgatctccccagaagaactacccgctcagtttggaggaactctcaccgaccctgatggaaatcccaagtgccttaccaagatcaactatggtggtgagatccctaagtcaatgtacgtaagagaccaggtaaaaacacaatacgaacactccgtgcaaatcaatcgcggatcatcacaccaggtggagtacgaaattctgtttccaggctgcgtattgagatggcagttctcatcggacggcgctgatattggcttcggcgtatttctgaagactaaaatgggggagcggcagcgagctggagagatgacagacgtcttaccatcccagcggtacaatgctcacatggtgccagaagatgggaaccttacgtgctccgaagccggagtgtacgtagaatccgaaagcgggaaatcttgctgccacctccccgtaataatttgctctcatgagctccagaattctcactccaactcccaggtgatggcttatcaaatggtaagaaagtgcaagctgtctcgaccccttcccctgccagcctctaactag

SEQ ID NO: 323580 - DNA, 2316 bp, Artificial Sequence
  derived and/or modified sequence
cagttccgagaaaacgtccaggatgtgcttcctgccctgcccaaccctgatgattatttccttctacgctggctccgagctcggaattttgacttgcagaagtcggaggctttgctccgcaagtacatggagttccggaagaccatggatattgaccatatccttgattggcagcccccagaggtgatccagaagtacatgcctgggggcctgtgtggctatgaccgtgatggctgccccgtgtggtatgacatcattgggccacttgatcccaaggggttgctcttctcagtcaccaagcaggacctgctcaagaccaagatgagggactgtgagcgcatcctgcatgagtgtgacctgcagacagagaggctagggaagaagattgagaccatcgtgatgatatttgactgtgagggcctgggactgaaacacttctggaaacctctggtagaagtgtaccaggagttctttggcctccttgaagagaattacccagagaccctgaagttcatgctcatcgtgaaagctaccaaactgttccctgtgggctacaacctcatgaagccattcctgagtgaggacactcgcaggaaaattattgtgttgggaaataactggaaggaaggtttgctgaaactcatcagtcctgaggaactgcctgcccagtttgggggcaccctgactgacccagatgggaaccccaaatgtttaaccaagattaactatggcggggagatccccaagtccatgtacgtgcgggaccaggtgaagactcagtacgagcactcggtgcagatcaaccgcggctcatcacaccaagtggaatacgagatcctatttccaggctgcgttctcaggtggcagttctcatctgatggtgcggacatcggcttcggagttttcctgaagaccaagatgggggagcgacagcgggcaggggagatgacagatgttctacccagccagcgctataacgcccacatggtgcccgaggatgggaacctcacctgctcagaggccggcgtctatgtggaaagtgagtctgggaagtcttgctgtcatctgcccgtgattatatgcagccatgagctacagaactcacactcaaactcgcaagtgatggcataccaaatggtacgaaaatgcaagctaagtaggcctttacccctccctgccagtaactaatttttgtctgtgtgagtaactggcctgtgtgtaagaggactcaccccctacgtggtctccagttaattctttttcccatttgggctcctgaccgccttgccatgctgcttctaagaggggttatctatactcagagggcctagggcagaccaaggaagggaaagaagttttggaggtttgtttgtttgttttttagagacagggctttgctttgtggcccaggctggagtgcagtggtgcgatcatagctcactgcaaccttgagctcttgggctcaagtgattctcccctctcagcctcctgagtggctgagaccacaggtacacatcaccatgcctgggttttttttctttctttctttctttcttttttttttttggtagagatgaggtattgttacattgcccaggctggtctcaaattcctgacctcaagcaatcctcctaccttggcctcccagtgctaggattacatgtgtgagccaccactcctggtctgggctttttttttttttttttttaggagaatgtaaggcatttgtttagtgtttactgagcatctactgcatgccaagctctgctcaggaggccaagagagcaggataggagtgagccctgcacctggggtttggcctggctggggagccctagcctcaggaagcaggactgccctggaccccaggaggcccctgctcaacctgcgacaagactgaaaggctccccagatgcactgtgacggtcaagggagagaaatgggtgacctgggatcctggtggcttcagatctcattgggggaaggagcaagggaccccaggggtcagaggcattgggggggtagggctgtcagagggcacccagcagagtgactcacaggctatgaggaaagaagtctcctcttgcttgtatcttcaggatgccaagacctgcagcccaggcctggggtggtggttatcccggagcggccttaccaggtgcacagctggccaagggaggcttggtcatgggcagagagggcaggaggaaggcccttgctccaccaccccctctcccaagggagtcctatgcccagaacttaccaagtagcaagactagagcaaccagcagaagacccttgggggcagccatcatg

SEQ ID NO: 323581 - DNA, 1062 bp, Artificial Sequence
  derived and/or modified sequence
atggagttcagaaagaccatggacatcgaccacatcctggactggcagccccccgaggtgatccagaagtacatgcccggcggcctgtgcggctacgacagagacggctgccccgtgtggtacgacatcatcggccccctggaccccaagggcctgctgttcagcgtgaccaagcaggacctgctgaagaccaagatgagagactgcgagagaatcctgcacgagtgcgacctgcagaccgagagactgggcaagaagatcgagaccatcgtgatgatcttcgactgcgagggcctgggcctgaagcacttctggaagcccctggtggaggtgtaccaggagttcttcggcctgctggaggagaactaccccgagaccctgaagttcatgctgatcgtgaaggccaccaagctgttccccgtgggctacaacctgatgaagcccttcctgagcgaggacaccagaagaaagatcatcgtgctgggcaacaactggaaggagggcctgctgaagctgatcagccccgaggagctgcccgcccagttcggcggcaccctgaccgaccccgacggcaaccccaagtgcctgaccaagatcaactacggcggcgagatccccaagagcatgtacgtgagagaccaggtgaagacccagtacgagcacagcgtgcagatcaacagaggcagcagccaccaggtggagtacgagatcctgttccccggctgcgtgctgagatggcagttcagcagcgacggcgccgacatcggcttcggcgtgttcctgaagaccaagatgggcgagagacagagagccggcgagatgaccgacgtgctgcccagccagagatacaacgcccacatggtgcccgaggacggcaacctgacctgcagcgaggccggcgtgtacgtggagagcgagagcggcaagagctgctgccacctgcccgtgatcatctgcagccacgagctgcagaacagccacagcaacagccaggtgatggcctaccagatggtgagaaagtgcaagctgagcagacccctgcccctgcccgccagcaactag

SEQ ID NO: 323582 - protein, 202 aa, Artificial Sequence
  derived and/or modified sequence
MKVLAAGVVPLLLVLHWKHGAGSPLPITPVNATCAIRHPCHNNLMNQIRSQLAQLNGSANALFILYYTAQGEPFPNNLDKLCGPNVTDFPPFHANGTEKAKLVELYRIVVYLGTSLGNITRDQKILNPSALSLHSKLNATADILRGLLSNVLCRLCSKYHVGHVDVTYGPDTSGKDVFQKKKLGCQLLGKYKQIIAVLAQAF

SEQ ID NO: 323583 - DNA, 3935 bp, Artificial Sequence
  derived and/or modified sequence
tacaacacaggctccagtatataaatcaggcaaattccccatttgagcatgaacctctgaaaactgccggcatctgaggtttcctccaaggccctctgaagtgcagcccataatgaaggtcttggcggcaggagttgtgcccctgctgttggttctgcactggaaacatggggcggggagccccctccccatcacccctgtcaacgccacctgtgccatacgccacccatgtcacaacaacctcatgaaccagatcaggagccaactggcacagctcaatggcagtgccaatgccctctttattctctattacacagcccagggggagccgttccccaacaacctggacaagctatgtggccccaacgtgacggacttcccgcccttccacgccaacggcacggagaaggccaagctggtggagctgtaccgcatagtcgtgtaccttggcacctccctgggcaacatcacccgggaccagaagatcctcaaccccagtgccctcagcctccacagcaagctcaacgccaccgccgacatcctgcgaggcctccttagcaacgtgctgtgccgcctgtgcagcaagtaccacgtgggccatgtggacgtgacctacggccctgacacctcgggtaaggatgtcttccagaagaagaagctgggctgtcaactcctggggaagtataagcagatcatcgccgtgttggcccaggccttctagcaggaggtcttgaagtgtgctgtgaaccgagggatctcaggagttgggtccagatgtgggggcctgtccaagggtggctggggcccagggcatcgctaaacccaaatgggggctgctggcagaccccgagggtgcctggccagtccactccactctgggctgggctgtgatgaagctgagcagagtggaaacttccatagggagggagctagaagaaggtgccccttcctctgggagattgtggactggggagcgtgggctggacttctgcctctacttgtccctttggccccttgctcactttgtgcagtgaacaaactacacaagtcatctacaagagccctgaccacagggtgagacagcagggcccaggggagtggaccagcccccagcaaattatcaccatctgtgcctttgctgccccttaggttgggacttaggtgggccagaggggctaggatcccaaaggactccttgtcccctagaagtttgatgagtggaagatagagaggggcctctgggatggaaggctgtcttcttttgaggatgatcagagaacttgggcataggaacaatctggcagaagtttccagaaggaggtcacttggcattcaggctcttggggaggcagagaagccaccttcaggcctgggaaggaagacactgggaggaggagaggcctggaaagctttggtaggttcttcgttctcttccccgtgatcttccctgcagcctgggatggccagggtctgatggctggacctgcagcaggggtttgtggaggtgggtagggcaggggcaggttgctaagtcaggtgcagaggttctgagggacccaggctcttcctctgggtaaaggtctgtaagaaggggctggggtagctcagagtagcagctcacatctgaggccctgggaggccttgtgaggtcacacagaggtacttgagggggactggaggccgtctctggtccccagggcaagggaacagcagaacttagggtcagggtctcagggaaccctgagctccaagcgtgctgtgcgtctgacctggcatgatttctatttattatgatatcctatttatattaacttattggtgctttcagtggccaagttaattcccctttccctggtccctactcaacaaaatatgatgatggctcccgacacaagcgccagggccagggcttagcagggcctggtctggaagtcgacaatgttacaagtggaataagccttacgggtgaagctcagagaagggtcggatctgagagaatggggaggcctgagtgggagtggggggccttgctccacccccccccatcccctactgtgacttgctttagggtgtcagggtccaggctgcaggggctgggccaatttgtggagaggccgggtgcctttctgtcttgattccagggggctggttcacactgttcttgggcgccccagcattgtgttgtgaggcgcactgttcctggcagatattgtgccccctggagcagtgggcaagacagtccttgtggcccaccctgtccttgtttctgtgtccccatgctgcctctgaaatagcgccctggaacaaccctgcccctgcacccagcatgctccgacacagcagggaagctcctcctgtggcccggacacccatagacggtgcggggggcctggctgggccagaccccaggaaggtggggtagactggggggatcagctgcccattgctcccaagaggaggagagggaggctgcagatgcctgggactcagaccaggaagctgtgggccctcctgctccacccccatcccactcccacccatgtctgggctcccaggcagggaacccgatctcttcctttgtgctggggccaggcgagtggagaaacgccctccagtctgagagcaggggagggaaggaggcagcagagttggggcagctgctcagagcagtgttctggcttcttctcaaaccctgagcgggctgccggcctccaagttcctccgacaagatgatggtactaattatggtacttttcactcactttgcacctttccctgtcgctctctaagcactttacctggatggcgcgtgggcagtgtgcaggcaggtcctgaggcctggggttggggtggagggtgcggcccggagttgtccatctgtccatcccaacagcaagacgaggatgtggctgttgagatgtgggccacactcacccttgtccaggatgcagggactgccttctccttcctgcttcatccggcttagcttggggctggctgcattcccccaggatgggcttcgagaaagacaaacttgtctggaaaccagagttgctgattccacccggggggcccggctgactcgcccatcacctcatctccctgtggacttgggagctctgtgccaggcccaccttgcggccctggctctgagtcgctctcccacccagcctggacttggccccatgggacccatcctcagtgctccctccagatcccgtccggcagcttggcgtccaccctgcacagcatcactgaatcacagagcctttgcgtgaaacagctctgccaggccgggagctgggtttctcttccctttttatctgctggtgtggaccacacctgggcctggccggaggaagagagagtttaccaagagagatgtctccgggcccttatttattatttaaacatttttttaaaaagcactgctagtttacttgtctctcctccccatcgtccccatcgtcctccttgtccctgacttggggcacttccaccctgacccagccagtccagctctgccttgccggctctccagagtagacatagtgtgtggggttggagctctggcacccggggaggtagcatttccctgcagatggtacagatgttcctgccttagagtcatctctagttccccacctcaatcccggcatccagccttcagtcccgcccacgtgctagctccgtgggcccaccgtgcggccttagaggtttccctccttcctttccactgaaaagcacatggccttgggtgacaaattcctctttgatgaatgtaccctgtggggatgtttcatactgacagattatttttatttattcaatgtcatatttaaaatatttattttttataccaaatgaatacttttttttttaagaaaaaaaagagaaatgaataaagaatctactcttgaaaaaaaaaaaaaaaa

SEQ ID NO: 323584 - DNA, 609 bp, Artificial Sequence
  derived and/or modified sequence
atgaaagttctggctgccggtgtcgtccccctcctgctcgtgctgcactggaaacatggagcaggatcccctctacctataacccccgtgaatgcgacatgcgcaataaggcacccctgccacaacaacctgatgaatcagattcgcagtcagctcgcacagctgaatggtagtgcaaatgcactctttatcctgtattacaccgctcagggcgagccttttccgaataatctggacaagttatgtggccctaacgtgacggatttcccgccctttcatgccaacggtacggagaaagccaagctcgtggaactgtaccggatagtcgtctacctggggactagcttggggaacatcactagggaccaaaaaatactgaacccctccgcactgtcactacactctaagttgaatgctaccgccgacattttacgcgggctgttaagcaacgtgctttgtaggttatgtagtaagtaccacgtgggtcacgtcgatgtaacttatggccccgatacatctggcaaggacgtatttcagaagaagaagctgggctgtcagctgctgggaaaatataaacagataatagcggtcttggcgcaagctttctag

SEQ ID NO: 323585 - DNA, 609 bp, Artificial Sequence
  derived and/or modified sequence
atgaaggtgctggccgccggcgtggtgcccctgctgctggtgctgcactggaagcatggagctggcagccccctgcccatcacccctgtgaatgccacctgtgccatccgccacccctgccacaacaacctgatgaaccagatccgcagccagctggcccagctgaatggcagcgccaatgccctcttcatcctgtactacacagcccagggcgagcccttccccaacaacctggacaagctgtgtggccccaacgtgacagacttcccccccttccacgccaatggaacagagaaggccaagctggtggagctgtaccgcatcgtggtgtacctgggcaccagcctgggcaacatcacccgggaccagaagatcctgaaccccagcgccctgagcctgcacagcaagctgaatgccacagctgacatcctgcggggcctgctgagcaatgtgctgtgccgcctgtgcagcaagtaccacgtgggccacgtggatgtgacctacggccctgacaccagcggcaaggatgtgttccagaagaagaagctgggctgccagctgctgggcaagtacaagcagatcatcgctgtgctggcccaggccttctag

SEQ ID NO: 323586 - DNA, 3969 bp, Artificial Sequence
  derived and/or modified sequence
cttcctggactggggatcccggctaaatatagctgtttctgtcttacaacacaggctccagtatataaatcaggcaaattccccatttgagcatgaacctctgaaaactgccggcatctgaggtttcctccaaggccctctgaagtgcagcccataatgaaggtcttggcggcaggagttgtgcccctgctgttggttctgcactggaaacatggggcggggagccccctccccatcacccctgtcaacgccacctgtgccatacgccacccatgtcacaacaacctcatgaaccagatcaggagccaactggcacagctcaatggcagtgccaatgccctctttattctctattacacagcccagggggagccgttccccaacaacctggacaagctatgtggccccaacgtgacggacttcccgcccttccacgccaacggcacggagaaggccaagctggtggagctgtaccgcatagtcgtgtaccttggcacctccctgggcaacatcacccgggaccagaagatcctcaaccccagtgccctcagcctccacagcaagctcaacgccaccgccgacatcctgcgaggcctccttagcaacgtgctgtgccgcctgtgcagcaagtaccacgtgggccatgtggacgtgacctacggccctgacacctcgggtaaggatgtcttccagaagaagaagctgggctgtcaactcctggggaagtataagcagatcatcgccgtgttggcccaggccttctagcaggaggtcttgaagtgtgctgtgaaccgagggatctcaggagttgggtccagatgtgggggcctgtccaagggtggctggggcccagggcatcgctaaacccaaatgggggctgctggcagaccccgagggtgcctggccagtccactccactctgggctgggctgtgatgaagctgagcagagtggaaacttccatagggagggagctagaagaaggtgccccttcctctgggagattgtggactggggagcgtgggctggacttctgcctctacttgtccctttggccccttgctcactttgtgcagtgaacaaactacacaagtcatctacaagagccctgaccacagggtgagacagcagggcccaggggagtggaccagcccccagcaaattatcaccatctgtgcctttgctgccccttaggttgggacttaggtgggccagaggggctaggatcccaaaggactccttgtcccctagaagtttgatgagtggaagatagagaggggcctctgggatggaaggctgtcttcttttgaggatgatcagagaacttgggcataggaacaatctggcagaagtttccagaaggaggtcacttggcattcaggctcttggggaggcagagaagccaccttcaggcctgggaaggaagacactgggaggaggagaggcctggaaagctttggtaggttcttcgttctcttccccgtgatcttccctgcagcctgggatggccagggtctgatggctggacctgcagcaggggtttgtggaggtgggtagggcaggggcaggttgctaagtcaggtgcagaggttctgagggacccaggctcttcctctgggtaaaggtctgtaagaaggggctggggtagctcagagtagcagctcacatctgaggccctgggaggccttgtgaggtcacacagaggtacttgagggggactggaggccgtctctggtccccagggcaagggaacagcagaacttagggtcagggtctcagggaaccctgagctccaagcgtgctgtgcgtctgacctggcatgatttctatttattatgatatcctatttatattaacttattggtgctttcagtggccaagttaattcccctttccctggtccctactcaacaaaatatgatgatggctcccgacacaagcgccagggccagggcttagcagggcctggtctggaagtcgacaatgttacaagtggaataagccttacgggtgaagctcagagaagggtcggatctgagagaatggggaggcctgagtgggagtggggggccttgctccacccccccccatcccctactgtgacttgctttagggtgtcagggtccaggctgcaggggctgggccaatttgtggagaggccgggtgcctttctgtcttgattccagggggctggttcacactgttcttgggcgccccagcattgtgttgtgaggcgcactgttcctggcagatattgtgccccctggagcagtgggcaagacagtccttgtggcccaccctgtccttgtttctgtgtccccatgctgcctctgaaatagcgccctggaacaaccctgcccctgcacccagcatgctccgacacagcagggaagctcctcctgtggcccggacacccatagacggtgcggggggcctggctgggccagaccccaggaaggtggggtagactggggggatcagctgcccattgctcccaagaggaggagagggaggctgcagatgcctgggactcagaccaggaagctgtgggccctcctgctccacccccatcccactcccacccatgtctgggctcccaggcagggaacccgatctcttcctttgtgctggggccaggcgagtggagaaacgccctccagtctgagagcaggggagggaaggaggcagcagagttggggcagctgctcagagcagtgttctggcttcttctcaaaccctgagcgggctgccggcctccaagttcctccgacaagatgatggtactaattatggtacttttcactcactttgcacctttccctgtcgctctctaagcactttacctggatggcgcgtgggcagtgtgcaggcaggtcctgaggcctggggttggggtggagggtgcggcccggagttgtccatctgtccatcccaacagcaagacgaggatgtggctgttgagatgtgggccacactcacccttgtccaggatgcagggactgccttctccttcctgcttcatccggcttagcttggggctggctgcattcccccaggatgggcttcgagaaagacaaacttgtctggaaaccagagttgctgattccacccggggggcccggctgactcgcccatcacctcatctccctgtggacttgggagctctgtgccaggcccaccttgcggccctggctctgagtcgctctcccacccagcctggacttggccccatgggacccatcctcagtgctccctccagatcccgtccggcagcttggcgtccaccctgcacagcatcactgaatcacagagcctttgcgtgaaacagctctgccaggccgggagctgggtttctcttccctttttatctgctggtgtggaccacacctgggcctggccggaggaagagagagtttaccaagagagatgtctccgggcccttatttattatttaaacatttttttaaaaagcactgctagtttacttgtctctcctccccatcgtccccatcgtcctccttgtccctgacttggggcacttccaccctgacccagccagtccagctctgccttgccggctctccagagtagacatagtgtgtggggttggagctctggcacccggggaggtagcatttccctgcagatggtacagatgttcctgccttagagtcatctctagttccccacctcaatcccggcatccagccttcagtcccgcccacgtgctagctccgtgggcccaccgtgcggccttagaggtttccctccttcctttccactgaaaagcacatggccttgggtgacaaattcctctttgatgaatgtaccctgtggggatgtttcatactgacagattatttttatttattcaatgtcatatttaaaatatttattttttataccaaatgaatacttttttttttaagaaaaaaaagagaaatgaataaagaatctactcttggctggc

SEQ ID NO: 323587 - DNA, 609 bp, Artificial Sequence
  derived and/or modified sequence
atgaaggtgctggccgccggcgtggtgcccctgctgctggtgctgcattggaaacacggcgcaggcagtcccctgcctatcacccccgttaatgctacgtgtgcgatccggcacccctgccacaacaacttgatgaaccagataaggagtcagctggcccagctgaatgggtcagctaacgccctgtttatcctctactataccgcccagggcgagcccttccctaataatcttgataagctttgtggacccaacgtcactgacttccctccattccatgctaatggaaccgaaaaggccaagctggtagaactgtatcggatcgtggtgtacctggggacatccctcggtaatatcaccagagaccagaaaatcctgaatccctctgccctttctctacattccaagttgaacgctaccgccgatattctccgaggccttcttagcaatgtgctctgccgtctgtgttccaagtaccatgtcggacatgtcgatgtgacctatgggcctgataccagtggcaaggacgtctttcagaaaaagaaacttggatgccagctacttggcaagtataagcaaatcattgctgtcctggctcaggccttttag

SEQ ID NO: 323588 - DNA, 609 bp, Artificial Sequence
  derived and/or modified sequence
atgaaggtgttggcagctggagtggtgccgttactgcttgtcctacactggaaacatggcgctgggtcacctctgcccataaccccagtcaatgccacttgtgccatccgccatccttgtcacaacaacctgatgaatcaaatcagaagccaactagcccagctgaatgggtccgccaatgcactcttcatcttatactatacagcacagggagaaccctttccgaataacctggacaagctctgtggccctaacgtgaccgactttcccccattccatgcaaatggcaccgagaaggctaaactggtcgaactgtatcgcatagtggtctacctgggaacaagccttgggaacatcacgcgggaccaaaagattctcaatccttcagccctgagtttgcattcaaagctgaacgccacagctgacattctgcgcggactactgtccaacgtgctatgcaggctgtgttctaaataccatgtgggtcacgttgacgtgacttacgggcctgatacgtcgggcaaggacgtattccaaaaaaaaaaactggggtgccagttgctggggaaatacaaacagatcatcgcagtcctggcccaagccttttag

SEQ ID NO: 323589 - DNA, 609 bp, Artificial Sequence
  derived and/or modified sequence
atgaaggtgctggccgccggcgtggtgcccctgctgctggtgctgcactggaagcacggcgccggcagccccctgcccatcacccccgtgaacgccacctgcgccatcagacacccctgccacaacaacctgatgaaccagatcagaagccagctggcccagctgaacggcagcgccaacgccctgttcatcctgtactacaccgcccagggcgagcccttccccaacaacctggacaagctgtgcggccccaacgtgaccgacttcccccccttccacgccaacggcaccgagaaggccaagctggtggagctgtacagaatcgtggtgtacctgggcaccagcctgggcaacatcaccagagaccagaagatcctgaaccccagcgccctgagcctgcacagcaagctgaacgccaccgccgacatcctgagaggcctgctgagcaacgtgctgtgcagactgtgcagcaagtaccacgtgggccacgtggacgtgacctacggccccgacaccagcggcaaggacgtgttccagaagaagaagctgggctgccagctgctgggcaagtacaagcagatcatcgccgtgctggcccaggccttctag

SEQ ID NO: 323590 - protein, 962 aa, Artificial Sequence
  derived and/or modified sequence
MEDCNVHSAASILASVKEQEARFERLTRALEQERRHVALQLERAQQPGMVSGGMGSGQPLPMAWQQLVLQEQSPGSQASLATMPEAPDVLEETVTVEEDPGTPTSHVSIVTSEDGTTRRTETKVTKTVKTVTTRTVRQVPVGPDGLPLLDGGPPLGPFADGALDRHFLLRGGGPVATLSRAYLSSGGGFPEGPEPRDSPSYGSLSRGLGMRPPRAGPLGPGPGDGCFTLPGHREAFPVGPEPGPPGGRSLPERFQAEPYGLEDDTRSLAADDEGGPELEPDYGTATRRRPECGRGLHTRAYEDTADDGGELADERPAFPMVTAPLAQPERGSMGSLDRLVRRSPSVDSARKEPRWRDPELPEVLAMLRHPVDPVKANAAAYLQHLCFENEGVKRRVRQLRGLPLLVALLDHPRAEVRRRACGALRNLSYGRDTDNKAAIRDCGGVPALVRLLRAARDNEVRELVTGTLWNLSSYEPLKMVIIDHGLQTLTHEVIVPHSGWEREPNEDSKPRDAEWTTVFKNTSGCLRNVSSDGAEARRRLRECEGLVDALLHALQSAVGRKDTDNKSVENCVCIMRNLSYHVHKEVPGADRYQEAEPGPLGSAVGSQRRRRDDASCFGGKKAKEEWFHQGKKDGEMDRNFDTLDLPKRTEAAKGFELLYQPEVVRLYLSLLTESRNFNTLEAAAGALQNLSAGNWMWATYIRATVRKERGLPVLVELLQSETDKVVRAVAIALRNLSLDRRNKDLIGSYAMAELVRNVRNAQAPPRPGACLEEDTVVAVLNTIHEIVSDSLDNARSLLQARGVPALVALVASSQSVREAKAASHVLQTVWSYKELRGTLQKDGWTKARFQSAAATAKGPKGALSPGGFDDSTLPLVDKSLEGEKTGSRDVIPMDALGPDGYSTVDRRERRPRGASSAGEASEKEPLKLDPSRKAPPPGPSRPAVRLVDAVGDAKPQPVDSWV

SEQ ID NO: 323591 - DNA, 2889 bp, Artificial Sequence
  derived and/or modified sequence
atggaagattgcaacgtccatagtgcagcgtccattctggctagcgtgaaggagcaggaagccagatttgaacggctcacaagagccctggagcaagagcggcggcatgtggccctgcagctggagagggctcagcagccagggatggtttccgggggcatgggttctggacaacctcttccgatggcatggcagcagttagtgctgcaagaacagagccccggatcacaagcaagcctggccaccatgcctgaagcccccgacgtccttgaagagactgtcacagtggaggaggacccaggaacccccaccagccacgtgtccatcgttacctctgaggatggtactaccaggagaacggagaccaaagtcacaaagaccgtgaagactgtcaccacacgcacagttcgccaggtcccagtagggccagacgggctcccactgctggacggcgggcccccactcggaccgtttgccgatggcgctctcgaccgacacttcctcctgcgtggtggcgggccagtcgctactctgtcacgcgcctatctgtctagtggcggaggctttcccgaggggccggaaccaagggattctccatcatacgggtcactttctcggggcttgggaatgcggccgccacgtgctggacccttggggccaggtccaggggatggctgcttcaccttgcccggacaccgagaggcctttcccgtcggtcccgaaccgggcccccctggcggtcgtagtctgccagagcgtttccaggccgagccatatggccttgaagacgacacccgttcacttgctgcagacgatgaaggagggcccgaactcgaaccagactatggtactgccacacgccgaagaccagagtgcgggcggggactccacacgcgcgcctacgaagacaccgcggacgatgggggggaactcgctgacgagcgacccgcctttcctatggtcactgccccacttgcacagccagagcggggtagtatgggctcactcgatagactcgtccgccgcagcccttctgtcgattctgcccggaaagaaccccggtggcgcgatcccgagctcccagaggtgctggctatgctgcggcatccggtcgaccctgtcaaagccaacgccgccgcctacttgcagcatttgtgcttcgagaacgagggggtgaagcgtcgtgtgcgacagctgcgcggacttcccctgctggtcgccctgctggatcatcctagggcagaggtgcgtcggcgggcctgcggggccctgcggaacctctcatatggtcgcgacaccgacaacaaagccgctatcagggattgcggaggggtgcccgcgctcgtgcgcctgctgcgcgcagcgcgcgataacgaagtccgcgagctcgtgacggggaccttgtggaacttatcatcatacgagcccctgaagatggtcatcatcgaccatggcctgcagaccctaacacacgaagtaattgtgccacatagtgggtgggaacgtgaacccaacgaagattctaaacctcgagacgctgagtggacaaccgtgtttaaaaacacatcaggctgtctccggaacgtttcctctgacggcgctgaagcacggcgccgcttgcgggagtgcgagggattggtggacgctcttctgcacgccctccaatccgctgtgggaagaaaggacactgacaataagtctgtagaaaactgtgtttgcattatgcggaacctgtcttatcacgttcataaggaagtcccaggtgctgaccgttatcaggaggctgaaccgggacctctagggagtgcagttggaagccagagaaggcgccgcgacgatgcctcttgtttcggaggaaaaaaggcgaaagaggaatggttccatcagggcaaaaaggacggtgaaatggatcggaacttcgataccctcgatttgccaaaacggactgaagctgcgaaagggttcgagctcctataccagccagaagtcgtgcggttatacttgtctctgttgacagaaagtcggaacttcaacaccctggaggccgcagctggcgccctacaaaatctttccgctgggaactggatgtgggccacatatattcgtgccacagtgaggaaagaacggggactgcctgtgctcgttgaactactccagagcgagaccgacaaagtggtccgcgccgtggctattgcactgcgaaatctcagtctcgacaggcggaacaaagacctcatagggagctatgccatggcagagcttgtaagaaatgtgcgcaatgcccaggcacctccacggcccggagcttgcttagaagaggacacagttgtggctgtcttgaataccatccatgagatagtttcagactcactggacaacgctcgatcccttctccaagcgaggggagtaccggcactcgttgccctggtcgcctcttcacaaagtgtcagggaagctaaggctgcctcacatgtgctgcaaaccgtgtggagttataaagagcttcgtggaactttacagaaagacggctggacaaaagcccggttccagtctgctgccgccacagcgaaggggcctaaaggggccctctccccaggggggttcgatgacagcactctccccctggtggacaagagtctcgagggcgagaagacggggtcccgcgatgtcatcccaatggatgctcttgggcctgatgggtatagcaccgtggaccggcgggagagacgacccaggggcgccagtagcgccggagaggcctccgagaaagaaccactgaagcttgaccctagccgcaaggccccccctccaggccccagccggcctgccgtccgactggtggacgccgtcggcgatgcaaaacctcagcccgtagactcttgggtctag

SEQ ID NO: 323592 - DNA, 2889 bp, Artificial Sequence
  derived and/or modified sequence
atggaggactgcaatgtgcacagcgctgccagcatcctggcctctgtgaaggagcaggaggccaggtttgagcggctgacccgggccctggagcaggagcggcggcacgtggccctgcagctggagcgggcccagcagcccggcatggtgtctgggggcatgggcagcggccagcccctgcccatggcctggcagcagctggtgctgcaggagcagagccctggcagccaggccagcctggccaccatgcctgaggccccagatgtgctggaggagaccgtgacagtggaggaggaccccggcacccccaccagccacgtgtccatcgtgaccagtgaagatggcaccaccaggagaacagagaccaaggtgaccaagacagtgaagacagtgaccaccaggacagtgcggcaggtgcctgtgggcccagatggcctgcccctgctggatggcggcccccccctgggcccctttgctgatggagccctggacagacacttcctgctgcggggcggcggccctgtggccaccctgagccgggcctacctgagcagcggcggcggcttccctgagggccctgagccccgggacagccccagctatggcagcctgagccggggcctgggcatgaggcctcccagggctggccccctgggccctggccctggagatggctgcttcaccctgcccggccaccgggaggccttccctgtgggccctgagcccggccccccaggcggccgcagcctgcctgagcgcttccaggccgagccctacggcctggaggatgacaccaggagcctggccgcagatgatgagggcggccctgagctggagccagactatggaacagccacccggcggcggccagaatgtggccggggcctgcacacccgggcctatgaggacacagcagatgatggaggagagctggctgatgagaggcctgccttccccatggtgacagcccccctggcccagcctgagcggggctccatgggcagcctggaccggctggtgagaagaagccccagcgtggacagcgccaggaaggagccccgctggagggaccctgagctgcctgaggtgctggccatgctgcggcaccctgtggaccctgtgaaggccaatgctgctgcctacctgcagcacctgtgctttgaaaatgaaggagtgaagagaagagtgcggcagctgcggggcctgcccctgctggtggccctgctggaccaccccagggctgaggtgagaagaagagcctgtggggccctgaggaacctgtcctatggccgggacacagacaacaaggccgccatccgggactgtggcggcgtgcctgccctggtgcggctgctgcgggccgcccgggacaatgaggtgcgggagctggtgacaggcaccctgtggaacctgagcagctatgagcccctgaagatggtgatcatcgaccacggcctgcagaccctgacccatgaagtcatcgtgccccacagcggctgggagcgggagcccaatgaagacagcaagcccagagatgctgagtggaccaccgtcttcaagaacaccagcggctgcctgagaaatgtgtccagtgatggagctgaggcccggcggcggctgcgggagtgtgagggcctggtggatgccctgctgcacgccctgcagagcgctgtgggcaggaaggacacagacaacaagtctgtggagaactgtgtgtgcatcatgaggaacctgagctaccacgtgcacaaggaggtgcctggagctgaccgctaccaggaggccgagcccggccccctgggcagcgctgtgggcagccagaggagaagaagagatgatgccagctgctttggaggcaagaaggccaaggaggagtggttccaccagggcaagaaggatggagagatggacaggaactttgacaccctggacctgcccaagaggacagaagctgccaagggctttgagctgctgtaccagcctgaggtggtgcggctgtacctgagcctgctgacagagagcaggaacttcaacaccctggaggccgccgccggggccctgcagaacctgtctgctggcaactggatgtgggccacctacatccgggccaccgtgaggaaggagcggggcctgcctgtgctggtggagctgctgcagagcgagacagacaaggtggtgcgggctgtggccatcgccctgaggaacctgagcctggacagaagaaacaaggacctgattggcagctatgccatggccgagctggtgagaaatgtgagaaatgcccaggccccacccaggcctggggcctgcctggaggaggacacagtggtggccgtgctgaacaccatccacgagatcgtgtctgacagcctggacaatgcccggagcctgctgcaggcccggggcgtgcctgccctggtggccctggtggccagcagccagagcgtgcgggaggccaaggccgccagccacgtgctgcagacagtgtggagctacaaggagctgcggggcaccctgcagaaggatggctggaccaaggcccgcttccagagcgctgctgccacagccaagggccccaagggggccctgagccctgggggctttgatgacagcaccctgcccctggtggacaagagcctggagggggagaagacaggcagcagagatgtgatccccatggatgccctgggcccagatggctacagcacagtggaccggcgggagcggcggcccaggggggccagcagcgctggggaggccagcgagaaggagcccctgaagctggaccccagcaggaaggcccctcctcctggccccagcaggcctgctgtgcggctggtggatgctgtgggagatgccaagccccagcctgtggacagctgggtgtag

SEQ ID NO: 323593 - DNA, 2889 bp, Artificial Sequence
  derived and/or modified sequence
atggaggactgcaacgtgcacagcgccgccagcatcctggccagcgtcaaagaacaggaggcccgttttgagagactgacacgtgcattagaacaggagcggcgtcatgtggcacttcagttggaaagagctcagcagcctggtatggtctcaggcggcatgggctcaggacagcccctacctatggcttggcagcagcttgtgctgcaagaacagtccccggggagccaggcctctctggctaccatgccagaggccccagacgtattggaagaaaccgtcaccgtcgaagaggatcccggcacacctaccagccacgtgagcattgtgacgtctgaagacggcacaacaagaaggacggagacaaaggttactaaaaccgtaaagaccgtgactaccagaacagtaaggcaggtccccgtgggtcctgatgggctgcccctcctggacggcggcccgccattggggcctttcgctgatggagcactggacagacattttctgctccgaggcggcggacctgttgccaccctgtcacgggcgtacctgtcctcagggggcggatttcccgaaggccccgaacctagagattccccttcctatgggtctctgagcagagggctgggaatgaggccaccacgcgccgggcccctcggcccagggcccggagatggttgcttcacccttccaggacacagggaagcgttccccgtgggcccagaaccaggccccccaggtggaaggtcgctgccagagaggttccaggcggagccatacggattggaggatgacacccgatctctagccgccgatgatgaagggggccccgagttggagccggactatggtacagcgacccgccgacgacctgagtgcggaagagggcttcacactcgtgcgtacgaggatactgctgacgatggtggtgaactcgcagatgagcgaccagccttccccatggtcaccgcccccctcgcccagcctgagaggggcagcatgggatcccttgaccgcctcgtcaggcgctccccttctgtggatagtgctcggaaggaaccaaggtggcgcgacccagaactgccggaggtgctcgctatgctacggcaccctgtagatccagtgaaagccaacgccgctgcttacctccaacacctttgctttgagaatgaaggcgtgaaacggcgggttcgccaattgcgggggctgcctctgctcgtcgcccttttggatcatcctcgggcggaagttcggcgccgggcttgtggcgccctccgcaacttaagctatgggagggacactgacaataaagccgctattcgggactgtggaggagttccggcattagtcagactgctgagggcggcccgggataacgaggtgcgggaattagtgacaggaaccctttggaacctttccagttacgaacctttgaagatggtaattatcgatcacggcctgcagacactgactcatgaagtgatcgtgcctcacagcggctgggaaagagaacctaacgaggattctaaaccgcgcgacgcagagtggactacagttttcaagaatacatctggctgtttgagaaacgtcagttcagacggagctgaggcccgtaggcgtcttcgagaatgcgagggactggtggatgccttgcttcatgcgttgcagtctgcagtcggaaggaaggacaccgataataaatcggttgagaattgtgtatgcataatgcgcaacctgtcctaccacgttcacaaagaggtccccggggcagaccgctaccaggaagcagaacctggcccattgggatcggccgtgggctcccagcggcgccgaagagatgatgcttcatgctttggaggaaaaaaagctaaagaagagtggtttcatcagggcaaaaaggacggcgagatggatcggaacttcgacacccttgatctccctaagcggaccgaggctgcaaagggatttgaactgctttaccagccagaggtggtcagactttacctatctctgctgactgagtcacgcaacttcaacactctggaggccgctgctggcgcactgcaaaatctctcggccggcaattggatgtgggcaacctacattcgcgctacagtgcgtaaggaaagaggcctcccagttctggttgagctgctgcagagcgagaccgacaaagtggttcgggctgtggcgatcgccctcaggaatctttccttggaccgccgaaacaaggatctcataggtagctacgctatggcggaactagtgcggaatgtacgcaacgcacaagctccccctcggccgggggcctgcctagaagaagacaccgtggttgccgtgctgaataccatccacgaaattgtctctgacagtctcgataatgccaggagtctgctccaagcccgcggcgttccagcactggtggccctcgtcgccagtagtcagtccgtgcgggaggcaaaggccgcatcccacgtactgcagaccgtgtggagctataaggaattaagggggacactgcaaaaggatgggtggaccaaggcccgctttcagtctgccgcagctactgccaagggtcccaagggagcactgtcccctggcgggttcgacgattccactcttccgctcgtggacaaatctctcgaaggcgagaagaccggatcacgcgatgtgatccctatggacgccttggggcccgacgggtactctaccgttgataggcgggaaaggcgtcctcgcggagcctcatccgcgggcgaggcaagcgagaaagaacccttaaagcttgatccatcacgtaaagcccctccaccaggacccagcaggcccgcagtgcgtctcgttgacgctgtcggggatgctaagccccaaccagtagacagctgggtgtag

SEQ ID NO: 323594 - DNA, 2889 bp, Artificial Sequence
  derived and/or modified sequence
atggaggattgcaacgtgcacagcgccgcttccatcctcgcttctgtgaaggagcaggaggctcgatttgagaggctgacaagagccctggagcaggaaaggcggcacgtcgccctgcaactggagcgtgcacaacaacctggcatggtgtctggaggaatgggatccggacagcctcttcccatggcatggcagcagctggtgctgcaggagcagtctccaggatcccaggctagcttagccaccatgcccgaagcgccagacgtgctggaagagaccgttaccgttgaggaggatccagggaccccaacaagtcacgtatctatcgtgacttccgaggacggcaccacaaggcgcactgagacgaaagtcaccaaaacagtaaaaacggtcaccacccggaccgtccgccaagtgcccgttggacctgacggtctccccctacttgatggaggtccccctttaggacccttcgcggatggagctttggatcgtcattttctgcttagaggcggagggcctgtagccacactttcacgggcttacttaagttcaggagggggtttccctgagggacctgagcctagagacagtccctcttacggttcactcagtcgcggactgggcatgcgcccacctcgcgctgggccattgggccctgggcctggcgacggatgctttaccctcccaggccacagggaagccttcccagtgggcccagagcccggacctcccggtggacgttccctgccagaacgatttcaggccgaaccttatgggttggaggatgatactcggagcttggccgcagacgacgagggagggccagaactggagcccgactatggaaccgcgacgagacggcgaccagagtgcgggaggggcctacacaccagggcttacgaagacacagccgacgatggcggagagctcgcagatgagcgccctgcatttccaatggtgacagccccacttgcacaacctgagaggggctctatggggagcctggatcggctggtcagaagaagccctagcgttgactcggcacgaaaagagcctagatggcgggatcccgagcttcctgaggtgctggcaatgttacgccatcccgtggatcccgtgaaggccaatgcagccgcttatctgcagcatctttgtttcgagaatgagggcgtcaaaaggagggtccggcagttacgaggattgccactgctcgtcgcattattggatcaccctagagccgaagtgcgaaggagggcatgtggcgctctacgaaatttgagctacggcagagacacagacaataaggccgctataagggactgcgggggagtcccggcactggtgcggctgctgagggccgctagggacaatgaggtccgcgaactggtgacaggcaccctgtggaacttgagctcgtacgagccattgaaaatggtgatcattgaccacgggctccagacgcttactcacgaagtaatcgtgccccattccgggtgggaaagggagccaaatgaggatagcaagccccgtgatgcagagtggaccaccgtgtttaagaacacgtcaggatgtcttcgaaatgtgagctcagacggcgctgaagcaaggcggaggcttcgggaatgtgagggcctggtggatgccctgctgcacgccctgcagtctgccgtaggaagaaaggatactgataataagtccgtggaaaactgcgtgtgcattatgcgaaatctctcctatcatgttcataaagaagtccccggtgctgatcggtaccaggaagccgagcctgggccactgggtagcgctgtcgggagtcagagaaggagaagagatgatgcgtcctgtttcggcggtaaaaaggcaaaagaggagtggtttcaccagggtaagaaggatggggagatggataggaattttgataccctggatctccccaaaaggaccgaagcagcaaaagggttcgagctgctgtaccagccggaagtagtgaggctttacctgagtctgctaaccgagagtcgcaattttaacactttggaagctgccgctggtgcccttcaaaatctctcagctggcaactggatgtgggccacttacattcgagcgacagtcaggaaggagcggggtttgccagtgctcgttgaacttctgcaatccgagacagataaagtcgtaagagcggtggccatcgccttgcgaaatctatcattagaccgcaggaataaggacctcatcggtagctatgccatggctgagctcgtgaggaatgtgcgcaacgcccaggcaccacctcgaccgggagcatgtctcgaggaggacactgttgtggccgttcttaatactattcatgagatcgtcagcgatagcctggataacgctcggtccctgctgcaggctagaggtgtgccggctctggtggcactggtcgctagtagccagtctgtgagggaagcaaaagcagcctcccatgtgttacagaccgtttggagctacaaagaactgcgcggaactctccagaaggatggatggaccaaggcgagattccaatccgcagcagccactgctaaggggccaaaaggcgcactgtcgccaggcggtttcgatgacagcactctcccactcgtggacaaaagcctcgagggagaaaagacagggtctcgggacgtgatcccaatggatgctttgggcccagatgggtactccactgtcgaccgcagggagagacggcctcgcggagcatcctctgctggagaagccagcgaaaaggaacccctgaagctcgatcccagtcggaaagcgcctcccccagggccttcaagaccagcagtccgtctggtggatgccgtaggtgatgcaaaaccgcagcctgtggatagctgggtgtag

SEQ ID NO: 323595 - DNA, 4041 bp, Artificial Sequence
  derived and/or modified sequence
gagggcgggagggctggcccggggtctcgggttgcgcgctgggcctggagggagggggcggcccccgcaccggtccgagttgcggccgcgtggactgcgacccgcgccgcgccgcaccgcgccgcgccctgggaacgccgctccccgcgcgccaacggacccggggaagcccttctggggtccgaggccgcgctgcggggccgcccacgctgcgctccaggagccagagcctgcagggtgggtgtcgggacatgctgatcttccctcaagacagctggcgggcgctctggtcatggaggactgcaatgtgcactcggccgccagcatcctggcctcggtgaaggagcaggaggcccgcttcgagaggctgacacgggcactggagcaggagcggcgccatgttgccctacagctggagcgtgcccagcagcctggcatggtcagtggtggcatgggcagtgggcagcccctgccaatggcctggcaacagctggtcctccaggagcagagcccaggcagccaggcctcactggccacgatgccggaggcacctgatgtgctggaggagaccgtgacggtggaggaggaccccggcacacccacttcccatgtgtctattgtcacatccgaagatggcacaacccggcgcaccgagaccaaggtcaccaagactgtcaagacggtgaccactcggacagtacgccaggtgcccgtgggcccagatggactccccctgctggatggcggccccccactaggcccttttgcagatggtgccctggaccggcatttcctgctgcgtggtggtggcccagtggccacactctctcgagcctacctcagcagtgggggtggctttcccgaaggccccgagccccgggacagccccagctatggcagcctgtcccgagggctgggcatgcggcccccacgtgctggcccccttggcccaggccctggtgatggctgcttcacactgcctggccaccgggaagccttcccggtgggtcctgagcctgggccaccaggtggccgctccctgcccgagcgcttccaggcagagccgtatggcttggaggatgacacgcgcagcctggccgctgatgacgagggtggccctgagctggagcctgactatggcacggccacaaggaggaggcctgagtgtgggcggggccttcataccagggcctacgaggacacagcagatgatggcggcgagctggcggacgagcggcctgcgttcccaatggtgacggcgcccctggcccagcctgaacggggcagcatgggcagcctggaccggctggtgcggcgctcgccctcagtggatagcgcccgcaaggagccgcgctggcgggaccctgagctgcctgaggtgctggccatgctgcggcaccccgtggaccccgtgaaggccaatgcggccgcctacctgcagcatctgtgctttgagaacgagggtgtcaagcggcgtgtacggcagttgcgggggctgccgctgcttgtggcactgctggaccacccgcgggctgaggtgcggcgccgggcctgtggggcactgcgcaacctctcctatggccgcgacactgacaacaaggccgccatccgggactgcggtggtgtgcctgccctggtgcgcctgctgagggctgcccgggacaacgaggtccgtgagcttgtcactggcaccctgtggaacctgtcatcctatgagcccctgaagatggtcatcattgaccatggcctgcagacgctgacccacgaggtgatcgtgccccactcaggatgggagcgtgagcccaacgaggactccaagccacgggacgccgagtggacaactgtcttcaagaacacgtcgggctgcctgaggaatgtgagctccgatggtgctgaggcccggcggcgactccgggagtgtgaagggctggtggacgcgctcctgcatgccctgcagtcggctgtgggccggaaggacactgacaacaagtcggtggagaactgcgtgtgcatcatgcggaacctgtcctaccacgtgcacaaggaggtgcccggggccgacaggtaccaggaggccgagcccgggcccctgggcagtgctgtaggctcccagcgccggaggcgggatgatgccagctgctttggaggcaagaaggccaaagaggagtggttccaccaaggaaagaaggatggtgagatggaccggaactttgacacgctagacctgcccaagcgaactgaggccgccaaaggctttgagctgctgtaccagcccgaggtggtacgtctctacctctccctcctcacggagagccggaacttcaacaccctggaggctgccgccggcgctctgcagaacctcagtgccggcaactggatgtgggccacgtacatccgcgccacagtgcgcaaagagcgcgggctgccggtgcttgtggaactgctgcagtctgagaccgacaaggtggtgcgcgccgtcgccatcgctctgcgcaacctctcgctggaccggcgcaacaaagacctcatcgggagctacgccatggctgagcttgtgcggaatgtgcgcaatgcacaggctccgccgcgaccgggggcctgcctggaggaagacaccgtggtggcggtgctcaacaccatccacgaaatcgtgtccgacagcctggataacgcgcgctcgctcctgcaggcacgcggggtgccagcgttggtggctctcgtggcctccagccaatcggtacgcgaagcgaaggcggcgtcacacgtgctgcagacagtgtggagctacaaggagctgcgtggtaccttgcagaaagatggttggaccaaggcgcgcttccagtcagctgctgctactgccaaggggcctaagggagcactgagtcctgggggcttcgatgacagcacgctgccactggtggacaagagccttgagggcgagaaaactggcagccgggatgtgatccccatggatgcgctgggcccagacggatactccacggtggaccggagggagcggaggccacggggcgccagctctgcaggagaggcctctgagaaggaacccttgaaactcgaccccagcaggaaggcccctccccccgggcccagcaggcccgcggtcaggctggtggacgccgtaggggacgctaagcctcagcccgttgattcctgggtctagcttgcatgcctgggcccaggcccagcctcttgttcttagggcttggatcgtggaagaagggccaccctgagcagatcgtgccgtggagcttggagccccctggcggcaggggttggcagcgcctcgccccagccaagcctgactttggggacaccctcctgcccccccaccccactccccccatcctacctaactccctaggcctgagttagctgtttactgacatggtgctgtgtgtgagcgagtgacagaaggcccgaggaggccgactgggctgctggggcagggcccagggaggtggcagggaagggtgcctggctgggctttggggctggtgggataggagggtgcccctgggaacacagtgccccagtggtgcgggccaggtctggcgccaggggcaggcagctaggcagggagggggctgggaaagaacttggacttctaaaggcggagggtctccctgggcaccctgcaggcaggcagaccacggtgtggggggtgccccacaaggcccagccctgggcaaggaagctttggaagcagcaaggtgggggtcaggctacaggtgccccacctccccagagccctgcagtcacgtgaggcccctgtgcagtagagagcctttctccagcccatgctggctggggccggggctgccgcatctgcctggagcctgggcagcacctccgggactgaccttcggcagtggctgggggactgctttcagtgcctgctgttcgtgactcagaaacagaagaaaaacactgagaaaaagcattaaaaataagccaaaataagactattggtaaacacctaaatttttgtaagaaaatttaaaaattaaagcagcaaaggaa

SEQ ID NO: 323596 - DNA, 2889 bp, Artificial Sequence
  derived and/or modified sequence
atggaggactgcaacgtgcacagcgccgccagcatcctggccagcgtgaaggagcaggaggccagattcgagagactgaccagagccctggagcaggagagaagacacgtggccctgcagctggagagagcccagcagcccggcatggtgagcggcggcatgggcagcggccagcccctgcccatggcctggcagcagctggtgctgcaggagcagagccccggcagccaggccagcctggccaccatgcccgaggcccccgacgtgctggaggagaccgtgaccgtggaggaggaccccggcacccccaccagccacgtgagcatcgtgaccagcgaggacggcaccaccagaagaaccgagaccaaggtgaccaagaccgtgaagaccgtgaccaccagaaccgtgagacaggtgcccgtgggccccgacggcctgcccctgctggacggcggcccccccctgggccccttcgccgacggcgccctggacagacacttcctgctgagaggcggcggccccgtggccaccctgagcagagcctacctgagcagcggcggcggcttccccgagggccccgagcccagagacagccccagctacggcagcctgagcagaggcctgggcatgagaccccccagagccggccccctgggccccggccccggcgacggctgcttcaccctgcccggccacagagaggccttccccgtgggccccgagcccggcccccccggcggcagaagcctgcccgagagattccaggccgagccctacggcctggaggacgacaccagaagcctggccgccgacgacgagggcggccccgagctggagcccgactacggcaccgccaccagaagaagacccgagtgcggcagaggcctgcacaccagagcctacgaggacaccgccgacgacggcggcgagctggccgacgagagacccgccttccccatggtgaccgcccccctggcccagcccgagagaggcagcatgggcagcctggacagactggtgagaagaagccccagcgtggacagcgccagaaaggagcccagatggagagaccccgagctgcccgaggtgctggccatgctgagacaccccgtggaccccgtgaaggccaacgccgccgcctacctgcagcacctgtgcttcgagaacgagggcgtgaagagaagagtgagacagctgagaggcctgcccctgctggtggccctgctggaccaccccagagccgaggtgagaagaagagcctgcggcgccctgagaaacctgagctacggcagagacaccgacaacaaggccgccatcagagactgcggcggcgtgcccgccctggtgagactgctgagagccgccagagacaacgaggtgagagagctggtgaccggcaccctgtggaacctgagcagctacgagcccctgaagatggtgatcatcgaccacggcctgcagaccctgacccacgaggtgatcgtgccccacagcggctgggagagagagcccaacgaggacagcaagcccagagacgccgagtggaccaccgtgttcaagaacaccagcggctgcctgagaaacgtgagcagcgacggcgccgaggccagaagaagactgagagagtgcgagggcctggtggacgccctgctgcacgccctgcagagcgccgtgggcagaaaggacaccgacaacaagagcgtggagaactgcgtgtgcatcatgagaaacctgagctaccacgtgcacaaggaggtgcccggcgccgacagataccaggaggccgagcccggccccctgggcagcgccgtgggcagccagagaagaagaagagacgacgccagctgcttcggcggcaagaaggccaaggaggagtggttccaccagggcaagaaggacggcgagatggacagaaacttcgacaccctggacctgcccaagagaaccgaggccgccaagggcttcgagctgctgtaccagcccgaggtggtgagactgtacctgagcctgctgaccgagagcagaaacttcaacaccctggaggccgccgccggcgccctgcagaacctgagcgccggcaactggatgtgggccacctacatcagagccaccgtgagaaaggagagaggcctgcccgtgctggtggagctgctgcagagcgagaccgacaaggtggtgagagccgtggccatcgccctgagaaacctgagcctggacagaagaaacaaggacctgatcggcagctacgccatggccgagctggtgagaaacgtgagaaacgcccaggccccccccagacccggcgcctgcctggaggaggacaccgtggtggccgtgctgaacaccatccacgagatcgtgagcgacagcctggacaacgccagaagcctgctgcaggccagaggcgtgcccgccctggtggccctggtggccagcagccagagcgtgagagaggccaaggccgccagccacgtgctgcagaccgtgtggagctacaaggagctgagaggcaccctgcagaaggacggctggaccaaggccagattccagagcgccgccgccaccgccaagggccccaagggcgccctgagccccggcggcttcgacgacagcaccctgcccctggtggacaagagcctggagggcgagaagaccggcagcagagacgtgatccccatggacgccctgggccccgacggctacagcaccgtggacagaagagagagaagacccagaggcgccagcagcgccggcgaggccagcgagaaggagcccctgaagctggaccccagcagaaaggcccccccccccggccccagcagacccgccgtgagactggtggacgccgtgggcgacgccaagccccagcccgtggacagctgggtgtag

SEQ ID NO: 323597 - DNA, 3063 bp, Artificial Sequence
  derived and/or modified sequence
atgatgtctttcggaggtgctgacgcactgctcggcgctccctttgctccgctgcatggaggcggctcactgcattatgccttggcgcgcaaagggggcgccggcggtactcgaagcgccgcaggatctagctcaggtttccactcctggacccgtaccagcgtatcttctgtttccgcctccccatctagatttcggggcgccggggccgccagctctaccgattctctcgataccctgagcaacggccctgagggatgtatggtggctgtggccaccagtagatccgagaaagagcagctccaggctcttaacgacaggtttgccggctatatcgacaaggtccggcagcttgaagcacacaaccgctccctggaaggggaagccgccgcactgagacagcagcaggccggcagatcagcaatgggcgagttgtacgagcgagaagttagggaaatgagaggagccgtccttaggttaggagcggctcgggggcagcttagactagagcaggagcatctgcttgaggatatcgcgcacgttagacaacgactggacgacgaagctcgacagcgagaagaagcagaggctgccgctagagcactggcccgattcgctcaggaggcagaggccgcccgggttgacctccaaaaaaaagcccaggcccttcaggaagaatgcggctatttaagacggcatcatcaggaggaggttggcgaactactggggcaaatccaaggttcaggagccgctcaagcgcagatgcaggctgaaacacgtgatgcactgaaatgcgatgtgactagcgctctgagggagatcagggcacagctggagggccacgctgtgcagtctactctccaatccgaggaatggttccgggtccgcctcgatagactctcagaagccgccaaagtgaacactgacgctatgagaagtgcccaggaggagattacagaataccgccggcagctccaggctcggacaacagagctggaggccttaaagagcacgaaggacagcctggagcgacagcgttcggagctggaagaccggcatcaggccgacatagccagttaccaggaggcaatccagcaacttgacgcggagcttaggaacactaagtgggaaatggctgctcaactccgcgaatatcaggacctccttaacgtgaagatggcactggacatcgagattgctgcttaccgtaagctgctagagggcgaggagtgtaggatcggtttcgggcctatcccattcagcctgccagagggccttccaaagatcccctcagtcagtacccacataaaggtgaaatccgaagaaaagattaaagttgtggagaaatccgaaaaggagactgtgatcgtcgaagaacaaacagaagagacccaggtgacggaggaagtgaccgaggaagaggaaaaagaggccaaagaagaggaggggaaggaggaggagggtggggaggaggaagaggctgagggcggcgaggaggagacaaaaagcccccctgccgaggaagcagcctcccctgagaaggaagccaagagccctgtgaaggaggaggccaagtcaccggctgaagctaaatcgccagagaaggaagaagcaaaaagtcctgccgaggtcaaatcacctgagaaggccaaaagccccgcgaaggaagaagccaaatccccccccgaggccaaaagcccagagaaggaggaggcaaaatcgcccgccgaggtaaagtcccccgagaaggcaaaaagccctgcaaaggaagaggctaaaagcccagctgaggcaaagagtccagagaaggccaagtcgcctgtgaaagaggaagccaaatcgccggctgaggcaaagagccccgttaaggaggaagccaaatctcccgctgaggtgaagagccctgagaaggcaaagtcacccacaaaagaggaggcaaaaagcccggagaaggccaaaagtccagaaaaagaagaggccaagtccccagagaaggcaaagtcccctgtgaaagccgaggcgaaatccccagagaaggccaagagccccgtgaaagccgaggctaaatcccctgagaaggccaagagccctgtgaaggaagaggctaaatctcccgagaaagccaagtcaccagtgaaggaggaggccaagtctccagaaaaggccaaaagtccagtcaaggaagaggccaagaccccagaaaaggccaagtcacccgtgaaagaagaggcgaaatcaccagaaaaagcaaagagtcctgaaaaagccaaaacattggacgtcaaatccccagaggcaaagacccccgcgaaggaagaagcacgttctccagcagacaagttcccagagaaggccaagtcccccgtgaaggaggaggtgaagagtccagagaaggccaagtcacctctgaaggaggacgccaaggcccctgagaaagaaatcccaaaaaaggaggaagtgaaatcacccgtaaaagaggaagagaagccacaagaagtgaaggtgaaggaaccgccaaagaaagcggaggaagagaaagccccagccactcccaaaaccgaagaaaagaaagatagtaagaaggaggaggcacctaagaaagaagcacccaagcctaaagtcgaagaaaaaaaagaacccgctgtggagaagcctaaggagtccaaagttgaagccaagaaagaagaagccgaagataagaaaaaagtccccaccccagaaaaagaagcccctgcgaaagtcgaggtcaaagaggatgctaagcctaaagaaaagactgaagtggccaaaaaagagccggatgacgcaaaagcgaaagaaccctcaaaaccagctgagaagaaggaggcagcccctgaaaagaaagacacaaaagaggagaaggcgaaaaaacccgaggaaaaacccaaaactgaggcaaaagccaaggaggacgacaaaacactctccaaagaaccctctaagcccaaagcggaaaaggcggaaaagagcagtagtaccgatcagaaggattcaaagcctccggaaaaggccacagaggacaaggccgctaaaggcaagtag

SEQ ID NO: 323598 - DNA, 2916 bp, Artificial Sequence
  derived and/or modified sequence
atgatgagctttggtggagctgatgcactgttgggggctccattcgccccattgcatggcggcgggtccctgcactatgccttagctcggaagggaggcgctggggggacccgcagcgctgcgggcagcagctccgggttccacagctggactagaacttctgtttcatccgtcagtgcaagcccttctcgatttagaggcgcgggagccgccagttcgaccgactctcttgacactctgtcaaatgggcccgaagggtgcatggtggcagtggctacttctcgatccgagaaggaacaacttcaagccttgaacgacagattcgcaggctacattgacaaagtacgtcagctggaggcgcataacagaagcctcgagggcgaagctgctgctctcaggcagcagcaggctggcagatcagccatgggtgaattatacgagcgcgaggttagagagatgcgtggggccgtgttacgcctgggtgcggctcgggggcagctccgcctggagcaggaacatctgctagaggacatcgcacacgtgcgtcagcggctggatgacgaggcccggcaacgagaagaggcagaggctgccgcccgggctttggctcgattcgcgcaggaagccgaggcagcaagggttgacttacagaaaaaggctcaagcccttcaggaggaatgcggatacctgaggagacaccaccaggaggaggtcggagagttattggggcagatccagggctcaggtgccgcccaagcccagatgcaggccgagacacgcgacgccctgaagtgtgatgtgacatctgcccttcgggaaatccgagcacagctggagggacatgccgtccagtccacattacagtccgaggagtggtttcgcgtaaggctggataggttgtctgaagccgccaaggttaatactgacgcaatgcgttccgcccaggaagagattacagagtatcggcggcaactccaggctcgcacgacagagctggaggctctcaaaagcaccaaggactctttggagaggcagagatccgagctggaggacagacatcaagcagatatcgcatcttaccaggaagccatccaacagctagatgccgagttgaggaacacaaagtgggagatggccgcacagctaagggagtaccaggacctgttaaatgtcaagatggctctcgatatcgagatcgcagcttaccggaaactcttggaaggtgaggagtgccggattggcttcggtcccattcctttcagtttgccggagggcctgcctaaaattccaagcgtgtcgacccatattaaggtgaaatcagaagagaagatcaaagtcgtcgagaaatcagagaaggaaaccgtgatagtggaagagcagacagaggagactcaggtgacggaggaagtcaccgaggaagaggaaaaggaagcaaaggaagaggagggtaaggaggaagaagggggcgaagaagaagaagccgagggcggggaggaggagacgaaatccccaccggcagaagaggccgccagtccggagaaggaagctaaatcccccgttaaggaggaggccaagtcccccgctgaggctaagtctcctgaaaaggaagaggctaaatctccagcggaggtgaaatctcccgagaaggccaagagtccggctaaagaggaggccaaatctccccccgaggccaagagtcccgaaaaagaggaggccaagagtccagccgaggtcaagtcaccggaaaaagcgaagtcgccagcgaaagaggaggctaaaagcccagctgaggcaaagagtcctgagaaagcaaaatctcccgttaaggaagaggcaaagtcacccgctgaagccaaatcaccagtgaaggaagaggccaagagccccgccgaggtaaaatcacctgagaaggccaagagccctaccaaagaagaggccaagtctcccgagaaggccaagagcccagagaaagaggaggctaaatcacccgaaaaggcaaaaagccccgtgaaggccgaagccaagagccccgagaaagccaagagccctgttaaggccgaagctaaaagcccagaaaaggctaagtcaccggtcaaagaagaagctaagtctccggaaaaggctaagagccctgtgaaagaagaggccaagtcccctgagaaagctaagtctcctgttaaggaggaagccaagacccccgagaaggctaagagccccgttaaagaggaggcaaagtcacctgagaaagctaagtctccgttaaaagaagacgccaaagcccccgaaaaggagattcctaagaaagaagaggtgaaatcacccgtgaaagaggaagaaaaaccacaggaagtaaaggttaaggaaccccccaagaaggccgaagaggagaaggctcctgctactcccaaaactgaggagaagaaggattcaaagaaggaggaggccccaaagaaggaggcaccgaaaccaaaggtagaggagaaaaaagagcctgcagtggaaaagcccaaggagtccaaggtagaggcaaagaaggaggaggcagaggacaaaaagaaggtgcctacgcccgaaaaggaggctccagcaaaagttgaggtgaaggaagatgctaagcctaaagaaaaaaccgaagtagctaaaaaagagccagacgacgctaaagcgaaggagcccagcaagcctgccgagaagaaggaagccgcgcccgaaaagaaagatactaaggaggaaaaagccaagaaacccgaggagaaaccaaagactgaagccaaggctaaagaagatgataaaactttatccaaagaaccgtcaaaacctaaagctgagaaagccgaaaagtcatccagcaccgaccagaaggattctaaaccgccagagaaggctactgaagacaaggcagccaagggcaaatag

SEQ ID NO: 323599 - DNA, 3063 bp, Artificial Sequence
  derived and/or modified sequence
atgatgagctttggaggagcagatgccctgctgggcgccccctttgcccccctgcatggaggcggcagcctgcactacgccctggccaggaaaggaggagctgggggcaccaggtctgctgctggcagcagcagcggcttccacagctggaccaggacctctgtgtcctctgtgtctgccagccccagccgcttccggggggccggggccgccagcagcacagacagcctggacaccctgagcaatggacctgagggctgcatggtggccgtggccaccagccgctctgagaaggagcagctgcaggccctgaatgacagatttgctggctacatcgacaaggtgcggcagctggaggcccacaacagaagcctggagggggaggccgccgccctgcggcagcagcaggccggccgcagcgccatgggagagctgtatgaaagagaggtgcgggagatgagaggagctgtgctgcggctgggcgccgcccggggccagctgcggctggagcaggagcacctgctggaggacatcgcccacgtgcggcagaggctggatgatgaggcccggcagcgggaggaggccgaggccgccgcccgggccctggccaggtttgcccaggaggccgaggccgcccgggtggacctgcagaagaaggcccaggccctgcaggaggagtgtggctacctgcggcggcaccaccaggaggaggtgggggagctgctgggccagatccagggcagcggggccgcccaggcccagatgcaggccgagaccagagatgccctgaagtgtgatgtgaccagcgccctgcgggagatccgggcccagctggagggccatgctgtgcagagcaccctgcagagcgaggagtggttccgggtgcggctggaccggctgtctgaggccgccaaggtgaacacagatgccatgaggtctgcccaggaggagatcacagagtaccgccggcagctgcaggcccggaccacagagctggaggccctgaagagcaccaaggacagcctggagcggcagaggtctgagctggaggacagacaccaggccgacatcgccagctaccaggaggccatccagcagctggatgctgagctgaggaacaccaagtgggagatggccgcccagctgcgggagtaccaggacctgctgaatgtgaagatggccctggacattgaaattgctgcctacaggaagctgctggagggggaggagtgcagaattggatttggccccatccccttcagcctgcctgagggcctgcccaagatccccagcgtgtccacccacatcaaggtgaagtctgaggagaagatcaaggtggtggagaagtctgagaaggagaccgtcatcgtggaggagcagacagaggagacccaggtgacagaggaggtgacagaggaggaggagaaggaggccaaggaggaggagggcaaggaggaggagggcggggaggaggaggaggccgagggcggggaggaggagaccaagagccccccagctgaggaggccgccagccctgagaaggaggccaagagccctgtgaaggaggaggccaagagccctgctgaggccaagagccctgagaaggaggaggccaagagccctgctgaggtgaagagccctgagaaggccaagagccctgccaaggaggaggccaagagccccccagaggccaagagccctgagaaggaggaggccaagagccctgctgaggtgaagagccctgagaaggccaagagccctgccaaggaggaggccaagagccctgctgaggccaagagccctgagaaggccaagagccctgtgaaggaggaggccaagagccctgctgaggccaagagccctgtgaaggaggaggccaagagccctgctgaggtgaagagccctgagaaggccaagagccccaccaaggaggaggccaagagccctgagaaggccaagagccctgagaaggaggaggccaagagccctgagaaggccaagagccctgtgaaggccgaggccaagagccctgagaaggccaagagccctgtgaaggccgaggccaagagccctgagaaggccaagagccctgtgaaggaggaggccaagagccctgagaaggccaagagccctgtgaaggaggaggccaagagccctgagaaggccaagagccctgtgaaggaggaggccaagaccccagagaaggccaagagccctgtgaaggaggaggccaagagccctgagaaggccaagagccctgagaaggccaagaccctggatgtgaagagccctgaggccaagaccccagccaaggaggaggcccggagccctgctgacaagtttcctgagaaggccaagagccctgtgaaggaggaggtgaagagccctgagaaggccaagagccccctgaaggaggatgccaaggcccctgagaaggagatccccaagaaggaggaggtgaagagccctgtgaaggaggaggagaagccccaggaggtgaaggtgaaggagccccccaagaaggccgaggaggagaaggccccagccacccccaagacagaggagaagaaggacagcaagaaggaggaggcccccaagaaggaggcccccaagcccaaggtggaggagaagaaggagcctgctgtggagaagcccaaggagagcaaggtggaggccaagaaggaggaggccgaggacaagaagaaggtgcccaccccagagaaggaggccccagccaaggtggaggtgaaggaggatgccaagcccaaggagaagacagaggtggccaagaaggagccagatgatgccaaggccaaggagcccagcaagccagctgagaagaaggaggccgcccctgagaagaaggacaccaaggaggagaaggccaagaagccagaggagaagcccaagacagaggccaaggccaaggaggatgacaagaccctgagcaaggagcccagcaagcccaaggccgagaaggccgagaagagcagcagcacagaccagaaggacagcaagcccccagagaaggccacagaggacaaggccgccaagggcaagtag

SEQ ID NO: 323600 - DNA, 2916 bp, Artificial Sequence
  derived and/or modified sequence
atgatgagctttggaggagcagatgccctgctgggcgccccctttgcccccctgcatggaggcggcagcctgcactacgccctggccaggaaaggaggagctgggggcaccaggtctgctgctggcagcagcagcggcttccacagctggaccaggacctctgtgtcctctgtgtctgccagccccagccgcttccggggggccggggccgccagcagcacagacagcctggacaccctgagcaatggacctgagggctgcatggtggccgtggccaccagccgctctgagaaggagcagctgcaggccctgaatgacagatttgctggctacatcgacaaggtgcggcagctggaggcccacaacagaagcctggagggggaggccgccgccctgcggcagcagcaggccggccgcagcgccatgggagagctgtatgaaagagaggtgcgggagatgagaggagctgtgctgcggctgggcgccgcccggggccagctgcggctggagcaggagcacctgctggaggacatcgcccacgtgcggcagaggctggatgatgaggcccggcagcgggaggaggccgaggccgccgcccgggccctggccaggtttgcccaggaggccgaggccgcccgggtggacctgcagaagaaggcccaggccctgcaggaggagtgtggctacctgcggcggcaccaccaggaggaggtgggggagctgctgggccagatccagggcagcggggccgcccaggcccagatgcaggccgagaccagagatgccctgaagtgtgatgtgaccagcgccctgcgggagatccgggcccagctggagggccatgctgtgcagagcaccctgcagagcgaggagtggttccgggtgcggctggaccggctgtctgaggccgccaaggtgaacacagatgccatgaggtctgcccaggaggagatcacagagtaccgccggcagctgcaggcccggaccacagagctggaggccctgaagagcaccaaggacagcctggagcggcagaggtctgagctggaggacagacaccaggccgacatcgccagctaccaggaggccatccagcagctggatgctgagctgaggaacaccaagtgggagatggccgcccagctgcgggagtaccaggacctgctgaatgtgaagatggccctggacattgaaattgctgcctacaggaagctgctggagggggaggagtgcagaattggatttggccccatccccttcagcctgcctgagggcctgcccaagatccccagcgtgtccacccacatcaaggtgaagtctgaggagaagatcaaggtggtggagaagtctgagaaggagaccgtcatcgtggaggagcagacagaggagacccaggtgacagaggaggtgacagaggaggaggagaaggaggccaaggaggaggagggcaaggaggaggagggcggggaggaggaggaggccgagggcggggaggaggagaccaagagccccccagctgaggaggccgccagccctgagaaggaggccaagagccctgtgaaggaggaggccaagagccctgctgaggccaagagccctgagaaggaggaggccaagagccctgctgaggtgaagagccctgagaaggccaagagccctgccaaggaggaggccaagagccccccagaggccaagagccctgagaaggaggaggccaagagccctgctgaggtgaagagccctgagaaggccaagagccctgccaaggaggaggccaagagccctgctgaggccaagagccctgagaaggccaagagccctgtgaaggaggaggccaagagccctgctgaggccaagagccctgtgaaggaggaggccaagagccctgctgaggtgaagagccctgagaaggccaagagccccaccaaggaggaggccaagagccctgagaaggccaagagccctgagaaggaggaggccaagagccctgagaaggccaagagccctgtgaaggccgaggccaagagccctgagaaggccaagagccctgtgaaggccgaggccaagagccctgagaaggccaagagccctgtgaaggaggaggccaagagccctgagaaggccaagagccctgtgaaggaggaggccaagagccctgagaaggccaagagccctgtgaaggaggaggccaagaccccagagaaggccaagagccctgtgaaggaggaggccaagagccctgagaaggccaagagccccctgaaggaggatgccaaggcccctgagaaggagatccccaagaaggaggaggtgaagagccctgtgaaggaggaggagaagccccaggaggtgaaggtgaaggagccccccaagaaggccgaggaggagaaggccccagccacccccaagacagaggagaagaaggacagcaagaaggaggaggcccccaagaaggaggcccccaagcccaaggtggaggagaagaaggagcctgctgtggagaagcccaaggagagcaaggtggaggccaagaaggaggaggccgaggacaagaagaaggtgcccaccccagagaaggaggccccagccaaggtggaggtgaaggaggatgccaagcccaaggagaagacagaggtggccaagaaggagccagatgatgccaaggccaaggagcccagcaagccagctgagaagaaggaggccgcccctgagaagaaggacaccaaggaggagaaggccaagaagccagaggagaagcccaagacagaggccaaggccaaggaggatgacaagaccctgagcaaggagcccagcaagcccaaggccgagaaggccgagaagagcagcagcacagaccagaaggacagcaagcccccagagaaggccacagaggacaaggccgccaagggcaagtag

SEQ ID NO: 323601 - DNA, 3063 bp, Artificial Sequence
  derived and/or modified sequence
atgatgagcttcggcggcgccgacgccctgctgggcgcccccttcgctcccttgcatggcgggggaagtcttcattatgccctggcgaggaaagggggggcaggcggcacacgctcagctgcaggcagctctagcgggtttcactcctggacacgtactagcgtatctagcgtgagcgcaagccctagtcggttcaggggcgccggagcggcttcctcgaccgattctctcgacaccttgagtaatggaccagaagggtgcatggtcgcggtcgcgacctcccgctccgaaaaggagcaactccaggctcttaacgaccggttcgccggttacatcgataaggtgcggcagcttgaggcccacaacagatcactggaaggtgaggcggctgcccttcgacagcaacaagccggacggtcagccatgggagaactgtatgaaagggaagtgagagaaatgagaggagccgtgttacgactgggggccgccaggggccagctgcgactggaacaggagcacctcttggaggacatcgcacacgtgcgtcagagactggacgacgaagctcgccaacgtgaggaggctgaggcagcggccagggcactggctagatttgctcaggaagccgaggctgccagggttgacctacagaaaaaagctcaggccctgcaggaagagtgtgggtacctgcgccgacatcaccaggaagaggtcggggagctgctgggccagatacagggttcaggggccgctcaggctcagatgcaagctgaaacgcgggatgctctcaagtgtgacgtcacctcagcgctgcgtgagataagagcccagcttgagggacacgccgtccaatctactttgcagtcagaagaatggttccgggtacggctggacaggctatctgaggcagctaaagtgaatacagacgcaatgcgctcagcacaggaggaaatcacagagtatcgcagacaattgcaggccagaaccactgagttggaagctctgaagtcaacgaaagacagtctggagaggcaaagatctgagctggaggaccggcaccaggccgacattgcctcctaccaggaagccatccagcaacttgacgcagagctcagaaacactaaatgggagatggccgcacagctgcgagagtaccaagacctgcttaatgttaagatggccctcgacatcgagatagctgcatatcggaaactgcttgagggtgaagaatgccggatagggttcggacctataccgtttagtctgccagaaggccttcctaaaattccctcagtaagcacacatattaaggttaagagcgaggagaaaattaaggtggtggagaagtctgaaaaagagacagttattgtcgaagagcaaaccgaagaaacccaggtgaccgaggaggtgacagaggaggaggagaaggaagctaaggaagaagaaggcaaagaggaggaaggcggcgaagaggaggaagctgaaggcggggaagaggagaccaagtcccctcccgccgaggaggccgcctcacctgaaaaagaggcaaaatccccagtaaaagaggaggctaagagccccgccgaagccaagtcgccagagaaggaggaggcaaagagccctgccgaagttaagagtcctgaaaaggcgaagtccccagcaaaggaggaagccaagtccccgccggaagctaagagtcccgaaaaggaagaggcaaagtctcctgccgaagtgaagtccccggagaaggcaaagtcccccgccaaagaggaggccaagagccctgcagaagccaaatcccccgagaaagccaaaagccccgtcaaagaagaggcgaagtcccccgcggaggctaagtcacctgtgaaagaggaagccaagagccccgccgaggtcaagtccccggaaaaggcaaagtcccccacaaaggaggaggctaaatcccccgagaaggctaaaagccctgagaaggaggaggctaaaagcccggagaaagccaaatctccggtcaaggccgaggcaaagagcccagaaaaagccaagagcccggtgaaggctgaagctaaatcacctgagaaagctaaatctcccgttaaggaggaggcgaaatctccagaaaaagcgaaatctcctgttaaagaagaagcaaaatcacccgagaaggccaagtctcccgtgaaagaagaggccaagaccccagagaaggccaaatctccagtgaaggaggaggcaaaatcccctgaaaaggccaaatctcccgaaaaggctaagacactcgacgtcaagagcccagaagccaaaacaccagccaaggaggaggctcgttctcccgcagacaaattccccgagaaagccaagagtccagtcaaagaagaagttaagtctcccgagaaagcaaagtcaccgctgaaggaagacgccaaggcccctgaaaaagagatccccaagaaagaggaggtgaagtctcctgttaaggaggaggagaagccccaggaagtcaaagtgaaagaaccccccaaaaaagccgaggaggagaaggcgcctgcgacacctaagacagaagagaaaaaggatagcaagaaagaagaagccccgaagaaagaagcccccaaacccaaagtggaggagaaaaaagagcctgctgtggagaagccaaaggaatcgaaggtggaagcgaaaaaagaggaagctgaagacaaaaagaaagtgcccacaccggagaaagaagccccggcgaaggtcgaggtcaaggaggacgctaaacccaaggagaagacggaagttgccaaaaaagaaccagacgatgccaaagctaaagaaccaagcaaacccgccgagaaaaaagaagccgccccagagaagaaggacactaaggaggaaaaggccaagaagcctgaggaaaagcctaagactgaagccaaagctaaagaagacgacaaaaccctctccaaagagccatctaagcctaaagccgagaaggcagaaaagagcagcagtacagaccagaaggactctaaacctcctgagaaggctacggaagacaaagctgctaagggcaaatag

SEQ ID NO: 323602 - DNA, 2916 bp, Artificial Sequence
  derived and/or modified sequence
atgatgagcttcggcggcgccgacgccctgctgggcgcccccttcgctcccctccatggagggggatcactccactatgcacttgctaggaaaggcggtgctggtgggaccagaagcgccgcaggctcgtccagcgggttccactcttggacaaggacctccgtctcctccgtcagtgcctccccgtctcgttttcgaggcgctggagctgcctcttcaactgactccctggataccctgtccaacggacctgagggctgcatggttgcagtcgcgacgtcgcgaagcgaaaaggaacagctgcaggctttaaacgatcgatttgctggatacattgataaggtgaggcagctggaggcccataatcgatctctggagggtgaagcggccgcactccgacagcagcaggctggaaggagtgccatgggggaactgtacgaacgagaggtgagagaaatgcgcggagccgtcttgcggctaggggccgccagagggcagttacggctggagcaagaacacctcttggaggatatcgcgcacgtacggcagagactggacgacgaggcccggcaaagggaagaggcggaggccgcagccagagcactggccagattcgcacaggaggccgaagctgcaagagtcgatctgcagaagaaggcccaggccctgcaagaggagtgcggatatcttcgaagacatcaccaggaagaggtcggcgaactccttggacaaattcaggggtctggcgctgcccaagcccagatgcaggccgagacgcgagatgcacttaaatgcgatgtgacttccgctctgcgggagatacgggcccagttggagggccatgcagtccagtcgactttgcagagcgaggaatggttcagggttaggcttgatagactgtctgaagcagctaaggtgaacactgacgccatgcggtccgctcaggaggaaattacagagtatcgcagacaactccaggcacgcaccactgagcttgaggccctgaagagcactaaggattctctggaaagacaaaggagcgaactagaagaccggcatcaggcggatatcgcaagttatcaggaagccatccagcaactggatgccgaacttcgaaacaccaaatgggaaatggctgcccaactgagagagtaccaagatctcctgaacgtgaaaatggctcttgacattgaaattgccgcctaccggaagttactcgagggcgaagagtgtaggatcgggttcggccccatacctttcagcctgcctgaggggttgcccaaaataccatccgtcagtacccatatcaaggtcaagtcagaggaaaagatcaaggttgtggaaaaatctgagaaagagacagttattgtggaggagcagacagaagaaacacaggtgacagaggaggtgactgaggaggaggagaaagaagctaaggaagaggagggtaaagaagaggagggaggcgaagaagaggaagcagaagggggtgaggaggagactaaatcccctcccgccgaagaagctgcatcccccgagaaagaggcgaaatcacccgtgaaagaggaggccaaaagccccgcggaagcaaaatcccccgaaaaggaggaggccaaaagcccagcagaagtgaagtcgcccgaaaaggctaagagtcctgctaaagaggaggccaaatcccctccggaggcaaaatcccctgagaaggaggaagccaaatctcccgcagaggtcaaaagccctgaaaaggccaaaagccccgcaaaggaagaggccaagtccccagcagaggctaagtccccggagaaagctaagtcgccagttaaggaagaagctaaaagtcccgcggaggcaaagagtcccgttaaagaggaagctaagagtccggcggaagttaaaagccccgagaaagcaaagagccccaccaaagaagaagctaagagtccggaaaaagccaagtctcctgagaaggaggaagccaaatcccctgaaaaagccaagtcacctgttaaggccgaagccaagtctccagagaaagctaaatcacccgtaaaggcagaagccaaaagccctgaaaaggccaaatccccagtgaaggaagaagcaaaatcacctgaaaaagctaagagcccagttaaggaagaggcaaagagtcccgaaaaagctaaaagtcctgttaaggaggaagcgaagactccagagaaagcaaagagtccagtgaaggaagaagccaaatcgccagagaaggccaaatcaccgttgaaagaggatgccaaagccccagaaaaggaaattcctaaaaaagaggaagtgaagagccctgtgaaggaagaagaaaagccacaggaagtgaaggtgaaggagcctccgaaaaaggcggaggaagagaaggcacctgccacacctaagacagaggaaaaaaaggactccaagaaagaagaagctcctaaaaaggaggcccccaaaccaaaggttgaggaaaagaaggagcccgctgtcgagaaacctaaagaatctaaggtagaggcaaagaaagaagaggcagaggacaagaaaaaagtacctacgcccgaaaaggaggcccctgcaaaggtggaagtgaaggaggatgccaaacctaaggaaaaaaccgaggttgcaaaaaaagagcccgatgatgccaaagccaaggaacctagtaaacccgccgagaagaaggaggccgccccagaaaaaaaggatactaaagaggagaaggccaaaaaaccagaagagaagccaaagaccgaggccaaagccaaggaagacgacaaaacactctcaaaagagcctagcaaacccaaagccgaaaaggccgagaaatctagcagcaccgaccagaaggattccaagccccctgagaaggcaactgaagacaaggccgctaaaggtaagtag

SEQ ID NO: 323603 - DNA, 3783 bp, Artificial Sequence
  derived and/or modified sequence
gccccgtcccggcctcgcgcacctgctcaggccatgatgagcttcggcggcgcggacgcgctgctgggcgccccgttcgcgccgctgcatggcggcggcagcctccactacgcgctagcccgaaagggtggcgcaggcgggacgcgctccgccgctggctcctccagcggcttccactcgtggacacggacgtccgtgagctccgtgtccgcctcgcccagccgcttccgtggcgcaggcgccgcctcaagcaccgactcgctggacacgctgagcaacgggccggagggctgcatggtggcggtggccacctcacgcagtgagaaggagcagctgcaggcgctgaacgaccgcttcgccgggtacatcgacaaggtgcggcagctggaggcgcacaaccgcagcctggagggcgaggctgcggcgctgcggcagcagcaggcgggccgctccgctatgggcgagctgtacgagcgcgaggtccgcgagatgcgcggcgcggtgctgcgcctgggcgcggcgcgcggtcagctacgcctggagcaggagcacctgctcgaggacatcgcgcacgtgcgccagcgcctagacgacgaggcccggcagcgagaggaggccgaggcggcggcccgcgcgctggcgcgcttcgcgcaggaggccgaggcggcgcgcgtggacctgcagaagaaggcgcaggcgctgcaggaggagtgcggctacctgcggcgccaccaccaggaagaggtgggcgagctgctcggccagatccagggctccggcgccgcgcaggcgcagatgcaggccgagacgcgcgacgccctgaagtgcgacgtgacgtcggcgctgcgcgagattcgcgcgcagcttgaaggccacgcggtgcagagcacgctgcagtccgaggagtggttccgagtgaggctggaccgactgtcggaggcagccaaggtgaacacagacgctatgcgctcagcgcaggaggagataactgagtaccggcgtcagctgcaggccaggaccacagagctggaggcactgaaaagcaccaaggactcactggagaggcagcgctctgagctggaggaccgtcatcaggccgacattgcctcctaccaggaagccattcagcagctggacgctgagctgaggaacaccaagtgggagatggccgcccagctgcgagaataccaggacctgctcaatgtcaagatggctctggatatagagatagccgcttacagaaaactcctggaaggtgaagagtgtcggattggctttggcccaattcctttctcgcttccagaaggactccccaaaattccctctgtgtccactcacataaaggtgaaaagcgaagagaagatcaaagtggtggagaagtctgagaaagaaactgtgattgtggaggaacagacagaggagacccaagtgactgaagaagtgactgaagaagaggagaaagaggccaaagaggaggagggcaaggaggaagaagggggtgaagaagaggaggcagaagggggagaagaagaaacaaagtctcccccagcagaagaggctgcatccccagagaaggaagccaagtcaccagtaaaggaagaggcaaagtcaccggctgaggccaagtccccagagaaggaggaagcaaaatccccagccgaagtcaagtcccctgagaaggccaagtctccagcaaaggaagaggcaaagtcaccgcctgaggccaagtccccagagaaggaggaagcaaaatctccagctgaggtcaagtcccccgagaaggccaagtccccagcaaaggaagaggcaaagtcaccggctgaggccaagtctccagagaaggccaagtccccagtgaaggaagaagcaaagtcaccggctgaggccaagtccccagtgaaggaagaagcaaaatctccagctgaggtcaagtccccggaaaaggccaagtctccaacgaaggaggaagcaaagtcccctgagaaggccaagtccccagagaaggaagaggccaagtcccctgagaaggccaagtccccagtgaaggcagaagcaaagtcccctgagaaggccaagtccccagtgaaggcagaagcaaagtcccctgagaaggccaagtccccagtgaaggaagaagcaaagtcccctgagaaggccaagtccccagtgaaggaagaagcaaagtcccctgagaaggccaagtccccagtgaaggaagaagcaaagacccccgagaaggccaagtccccagtgaaggaagaagctaagtccccagagaaggccaagtccccagagaaggccaagactcttgatgtgaagtctccagaagccaagactccagcgaaggaggaagcaaggtcccctgcagacaaattccctgaaaaggccaaaagccctgtcaaggaggaggtcaagtccccagagaaggcgaaatctcccctgaaggaggatgccaaggcccctgagaaggagatcccaaaaaaggaagaggtgaagtccccagtgaaggaggaggagaagccccaggaggtgaaagtcaaagagcccccaaagaaggcagaggaagagaaagcccctgccacaccaaaaacagaggagaagaaggacagcaagaaagaggaggcacccaagaaggaggctccaaagcccaaggtggaggagaagaaggaacctgctgtcgaaaagcccaaagaatccaaagttgaagccaagaaggaagaggctgaagataagaaaaaagtccccaccccagagaaggaggctcctgccaaggtggaggtgaaggaagacgctaaacccaaagaaaagacagaggtagccaagaaggaaccagatgatgccaaggccaaggaacccagcaaaccagcagagaagaaggaggcagcaccggagaaaaaagacaccaaggaggagaaggccaagaagcctgaggagaaacccaagacagaggccaaagccaaggaagatgacaagaccctctcaaaagagcctagcaagcctaaggcagaaaaggctgaaaaatcctccagcacagaccaaaaagacagcaagcctccagagaaggccacagaagacaaggccgccaaggggaagtaaggcagggagaaaggaacatccggaacagccaaagaaactcagaagagtcccggagctcaaggatcagagtaacacaattttcactttttctgtctttatgtaagaagaaactgcttagatgacggggcctccttcttcaaacaggaatttctgttagcaatatgttagcaagagagggcactcccaggcccctgcccccaggccctccccaggcgatggacaattatgatagcttatgtagctgaatgtgatacatgccgaatgccacacgtaaacacttgactataaaaactgcccccctcctttccaaataagtgcatttattgcctctatgtgcaactgacagatgaccgcaataatgaatgagcagttagaaatacattatgcttgagatgtcttaacctattcccaaatgccttctgttttccaaaggagtggtcaagcccttgcccagagctctctattctggaagagcggtccaggtggggccggggactggccactgaattatgccagggcgcactttccactggagttcactttcaattgcttctgtgcaataaaaccaagtgcttataaaatgaaaatgttgctgctgttattctctttccctgggaaggctgggggcagggcaggggaggtctggatgtgacaccccagactgcatgggactgagcaagcatcagt

SEQ ID NO: 323604 - DNA, 2987 bp, Artificial Sequence
  derived and/or modified sequence
aaaagggccggcgccctggtgctgccgcagtgcctcccgccccgtcccggcctcgcgcacctgctcaggccatgatgagcttcggcggcgcggacgcgctgctgggcgccccgttcgcgccgctgcatggcggcggcagcctccactacgcgctagcccgaaagggtggcgcaggcgggacgcgctccgccgctggctcctccagcggcttccactcgtggacacggacgtccgtgagctccgtgtccgcctcgcccagccgcttccgtggcgcaggcgccgcctcaagcaccgactcgctggacacgctgagcaacgggccggagggctgcatggtggcggtggccacctcacgcagtgagaaggagcagctgcaggcgctgaacgaccgcttcgccgggtacatcgacaaggtgcggcagctggaggcgcacaaccgcagcctggagggcgaggctgcggcgctgcggcagcagcaggcgggccgctccgctatgggcgagctgtacgagcgcgaggtccgcgagatgcgcggcgcggtgctgcgcctgggcgcggcgcgcggtcagctacgcctggagcaggagcacctgctcgaggacatcgcgcacgtgcgccagcgcctagacgacgaggcccggcagcgagaggaggccgaggcggcggcccgcgcgctggcgcgcttcgcgcaggaggccgaggcggcgcgcgtggacctgcagaagaaggcgcaggcgctgcaggaggagtgcggctacctgcggcgccaccaccaggaagaggtgggcgagctgctcggccagatccagggctccggcgccgcgcaggcgcagatgcaggccgagacgcgcgacgccctgaagtgcgacgtgacgtcggcgctgcgcgagattcgcgcgcagcttgaaggccacgcggtgcagagcacgctgcagtccgaggagtggttccgagtgaggctggaccgactgtcggaggcagccaaggtgaacacagacgctatgcgctcagcgcaggaggagataactgagtaccggcgtcagctgcaggccaggaccacagagctggaggcactgaaaagcaccaaggactcactggagaggcagcgctctgagctggaggaccgtcatcaggccgacattgcctcctaccaggaagccattcagcagctggacgctgagctgaggaacaccaagtgggagatggccgcccagctgcgagaataccaggacctgctcaatgtcaagatggctctggatatagagatagccgcttacagaaaactcctggaaggtgaagagtgtcggattggctttggcccaattcctttctcgcttccagaaggactccccaaaattccctctgtgtccactcacataaaggtgaaaagcgaagagaagatcaaagtggtggagaagtctgagaaagaaactgtgattgtggaggaacagacagaggagacccaagtgactgaagaagtgactgaagaagaggagaaagaggccaaagaggaggagggcaaggaggaagaagggggtgaagaagaggaggcagaagggggagaagaagaaacaaagtctcccccagcagaagaggctgcatccccagagaaggaagccaagtcaccagtaaaggaagaggcaaagtcaccggctgaggccaagtccccagagaaggaggaagcaaaatccccagccgaagtcaagtcccctgagaaggccaagtctccagcaaaggaagaggcaaagtcaccgcctgaggccaagtccccagagaaggaggaagcaaaatctccagctgaggtcaagtcccccgagaaggccaagtccccagcaaaggaagaggcaaagtcaccggctgaggccaagtctccagagaaggccaagtccccagtgaaggaagaagcaaagtcaccggctgaggccaagtccccagtgaaggaagaagcaaaatctccagctgaggtcaagtccccggaaaaggccaagtctccaacgaaggaggaagcaaagtcccctgagaaggccaagtccccagagaaggaagaggccaagtcccctgagaaggccaagtccccagtgaaggcagaagcaaagtcccctgagaaggccaagtccccagtgaaggcagaagcaaagtcccctgagaaggccaagtccccagtgaaggaagaagcaaagtcccctgagaaggccaagtccccagtgaaggaagaagcaaagtcccctgagaaggccaagtccccagtgaaggaagaagcaaagacccccgagaaggccaagtccccagtgaaggaagaagctaagtccccagagaaggcgaaatctcccctgaaggaggatgccaaggcccctgagaaggagatcccaaaaaaggaagaggtgaagtccccagtgaaggaggaggagaagccccaggaggtgaaagtcaaagagcccccaaagaaggcagaggaagagaaagcccctgccacaccaaaaacagaggagaagaaggacagcaagaaagaggaggcacccaagaaggaggctccaaagcccaaggtggaggagaagaaggaacctgctgtcgaaaagcccaaagaatccaaagttgaagccaagaaggaagaggctgaagataagaaaaaagtccccaccccagagaaggaggctcctgccaaggtggaggtgaaggaagacgctaaacccaaagaaaagacagaggtagccaagaaggaaccagatgatgccaaggccaaggaacccagcaaaccagcagagaagaaggaggcagcaccggagaaaaaagacaccaaggaggagaaggccaagaagcctgaggagaaacccaagacagaggccaaagccaaggaagatgacaagaccctctcaaaagagcctagcaagcctaaggcagaaaaggctgaaaaatcctccagcacagaccaaaaagacagcaagcctccagagaaggccacagaagacaaggccgccaaggggaagtaa

SEQ ID NO: 323605 - DNA, 3063 bp, Artificial Sequence
  derived and/or modified sequence
atgatgtccttcggcggagccgatgctctgctcggagccccattcgcccctctgcatggagggggaagcctgcactacgcgttggcccgaaagggcggagcaggtgggaccagatctgctgcaggctccagctcaggcttccacagttggaccaggaccagcgtgtcctccgtctccgcttctccatctcgatttaggggagctggagcagcatcatccaccgacagtctcgacaccttgtccaacggacccgagggatgtatggttgccgtggccacgtctcgttcagagaaagagcagctacaggcgcttaatgaccgcttcgccggttatatcgacaaggtgcgacagttggaagcgcacaatcgaagcctggaaggggaagcggctgccctgagacagcagcaggctggcagaagcgctatgggcgaactttatgagcgcgaggttcgcgagatgcgaggcgctgttcttcgcttaggagccgctcgtggacagctgagactcgagcaggaacacctcctggaggatatcgcccacgtccgccagcgattggatgatgaagccagacagcgtgaggaagcagaggccgcagctagagccctggccagatttgcccaagaagctgaagcagcaagagttgatctccaaaagaaggcccaggccctgcaagaggagtgcggatatctgcggaggcaccaccaggaggaggtcggcgagttgttaggtcagatacagggcagcggggctgcgcaggcccaaatgcaggctgagacccgtgacgccctgaaatgcgacgtaactagtgctctgcgggaaatcagagcccagctagaaggccacgctgtgcagtctacactccagtcggaggagtggttccgggtcaggctggaccgcctgagcgaagccgctaaggtaaacaccgatgccatgcgctcagcccaggaggagatcacagagtatcgccgacagctccaggcacgcacgaccgagcttgaggctctcaagtccaccaaagattccctggaaagacagcggagcgaactggaggatcgccaccaagccgacattgcatcttatcaggaagcaatccaacagctggacgcagagctgcggaacacaaagtgggaaatggctgcacagctgcgagaataccaggatctcctgaacgtaaaaatggccctggatatcgaaatcgcggcatatcgaaagctgttggagggcgaggagtgtaggattggtttcggccctatcccattttccctccccgaaggcctgcccaagatccccagcgtgtccactcacatcaaagtgaaaagtgaagagaaaatcaaagttgtcgagaaaagtgaaaaggagacggtgatcgtcgaggaacagactgaggaaacccaggtgaccgaagaggtgacggaagaggaggagaaggaagccaaggaggaagaggggaaagaggaagagggcggtgaagaggaggaggcagaaggtggcgaggaagagacgaagagtccacctgctgaggaagctgctagcccggagaaagaagcaaaatcccccgtgaaagaggaggctaagtctccagctgaggcaaagtcaccagagaaagaagaggccaaatctcccgctgaggtgaaatcccccgaaaaggctaaatcccctgcaaaggaagaagccaaatcccctccagaggcaaagtctccagagaaagaagaggccaaaagtcctgcagaggttaaaagcccagaaaaggctaagagcccagcaaaggaagaagctaagtcacccgcagaagccaagtccccggagaaggcgaaatctcccgtgaaggaggaggcaaagtcccctgccgaggcgaaatcacccgttaaagaggaggccaagagtcctgccgaggtgaagtctcctgaaaaagccaagtctccgaccaaggaggaagcaaaatcccccgagaaggcaaagagcccagaaaaggaagaggcaaagtccccagaaaaggctaagagtcctgtcaaggcagaagcaaagtcacccgaaaaggctaaaagccccgtgaaagccgaagctaaaagccctgagaaggctaaatcacctgtgaaagaggaagctaagtcccctgagaaagcgaagtcacctgtgaaagaagaagcaaagagcccagagaaagcaaaaagccccgtgaaagaggaagcgaaaacaccggagaaggccaagagtccagtaaaggaggaagccaaatccccagagaaggcaaaatcccccgagaaagcaaaaacactggacgttaagtcgcctgaagccaaaactcccgctaaggaggaggctagatctccagccgacaaattccctgagaaggcgaaatctcctgtcaaagaggaggtgaagtcacccgaaaaggcaaagtctccgctcaaggaggacgctaaggcgccagagaaagaaatcccgaagaaggaagaagtgaagagccctgttaaagaagaggagaaaccccaggaagtgaaggttaaggaacctcctaaaaaagccgaggaggagaaagcgcctgcaaccccaaagactgaggaaaagaaggatagtaagaaggaagaggcccctaaaaaggaggcacctaagccaaaagtggaagagaagaaggaaccagcggtcgaaaagcccaaggagagcaaagtcgaggccaagaaagaggaagcagaggacaagaaaaaggtccccaccccagaaaaggaagcacccgcaaaagtggaggtgaaggaggatgcaaagccgaaagaaaaaaccgaagtcgctaaaaaagagccagacgatgcgaaagccaaagagcccagtaaaccagccgaaaagaaggaggccgctcctgaaaaaaaggacaccaaagaagaaaaagccaaaaaacccgaagagaagcctaagacggaggccaaggccaaggaggacgataagacattgtctaaggagccaagcaagccaaaggccgaaaaagcagagaaatccagttccacagatcagaaagatagcaaacctcccgagaaagccaccgaggacaaggctgctaaaggcaagtag

SEQ ID NO: 323606 - DNA, 2916 bp, Artificial Sequence
  derived and/or modified sequence
atgatgtcatttggtggagctgacgcccttctgggcgcaccgtttgcccctctccacgggggtggctcgctgcattatgctctcgcacgtaaaggaggggctggaggcaccagaagcgcagctggaagtagtagcggattccactcttggactcggacttccgtaagctccgtctcagcaagtccgagcaggttccgcggagcgggtgcagcgtcttccaccgatagtctggacacgctttctaatggtccagaaggctgtatggtcgcagtcgccacgtccaggagtgagaaagagcagttgcaggcattgaatgataggttcgcaggctatatcgacaaagtccggcagctggaggcccacaatcggtccctggagggcgaagccgctgctctgaggcagcagcaggctgggcgaagtgccatgggggagctctatgaaagggaggtcagggaaatgaggggtgctgtgctgcggctgggcgctgctcggggacagctgcgactggaacaagagcacttgctggaggacatcgctcacgtccggcagaggttggatgacgaagctagacaacgcgaggaagccgaggctgcagcccgtgctctggcaagatttgcccaggaggccgaggcagccagagtcgacctgcagaagaaagctcaagcactgcaggaggagtgtggctatctgcgtcgtcaccaccaggaggaggtcggcgagctgctgggacagatccaggggagtggcgcagcccaggcccaaatgcaggcagagacaagggacgctctgaagtgtgacgtgaccagtgcactgagagaaattcgggcacagctggagggacacgctgtgcagtctactctgcagagcgaggagtggttccgcgttaggcttgaccggttaagtgaggctgccaaagtcaacaccgatgccatgaggtcagcccaggaagaaatcacggaatatcgtaggcaacttcaggcaaggacaaccgaactcgaagcgctcaaatcaactaaggacagcctcgagcggcagaggtctgagttggaagaccggcaccaggctgatatagcctcataccaggaagccatacagcagctggatgctgagttgcggaataccaagtgggaaatggcagcccagctgagagaataccaggacctgcttaacgtgaagatggcattggacatcgagattgctgcttatcgcaaactgttggagggcgaggagtgcagaatagggttcggcccaattccattctcactgcctgagggcttgccaaaaataccatcagtcagcacacatataaaagtgaagtctgaggagaagattaaggtcgtggaaaaatccgaaaaagaaaccgtcatcgttgaggaacaaaccgaggagactcaggtgaccgaagaggtcacagaggaggaggagaaggaggccaaagaagaggaaggcaaagaggaggagggtggcgaagaggaagaggcagagggtggtgaggaggagaccaagagccccccagccgaggaagccgcttcgcctgagaaagaggccaaatctcctgttaaggaggaagccaaaagccccgctgaagctaagtcccctgaaaaagaggaagccaagtctcctgccgaagttaagagcccagagaaggcaaaatctccagcaaaggaggaggccaagagtccgccagaggccaagagtcctgagaaggaggaagctaaatctcccgctgaagtcaaatcacccgagaaagccaagagccccgctaaagaagaggctaagtctcccgctgaggctaaatcccctgagaaagcaaagagcccagtcaaggaggaggccaagagcccggcagaggcaaaatcccccgtgaaagaagaggccaaatcccctgcagaggtaaaatctccagaaaaggccaagtctcctaccaaggaagaggcaaagagtccagaaaaggcaaaatcaccagaaaaggaggaagcgaaaagccccgagaaagccaagtcgcctgtaaaggccgaagccaaatcgcccgaaaaagccaaatcacccgtgaaagctgaggccaagtcaccagaaaaggctaaaagccctgtcaaagaggaagccaagagtcccgagaaggcgaagtctcctgtgaaagaggaggccaagtctcctgagaaggctaagtcacctgtgaaagaggaagctaagacgccggagaaggcaaagagcccagtgaaggaggaggctaaatccccagaaaaggccaaatctccgttaaaggaagatgccaaagctccagaaaaggaaatcccaaagaaagaagaggtcaagagcccagtgaaggaggaagagaagcctcaggaggtgaaggtgaaagagcccccaaaaaaggctgaagaggagaaggcaccagccacccccaaaacagaagaaaagaaagatagcaaaaaggaagaggctcctaaaaaggaggctccgaaaccgaaagttgaggagaagaaggaacctgcggtggagaaaccaaaagaatccaaagtagaggccaagaaggaagaggccgaggacaagaagaaagtgccaacacctgagaaggaagcccctgctaaggtcgaggttaaggaagatgcaaagcccaaagagaagaccgaggtagcgaaaaaggaacctgacgatgcaaaagctaaggaaccctcgaagcctgccgagaaaaaagaggctgccccagagaaaaaggacaccaaggaggagaaagccaagaagcccgaggaaaagcctaagacggaagccaaagctaaagaggatgacaaaacgctctctaaagaaccaagcaagccgaaagcggaaaaagcagaaaaatcctcttccaccgaccaaaaagacagtaaaccacctgaaaaagctacggaagataaggccgctaagggtaagtag

SEQ ID NO: 323607 - DNA, 3063 bp, Artificial Sequence
  derived and/or modified sequence
atgatgagcttcggcggcgccgacgccctgctgggcgcccccttcgcccccctgcacggcggcggcagcctgcactacgccctggccagaaagggcggcgccggcggcaccagaagcgccgccggcagcagcagcggcttccacagctggaccagaaccagcgtgagcagcgtgagcgccagccccagcagattcagaggcgccggcgccgccagcagcaccgacagcctggacaccctgagcaacggccccgagggctgcatggtggccgtggccaccagcagaagcgagaaggagcagctgcaggccctgaacgacagattcgccggctacatcgacaaggtgagacagctggaggcccacaacagaagcctggagggcgaggccgccgccctgagacagcagcaggccggcagaagcgccatgggcgagctgtacgagagagaggtgagagagatgagaggcgccgtgctgagactgggcgccgccagaggccagctgagactggagcaggagcacctgctggaggacatcgcccacgtgagacagagactggacgacgaggccagacagagagaggaggccgaggccgccgccagagccctggccagattcgcccaggaggccgaggccgccagagtggacctgcagaagaaggcccaggccctgcaggaggagtgcggctacctgagaagacaccaccaggaggaggtgggcgagctgctgggccagatccagggcagcggcgccgcccaggcccagatgcaggccgagaccagagacgccctgaagtgcgacgtgaccagcgccctgagagagatcagagcccagctggagggccacgccgtgcagagcaccctgcagagcgaggagtggttcagagtgagactggacagactgagcgaggccgccaaggtgaacaccgacgccatgagaagcgcccaggaggagatcaccgagtacagaagacagctgcaggccagaaccaccgagctggaggccctgaagagcaccaaggacagcctggagagacagagaagcgagctggaggacagacaccaggccgacatcgccagctaccaggaggccatccagcagctggacgccgagctgagaaacaccaagtgggagatggccgcccagctgagagagtaccaggacctgctgaacgtgaagatggccctggacatcgagatcgccgcctacagaaagctgctggagggcgaggagtgcagaatcggcttcggccccatccccttcagcctgcccgagggcctgcccaagatccccagcgtgagcacccacatcaaggtgaagagcgaggagaagatcaaggtggtggagaagagcgagaaggagaccgtgatcgtggaggagcagaccgaggagacccaggtgaccgaggaggtgaccgaggaggaggagaaggaggccaaggaggaggagggcaaggaggaggagggcggcgaggaggaggaggccgagggcggcgaggaggagaccaagagcccccccgccgaggaggccgccagccccgagaaggaggccaagagccccgtgaaggaggaggccaagagccccgccgaggccaagagccccgagaaggaggaggccaagagccccgccgaggtgaagagccccgagaaggccaagagccccgccaaggaggaggccaagagcccccccgaggccaagagccccgagaaggaggaggccaagagccccgccgaggtgaagagccccgagaaggccaagagccccgccaaggaggaggccaagagccccgccgaggccaagagccccgagaaggccaagagccccgtgaaggaggaggccaagagccccgccgaggccaagagccccgtgaaggaggaggccaagagccccgccgaggtgaagagccccgagaaggccaagagccccaccaaggaggaggccaagagccccgagaaggccaagagccccgagaaggaggaggccaagagccccgagaaggccaagagccccgtgaaggccgaggccaagagccccgagaaggccaagagccccgtgaaggccgaggccaagagccccgagaaggccaagagccccgtgaaggaggaggccaagagccccgagaaggccaagagccccgtgaaggaggaggccaagagccccgagaaggccaagagccccgtgaaggaggaggccaagacccccgagaaggccaagagccccgtgaaggaggaggccaagagccccgagaaggccaagagccccgagaaggccaagaccctggacgtgaagagccccgaggccaagacccccgccaaggaggaggccagaagccccgccgacaagttccccgagaaggccaagagccccgtgaaggaggaggtgaagagccccgagaaggccaagagccccctgaaggaggacgccaaggcccccgagaaggagatccccaagaaggaggaggtgaagagccccgtgaaggaggaggagaagccccaggaggtgaaggtgaaggagccccccaagaaggccgaggaggagaaggcccccgccacccccaagaccgaggagaagaaggacagcaagaaggaggaggcccccaagaaggaggcccccaagcccaaggtggaggagaagaaggagcccgccgtggagaagcccaaggagagcaaggtggaggccaagaaggaggaggccgaggacaagaagaaggtgcccacccccgagaaggaggcccccgccaaggtggaggtgaaggaggacgccaagcccaaggagaagaccgaggtggccaagaaggagcccgacgacgccaaggccaaggagcccagcaagcccgccgagaagaaggaggccgcccccgagaagaaggacaccaaggaggagaaggccaagaagcccgaggagaagcccaagaccgaggccaaggccaaggaggacgacaagaccctgagcaaggagcccagcaagcccaaggccgagaaggccgagaagagcagcagcaccgaccagaaggacagcaagccccccgagaaggccaccgaggacaaggccgccaagggcaagtag

SEQ ID NO: 323608 - DNA, 2916 bp, Artificial Sequence
  derived and/or modified sequence
atgatgagcttcggcggcgccgacgccctgctgggcgcccccttcgcccccctgcacggcggcggcagcctgcactacgccctggccagaaagggcggcgccggcggcaccagaagcgccgccggcagcagcagcggcttccacagctggaccagaaccagcgtgagcagcgtgagcgccagccccagcagattcagaggcgccggcgccgccagcagcaccgacagcctggacaccctgagcaacggccccgagggctgcatggtggccgtggccaccagcagaagcgagaaggagcagctgcaggccctgaacgacagattcgccggctacatcgacaaggtgagacagctggaggcccacaacagaagcctggagggcgaggccgccgccctgagacagcagcaggccggcagaagcgccatgggcgagctgtacgagagagaggtgagagagatgagaggcgccgtgctgagactgggcgccgccagaggccagctgagactggagcaggagcacctgctggaggacatcgcccacgtgagacagagactggacgacgaggccagacagagagaggaggccgaggccgccgccagagccctggccagattcgcccaggaggccgaggccgccagagtggacctgcagaagaaggcccaggccctgcaggaggagtgcggctacctgagaagacaccaccaggaggaggtgggcgagctgctgggccagatccagggcagcggcgccgcccaggcccagatgcaggccgagaccagagacgccctgaagtgcgacgtgaccagcgccctgagagagatcagagcccagctggagggccacgccgtgcagagcaccctgcagagcgaggagtggttcagagtgagactggacagactgagcgaggccgccaaggtgaacaccgacgccatgagaagcgcccaggaggagatcaccgagtacagaagacagctgcaggccagaaccaccgagctggaggccctgaagagcaccaaggacagcctggagagacagagaagcgagctggaggacagacaccaggccgacatcgccagctaccaggaggccatccagcagctggacgccgagctgagaaacaccaagtgggagatggccgcccagctgagagagtaccaggacctgctgaacgtgaagatggccctggacatcgagatcgccgcctacagaaagctgctggagggcgaggagtgcagaatcggcttcggccccatccccttcagcctgcccgagggcctgcccaagatccccagcgtgagcacccacatcaaggtgaagagcgaggagaagatcaaggtggtggagaagagcgagaaggagaccgtgatcgtggaggagcagaccgaggagacccaggtgaccgaggaggtgaccgaggaggaggagaaggaggccaaggaggaggagggcaaggaggaggagggcggcgaggaggaggaggccgagggcggcgaggaggagaccaagagcccccccgccgaggaggccgccagccccgagaaggaggccaagagccccgtgaaggaggaggccaagagccccgccgaggccaagagccccgagaaggaggaggccaagagccccgccgaggtgaagagccccgagaaggccaagagccccgccaaggaggaggccaagagcccccccgaggccaagagccccgagaaggaggaggccaagagccccgccgaggtgaagagccccgagaaggccaagagccccgccaaggaggaggccaagagccccgccgaggccaagagccccgagaaggccaagagccccgtgaaggaggaggccaagagccccgccgaggccaagagccccgtgaaggaggaggccaagagccccgccgaggtgaagagccccgagaaggccaagagccccaccaaggaggaggccaagagccccgagaaggccaagagccccgagaaggaggaggccaagagccccgagaaggccaagagccccgtgaaggccgaggccaagagccccgagaaggccaagagccccgtgaaggccgaggccaagagccccgagaaggccaagagccccgtgaaggaggaggccaagagccccgagaaggccaagagccccgtgaaggaggaggccaagagccccgagaaggccaagagccccgtgaaggaggaggccaagacccccgagaaggccaagagccccgtgaaggaggaggccaagagccccgagaaggccaagagccccctgaaggaggacgccaaggcccccgagaaggagatccccaagaaggaggaggtgaagagccccgtgaaggaggaggagaagccccaggaggtgaaggtgaaggagccccccaagaaggccgaggaggagaaggcccccgccacccccaagaccgaggagaagaaggacagcaagaaggaggaggcccccaagaaggaggcccccaagcccaaggtggaggagaagaaggagcccgccgtggagaagcccaaggagagcaaggtggaggccaagaaggaggaggccgaggacaagaagaaggtgcccacccccgagaaggaggcccccgccaaggtggaggtgaaggaggacgccaagcccaaggagaagaccgaggtggccaagaaggagcccgacgacgccaaggccaaggagcccagcaagcccgccgagaagaaggaggccgcccccgagaagaaggacaccaaggaggagaaggccaagaagcccgaggagaagcccaagaccgaggccaaggccaaggaggacgacaagaccctgagcaaggagcccagcaagcccaaggccgagaaggccgagaagagcagcagcaccgaccagaaggacagcaagccccccgagaaggccaccgaggacaaggccgccaagggcaagtag

SEQ ID NO: 323609 - DNA, 696 bp, Artificial Sequence
  derived and/or modified sequence
atggcttcgatggcagcgatcggaagttgctctaaggagtacagagtgctgctgggtcagcttcaaaagcagacagatctgatgcaggacacctcacgtctcctcgatccttatatcaggatacagggactggacgtccccaagctgcgggaacactgtcgggagaggcccggggcctttcctagtgaagagacactcaggggtctggggcgacgcggtttcctgcagaccttgaatgctactctgggttgtgtgttgcaccggttggccgatctcgaacagcgtctgccaaaggcccaggatctagagcggtccggcttaaatatcgaagacttggagaagctgcagatggctcgccccaacatactgggattgaggaataacatctattgcatggcacaactcctcgataattcggacactgccgagccaactaaggccggccgtggagccagtcagccacctaccccgacacctgcttcagacgcttttcagcgtaaactggaagggtgcagatttctacacggctaccaccgcttcatgcattccgttgggagggtttttagtaaatggggggagagtcccaaccgtagtcggaggcactcccctcaccaggccctgaggaagggcgtgcgcagaaccaggccctcgcgtaaaggtaagagattaatgacccgcggccagttacccaggtag

SEQ ID NO: 323610 - DNA, 696 bp, Artificial Sequence
  derived and/or modified sequence
atggcctccatggccgccatcggcagctgcagcaaggagtacagagtgctgctgggccagctgcagaagcagacagacctgatgcaggacaccagccggctgctggacccctacatccgcatccagggcctggatgtgcccaagctgcgggagcactgccgggagaggcctggggccttccccagcgaggagaccctgcggggcctgggcagaagaggcttcctgcagaccctgaatgccaccctgggctgtgtgctgcaccggctggccgacctggagcagaggctgcccaaggcccaggacctggagaggagcggcctgaacatcgaggacctggagaagctgcagatggcccggcccaacatcctgggcctgaggaacaacatctactgcatggcccagctgctggacaacagcgacacagctgagcccaccaaggccggccgcggggccagccagccccccacccccaccccagccagtgatgccttccagaggaagctggagggctgccgcttcctgcacggctaccaccgcttcatgcacagcgtgggccgggtcttcagcaagtggggcgagagccccaacagaagcagaagacacagcccccaccaggccctgaggaaaggagtgcggaggacccggcccagcaggaagggcaagaggctgatgacccggggccagctgcccaggtag

SEQ ID NO: 323611 - DNA, 696 bp, Artificial Sequence
  derived and/or modified sequence
atggccagcatggccgccatcggcagctgcagcaaggagtaccgggtgctcttaggccaactgcagaagcagactgatctcatgcaagacacgtcccgcctccttgacccttacatcagaatacaaggcctggacgtgcccaagttaagggagcactgcagggagcggccaggggcatttccatcagaggagacactgaggggacttggcaggcgcggcttcctccaaaccttgaatgcgactttggggtgtgtgcttcataggctggccgacctggagcagcggcttccaaaggctcaggatctcgagcggagcggactgaatattgaagacctggaaaagttacagatggccaggcctaacattctcgggctaagaaacaacatctactgtatggctcaactcctcgataacagcgacacagcagaaccaacaaaggctggaaggggcgcatctcagcctcctacaccaacccccgcaagtgacgctttccagaggaagttagaaggttgcaggtttctccacgggtaccacagattcatgcacagcgtgggacgcgtgttttcgaaatggggcgaatcgccgaaccgatcccgtagacactcaccacaccaggccttgcgcaagggagtccgtcggacacgccccagtagaaagggcaaacgcttgatgacccgtggacagctgcctcggtag

SEQ ID NO: 323612 - DNA, 696 bp, Artificial Sequence
  derived and/or modified sequence
atggctagcatggcagcaatcggtagctgctccaaagagtaccgtgttctgttaggccaactacagaaacagaccgatttgatgcaggatacttccagacttctagacccatacattcggattcaggggcttgacgtgccgaagttaagagagcactgccgggaacgtcccggtgccttcccttccgaggagaccctccggggactgggtagaaggggctttctgcaaaccctgaatgcaaccctgggttgtgttctgcaccggctggctgatctggagcaacggctaccaaaggcgcaggacctcgaacgctcaggtttgaacatagaggacctggaaaaacttcaaatggctagacctaacatcctggggcttaggaacaatatctattgcatggcacagctgctggacaacagtgacacagctgagccaaccaaggccggacggggagcgagtcagccaccaaccccaacccccgcttctgatgcattccaaaggaagctggagggatgtcggttcctgcacggatatcataggtttatgcactcagtgggcagagtcttctcaaaatggggggagagcccgaatagatctaggcgtcacagcccccaccaggctttacggaaaggcgttcgaaggacccggccatcacgcaaaggtaaacgtctgatgacaagaggtcagcttcctaggtag

SEQ ID NO: 323613 - DNA, 696 bp, Artificial Sequence
  derived and/or modified sequence
atggcttccatggcggcaatcggttcctgttcgaaggagtatcgagtgctgctgggccaactccagaagcagacagatttaatgcaggatacaagccgactgttagatccatatattaggatacaggggctggatgttcccaaattaagagaacactgtcgggagcggcctggagcattcccaagcgaagaaacgttacgagggcttgggcgccgtggcttcctgcagactttaaacgctaccctgggttgcgttctccatcggctggcagatctggagcagaggctgccaaaagcacaggatttagagagaagcggcctgaatatcgaagatctagaaaagctacagatggcacggcctaacattctcggtctgaggaacaacatctactgtatggcacagctgctggacaactctgatacagccgaacccactaaagctgggcgaggcgcatcccagccccccacgcccaccccagcctccgacgcattccagcgcaaactcgagggatgtcgatttctacacggttaccatagatttatgcattctgttgggcgtgtgttttctaaatggggcgaaagtcctaatcgtagtcggcggcatagcccccaccaagcactcagaaaaggcgtccgcagaacccgccccagtagaaaaggaaagaggctgatgacacggggtcagttgcctcgctag

SEQ ID NO: 323614 - DNA, 696 bp, Artificial Sequence
  derived and/or modified sequence
atggcatctatggctgctattggatcctgctcaaaagagtatcgtgtactgctcggtcagctccagaaacagacggatctgatgcaagacacatccagactgcttgatccgtacattagaatccagggcttagacgtcccaaaactgcgggagcactgtagggagagacccggggcattcccctctgaggagaccttacgaggcttgggacggaggggctttttacagactttgaatgcgacgctcggctgtgtcctccacagactggcggacttggagcagagattacctaaggcgcaggatctcgagcgcagtggtcttaatatagaggatctggaaaaactgcaaatggcaaggccaaatatactcggtctgcggaacaatatctattgtatggcccaactgctggataactccgatacagcagaaccaactaaagcaggcagaggcgcaagccaaccccccacaccaacaccagcaagcgacgcttttcaacgtaagctcgaaggttgtcgcttcctacacgggtatcaccgattcatgcacagcgttggaagggtattctccaaatggggcgaatctcctaacagaagccgtcggcatagcccccaccaagcactcagaaaaggcgtccgcagaacccgccccagtagaaaaggaaagaggctgatgacacggggtcagttgcctcgctag

SEQ ID NO: 323615 - DNA, 696 bp, Artificial Sequence
  derived and/or modified sequence
atggccagcatggccgccatcggcagctgcagcaaggagtacagagtgctgctgggccagctgcagaagcagaccgacctgatgcaggacaccagcagactgctggacccctacatcagaatccagggcctggacgtgcccaagctgagagagcactgcagagagagacccggcgccttccccagcgaggagaccctgagaggcctgggcagaagaggcttcctgcagaccctgaacgccaccctgggctgcgtgctgcacagactggccgacctggagcagagactgcccaaggcccaggacctggagagaagcggcctgaacatcgaggacctggagaagctgcagatggccagacccaacatcctgggcctgagaaacaacatctactgcatggcccagctgctggacaacagcgacaccgccgagcccaccaaggccggcagaggcgccagccagccccccacccccacccccgccagcgacgccttccagagaaagctggagggctgcagattcctgcacggctaccacagattcatgcacagcgtgggcagagtgttcagcaagtggggcgagagccccaacagaagcagaagacacagcccccaccaggccctgagaaagggcgtgagaagaaccagacccagcagaaagggcaagagactgatgaccagaggccagctgcccagatag

SEQ ID NO: 323616 - DNA, 2697 bp, Artificial Sequence
  derived and/or modified sequence
atgggggcgtgggccctggcaagtgcactcctcagccaatcagcgtcctgcccggctggtggattcggttacaagcccaagatcaccccatactccagcctctttcctcctcctcccgcagctccattcattggtcccgccgcaccgggcctgctgggctccgcttccgttccactgctcagctgccgcctggtggggccaccaagggcaggcatcccaggggctttgtctgactggactgggccagtgcagaatgggggttcaggcagggctgtttgggatgctgggcttcctgggggtggccctggggggctcccctgccctccgctggtacaggacctcctgccacttgaccaaggccgtccctggcaacccactggggtacctgagcttcctggccaaggatgctcagggactggccctgatccatgcccgctgggatgcgcataggaggctgcagtcatgtagctgggaggatgagccggagctcaccgcagcctacggtgctctctgtgctcatgagactgcctggggctccttcatccacacccccggacccgagctgcagagagcactggccactcttcagagtcagtgggaggcatgccgagcgcttgaggagagtccagcaggggccaggaagaagcgagcagcagggcagagtggagtccctggtggagggcaccagcgagagaagagaggatggaccatgcctggcacactgtggtgtggagttggagattctgctgggaactcctcggagctgggggtcttccagggacctgatctctgttgccgggaacatgaccgctgcccacagaacatctcacccttgcagtacaactatggcatccgaaactaccgattccacaccatctcccactgtgactgtgacaccaggtttcagcaatgcctacagaatcagcacgactccatctcggacatcgtgggcgtggccttcttcaacgtgctggagatcccctgctttgtgctggaggagcaggaggcgtgtgtggcgtggtactggtggggcgggtgtaggatgtacggcacagtgcccctcgctcgcctgcagcccaggaccttctacaatgcctcctggagctcccgggccacctccccaactcccagctcccggagcccagcccctcccaagcctcgacagaagcagcaccttcggaaggggccaccacatcagaaagggtccaagcgccccagcaaagccaacaccacagccctccaggaccctatggtctctcccaggcttgatgtggcccccacaggcctccagggcccacagggtggcctaaaacctcagggtgcccgctgggtctgccgcagcttccgccgccacctggaccagtgtgagcaccagattgggccccgggaaatcgagttccagctgctcaacagcgcccaagagcccctcttccactgcaactgcacgcgccgtctggcacgcttcctgaggctccacagcccacccgaggttaccaacatgctttgggagctgctgggcacaacctgcttcaagctggcccctccactggactgtgtggaaggcaaaaactgttccagagaccctagggccatcagggtgtcagcccggcacttgcggaggcttcagcagaggcgacaccagctccaggataaaggcacagatgagaggcagccatggccttcagagcccctgagaggccccatgtcattctacaaccagtgcctgcagctaacccaggcagccaggagacccgacaggcagcagaagtcctggagccagtgacctcagtttcagctttcctgggcaccagcctggaccttgcccatggctatgccaagccttgggaatctcagcctcccctccgtaggttagactgaagcatggcagaggctgttgtggacaatcaagaggatgaatggggggatctcaaggcccaaatgctggaccacatctcctgctgttctgggtaaccttgagctatgtatgacacaactcttctatgcctggatgtggtgttcaggaagctcattctgatgccctgggctttggccttgccagggaacttcacatacagatgagaatggggaaagggtaacttattgcagcagccccaggcagtaccaggaggaggtacatgtatgtccgtgttgcaaaaataatacatgcctcaaaaacctgcctaggggagccctagtgcctgggtgctgtggcctgaggtagcaggtgggaagttagggatgtcacagaaatgtctgtgtctgaatccaggattggggtgggtgttggagagggctttcagctcccctcctcccaggggggcctctttttttaacggctgccgtgcccttcctggcccagccctaaacctaaattcaaatctcctccatgcctttgcgcaaaggacctccctcttgcactctaagccttagtttcctcctctaaaaaaagggggtctctaaacaggagctacctcatagggttgttgaggattaagtgaaccaatacatatacagtgcttagcacttaataagtattcccccctgcgacacctagctgaactatggtttggtgtctgatcttgagaggttgatgtaaccttttaaaggcctcagttcgctcacctgtgaaatgggtctaagaatagcactgatctcacagggttgtgatgcagattaaaggagatggcatgtgtaatg

SEQ ID NO: 323617 - DNA, 2157 bp, Artificial Sequence
  derived and/or modified sequence
atgcgcaaagcaggagttgcccattccaagagtagcaaagacatggagagtcacgtgttcttaaaggcaaagaccagggacgaatatttgagcttagtggcacggctgatcatacattttagggatatccataacaaaaagtcccaggcttctgtgtctgaccctatgaatgccttacaaagcctgacaggagggcctgctgccggcgctgccggaataggtatgccacccaggggccctggacagtcccttggtggtatgggatcgttaggcgccatgggtcagcccatgtcgctgtccggccagcctcctccgggcactagcgggatggctccacactctatggctgtggtctccacagctactcctcaaacccaacttcagctgcagcaggtagctctgcagcagcagcagcagcaacagcagttccaacaacagcagcaggcagctctgcagcaacagcagcagcaacaacagcagcaacagtttcaggctcagcagtccgctatgcagcagcagttccaggcagtggtgcagcagcagcagcagctccagcagcagcagcagcagcagcagcacctcattaagctccatcaccagaaccagcagcagcagcagcagcaagccctacaggcacaacccccaattcaacagcctcccatgcaacagccccagccacctccatctcaggccctaccgcagcaactgcaacagatgcaccacacacaacaccaccagcctcctccccagccccagcaaccacccgtggcgcagaaccagcccagccagctgccaccccagagccaaacccagcccctggtgtctcaggcacaagccctccctggacagatgttatatacgcaaccaccactgaaattcgtgagagcccctatggtcgttcagcagccacctgtccagcctcaagtccagcaacagcagacagccgtccagactgcccaggcggcccagatggtagctccgggcgtccagatgatcacggaagcactagctcagggaggcatgcacattcgagctagattcccccccaccacagctgtctccgcaattccttcttcaagtataccattgggcaggcagcccatggcacaacaggtgcagactcctcaatctatgcctcccccccctcagccctccccccagcctggtcaaccttctagccagcctaattcaaacgtctcctccgggcctgctccatcaccctcatcctttttgcccagccccagcccacagccatcacagtcaccagtcaccgccagaacaccccagaatttcagcgttccatcccccggaccgctgaatacacctgtgaatccttcttctgtgatgagtcccgctgggtcatctcaggccgaagaacaacagtatcttgataaactaaagcagcttagcaagtacattgagcccctacgccgaatgatcaataagatagataaaaatgaggacagaaagaaggatctgagtaagatgaagagtctgttggatatcctaactgatccaagcaaaaggtgtccccttaaaacactgcaaaaatgtgaaatagctctggaaaagttgaaaaatgatatggccgtgccaacacctcccccccctcccgtcccaccaacaaaacaacagtacctgtgtcagcccttgctggacgccgtacttgccaacatccgttctcccgtgtttaatcactcgctctaccgcacgtttgtccccgccatgaccgcgatccatggcccacccatcacagctcccgtggtgtgcaccaggaagcgtagactcgaggatgacgaacgtcaaagcatcccctccgtactgcaaggcgaggttgcccgcctcgaccccaagttcctggtaaatctggacccaagtcactgcagcaacaatgggacggttcatctaatttgcaaactggatgataaggacctgccatccgtcccccccttggagttatcagtacctgccgattaccctgctcagagccctttgtggatagataggcagtggcagtacgatgctaacccatttttacagtctgtgcacaggtgcatgacaagccgccttcttcagctgcctgacaaacacagcgtgacagccctcttgaacacctgggcccagtctgtgcaccaggcatgtctgtctgccgcttag

SEQ ID NO: 323618 - DNA, 2157 bp, Artificial Sequence
  derived and/or modified sequence
atgaggaaggccggcgtggcccacagcaagagcagcaaggacatggagagccacgtgttcctgaaggccaagaccagagatgagtacctgagcctggtggcccggctcatcatccacttccgggacatccacaacaagaagagccaggcctctgtgtctgaccccatgaatgccctgcagagcctgactggaggccctgctgctggagctgctggcatcggcatgccaccccggggccctggccagagcctgggcggcatgggcagcctgggcgccatgggccagcccatgagcctgagcggccagcccccacctggcaccagcggcatggccccccacagcatggctgtggtgtccacagccaccccccagacccagctgcagctgcagcaggtggccctgcagcagcagcagcagcagcagcagttccagcagcagcagcaggccgccctgcagcagcagcagcagcagcagcagcagcagcagttccaggcccagcagagcgccatgcagcagcagttccaggccgtggtgcagcagcagcagcagctgcagcagcagcagcagcagcagcagcacctgatcaagctgcaccaccagaaccagcagcagcagcagcagcaggccctgcaggcccagccccccatccagcagccccccatgcagcagccccagcccccacccagccaggccctgccccagcagctgcagcagatgcaccacacccagcaccaccagcccccaccccagccccagcagccccctgtggcccagaaccagcccagccagctgcccccccagagccagacccagcccctggtgtcccaggcccaggccctgcccggccagatgctgtacacccagccccccctgaagtttgtgcgggcccccatggtggtgcagcagccccctgtgcagccccaggtgcagcagcagcagacagctgtgcagacagcccaggccgcccagatggtggcccctggggtgcagatgatcacagaggccctggcccagggcggcatgcacatccgggcccgcttcccccccaccacagctgtgtctgccatccccagcagcagcatccccctgggccggcagcccatggcccagcaggtgcagaccccccagagcatgcctcctccaccccagcccagcccccagcccggccagcccagcagccagcccaacagcaatgtgagcagcggccctgcccccagccccagcagcttcctgcccagccccagcccccagcccagccagagccctgtgacagcccggaccccccagaacttctctgtgcccagccctggccccctgaacacccctgtgaaccccagctctgtgatgagccctgctggcagcagccaggccgaggagcagcagtacctggacaagctgaagcagctgagcaagtacatcgagcccctgcggaggatgatcaacaagattgacaagaatgaagacaggaagaaggacctgagcaagatgaagagcctgctggacatcctgacagaccccagcaagcgctgccccctgaagaccctgcagaagtgtgagatcgccctggagaagctgaagaatgacatggctgtgcccaccccacctcctcctcctgtgccccccaccaagcagcagtacctgtgccagcccctgctggatgctgtgctggccaacatccgcagccctgtgttcaaccacagcctgtaccgcacctttgtgcctgccatgacagccatccacggcccccccatcacagcccctgtggtgtgcaccaggaagaggcggctggaggatgatgagcggcagagcatccccagcgtgctgcagggcgaggtggcccggctggaccccaagttcctggtgaacctggaccccagccactgcagcaacaatggaacagtgcacctgatctgcaagctggatgacaaggacctgcccagcgtgccccccctggagctgtctgtgcctgctgactacccagcccagagccccctgtggattgaccggcagtggcagtatgatgccaaccccttcctgcagagcgtgcaccgctgcatgaccagccggctgctgcagctgcctgacaagcacagcgtgacagccctgctgaacacctgggcccagagcgtgcaccaggcctgcctgtctgctgcctag

SEQ ID NO: 323619 - DNA, 2752 bp, Artificial Sequence
  derived and/or modified sequence
acatgcttgcctggtggtgaatgggacactttcaggcgagacctaggggagccccaggccagcaccaggacagagatctcgaggcctttccaactctgctggttcttcagaagtcaaaccaacagattggagtatgtgaaggaagctcgtgtattcttctgaactagcttagacaacagtacacagtttgaagggcagcagccttttctgcagcgaggatgccatgaggaaagctggtgtggcacacagtaaatccagcaaggatatggagagccatgttttcctgaaggccaagacccgggacgaatacctttctctcgtggccaggctcattatccattttcgagacattcataacaagaaatctcaagcttccgtcagtgatcctatgaatgcactccagagcctgactggcggacctgctgcgggagccgctggaattggcatgcctcctcggggcccgggacagtctctgggcgggatgggtagccttggtgccatgggacagccaatgtctctctcagggcagccgcctcctgggacctcggggatggcccctcacagcatggctgtcgtgtctacggcaactccacagacccagctgcagctccagcaggtggcgctgcagcagcagcagcaacagcagcagttccagcagcagcagcaggcggcgctacagcagcagcagcagcagcagcaacagcagcagttccaggctcagcagagtgccatgcagcagcagttccaagcagtagtgcagcagcagcagcagctccagcagcagcagcagcagcagcagcatctaattaaattgcatcatcaaaatcagcagcagcagcagcagcaggctttgcaggcccagccaccaattcagcagccaccgatgcagcagccacagcctccgccctcccaggctctgccccagcagctgcagcagatgcatcacacacagcaccaccagccgccaccacagccccagcagcctccagttgctcagaaccaaccatcacaactcccgccacagtcgcagacccagcctttggtgtcacaggcgcaagctctccctggacaaatgttgtatacccaaccaccactgaaatttgtccgagctccgatggtggtgcagcagcccccagtgcagccccaggtgcagcagcagcagacagcagtacagacagctcaggctgcccagatggtggctcccggagtccagatgatcacggaagccttggcccaaggtgggatgcacataagagcccggttcccgcctaccaccgctgtgtccgccatcccgtcaagctccatccctttgggcagacagcccatggcacagcaggtgcagaccccgcagtcgatgccccctcccccccagccgtccccgcagcccggccagcccagctcacagcccaactccaacgtcagctctggccctgccccatctcccagtagcttcctgcccagcccctcaccgcagccctcccagagcccagtgacggcgcggaccccacagaacttcagtgtcccctcacctggacctttaaacacacctgtgaaccccagctctgtcatgagcccagctggctccagccaggctgaggagcagcagtacctggacaagctgaagcagctgtcgaagtacatcgagcccctgcgccgcatgatcaacaagatcgacaagaacgaagacagaaaaaaggacctgagtaagatgaagagccttctggacattctgacagacccctcgaagcggtgtcccctgaagaccttgcaaaagtgtgagatcgccctggagaaactcaagaatgacatggcggtgcccactcccccaccgcccccggtgccaccgaccaaacagcagtacctatgccagccgctcctggatgccgtcctggccaacatccgctcacctgtcttcaaccattccctgtaccgcacattcgttccagccatgaccgccattcacggcccacccatcacggccccagtggtgtgcacccggaagcgcaggcttgaggatgatgagcggcagagcatccccagtgtgctccagggtgaggtggccaggctggaccccaagttcctggtaaacctggacccttctcactgcagcaacaatggcactgtccacctgatctgcaagctggatgacaaggacctcccaagtgtgccaccactggagctcagtgtgcccgctgactatcctgcccaaagcccgctgtggatagaccggcagtggcagtacgacgccaaccccttcctccagtcggtgcaccgctgcatgacctccaggctgctgcagctcccggacaagcactcggtcaccgccttgctcaacacctgggcccagagcgtccaccaggcctgcctctcagccgcctagccaagactgcagggatggcccgcagcctcatcggggccaaggacacacgcctcctgtcagacacttctaggtgttggcttccttagagagcctggggttaggttagctttcctgcttttatcttctgccttggggacctgccaaacgaaatcccacacctgtacagaactgggataggcgcagtggagcgggttgcttggggggcgttggccgacttcttagagaaggccctccatgtgacttcctcccaggagccagatgcgatcctcaggctgctctcaccgtggcctgtccacggtccaggtccatctcagcagcgtgagggtgcactcagggtgttgttagagcgtctcgtgtgtgctagacgcaccc

SEQ ID NO: 323620 - DNA, 2157 bp, Artificial Sequence
  derived and/or modified sequence
atgcggaaggccggcgtggcccacagcaagagcagcaaggacatggaatctcacgtgttcctgaaggcgaaaacaagagatgaatacctgtcgctggtagcccggttgatcatacactttcgtgatattcacaacaaaaagtcccaggccagcgtgtccgatccaatgaatgccctgcagagcttgactgggggccccgcggccggcgcagctggcatcggtatgccgccccgcggtccagggcagagcctcggcgggatgggaagtctcggagcgatgggacagccgatgtccctgtctggccagcccccaccagggacgagtgggatggctcctcacagtatggccgttgtgagcacagccaccccacagactcagctgcagctgcagcaggtggcgcttcagcagcagcagcagcagcagcagtttcagcagcagcagcaagcagccctgcagcagcagcaacaacaacagcagcaacagcaatttcaggctcaacagtccgccatgcagcagcagttccaagcggtcgtacaacagcagcagcagctgcaacagcagcaacagcagcagcagcatctgatcaagttgcaccaccaaaaccagcagcagcagcagcaacaggctctgcaggcccaacctccaattcagcagccccccatgcagcaacctcagccaccgccgtcacaggccctccctcaacaattacagcagatgcaccatacacagcaccaccagccccccccgcaaccccagcaaccgccggtggcccagaatcagccaagtcaactgcccccccagagccagacccagcccctagttagccaagcccaggccctgcctggccagatgctctatactcagccacctttaaaattcgttagagcccccatggtggtacagcaaccacccgtgcagccccaggtgcagcagcaacagacagcagttcaaacagcccaagcagcgcaaatggtggcccccggcgtccagatgatcaccgaggcattggcccaaggaggcatgcacataagagcacgcttccccccaaccaccgccgtcagtgcgattccttcatccagtatccccctgggccgacagcccatggcgcaacaggtgcagacaccccaaagcatgccacccccaccccagccatctccccagcccggtcagccatcaagtcagcctaactcgaatgtcagcagcggaccagcaccgtctccatccagctttttacctagtccatcgccccaacccagtcaatctccagttacagccagaactccacagaatttttccgtcccgtctccaggtccactcaacactccagttaaccccagttcagtgatgtctcctgccggctctagtcaggctgaggagcagcagtacctggacaaacttaagcaactgtccaagtatatcgagccgctcaggaggatgatcaataaaattgacaaaaatgaggatagaaaaaaggatctttctaaaatgaaatcattgctggatattttaaccgatcctagcaagagatgcccgctcaagaccttacagaagtgcgagatcgccctggagaagctgaagaacgacatggccgttccaacacccccccccccccccgttccccctaccaagcagcaatacctctgtcaaccactattggacgccgtcctggctaatatacgatctcctgttttcaaccactccttgtacaggacattcgttcccgccatgaccgcaatccacgggccacctatcaccgcccctgtggtatgcacccggaaaagacgtctggaagacgatgaacggcagtcgatcccgtctgtacttcagggagaggttgcacgccttgatccgaaattcctggtgaacttggacccctcacactgtagcaataacggaactgttcacctaatttgtaagttagacgataaggacctaccctcagttcctccactcgagctttccgtcccggcagattaccccgcccagagccctctgtggattgacaggcagtggcagtacgacgccaaccccttcctccagagtgtacacaggtgtatgactagtagactcctgcaactccctgataagcatagcgttacagccttactgaatacatgggcccagagtgtgcaccaggcttgtttgtctgcggcgtag

SEQ ID NO: 323621 - DNA, 2157 bp, Artificial Sequence
  derived and/or modified sequence
atgaggaaagctggcgtagctcactctaaatccagtaaggatatggaaagccacgttttcctgaaagcaaaaacccgggatgaatatctctccctggtcgccagactaataatccacttccgtgatatccacaataagaagtcccaagcaagtgtgtccgaccccatgaacgcactccagtcactgaccggaggtcctgcggcaggagcagctggaatcggcatgccgccaagaggcccaggccaaagtctcgggggaatgggctctctgggggcaatgggccaaccaatgtccctcagcggccagccgcctccaggaacgagcggtatggcgcctcacagtatggccgtagtatccacagccacgccccagacacaacttcaactgcagcaggtggcactgcagcagcagcagcagcagcagcaatttcagcagcagcagcaggcggcactgcagcagcagcagcagcagcagcagcagcagcagttccaggcacagcagtcagcaatgcagcaacagtttcaggccgtggtccagcagcaacagcagctgcaacagcaacagcagcagcagcagcacctgatcaagctgcatcaccagaaccagcagcagcagcagcaacaggccttgcaggctcaaccacccatccaacagcctcccatgcagcagcctcagccgccaccgagtcaggctctgcctcagcagttgcagcagatgcaccacactcagcatcaccagccaccaccccaaccacaacagcctccggttgcacaaaatcagccctcccagctgcccccacagtctcagactcagcccctcgtgtcacaggctcaagccctccctggacaaatgctgtacacgcagcctccactaaagtttgttagggccccaatggtggttcagcagcctcccgtacagccccaggtccagcagcagcagacagccgttcagacagcacaggctgcccagatggttgcccctggcgtccagatgattaccgaagctctagcccagggtgggatgcacatcagggcaagatttccccctacgaccgccgtgagcgccattccctcgtcatccattcccctcgggagacagcctatggcccaacaggtccaaaccccccagagtatgccaccgcctcctcagccgtcaccacagccaggacagccttcctcacaacccaactcgaatgtttcttctgggcctgctcctagtccgagttctttcctgccctccccgtctcctcagcccagccagagtccagttactgcacggactccccagaactttagcgtgccgagccctggtcccctcaacacgccagtgaacccctcttctgttatgtctcctgctgggtcttctcaagcggaagaacagcagtatctggacaagctgaagcaactctctaaatatattgaacccctccgtcgtatgatcaataaaatagacaagaatgaagacagaaagaaggacctcagcaaaatgaagtctttgttggatatcctcacagatccgtctaaaaggtgtccactcaaaaccctacagaagtgtgaaatcgccttggagaagctcaagaacgacatggcagtccccactccacccccaccaccggtgccacccacgaagcagcagtacttgtgccagcctctccttgatgccgtgctagctaatatacgtagtcctgtctttaaccactcgctctacagaaccttcgtgcccgcaatgacagcaatccatggaccacctatcaccgcgccagttgtctgtacccgaaagaggagattggaagatgatgaaaggcagagtatcccatcagttctgcaaggtgaagtggccaggctggacccaaagtttcttgtgaacttggatccctcccactgctctaataacggtaccgtccatttgatttgcaagctcgacgataaggaccttccatccgttccacctctagaattgagcgtccctgccgattatcccgcacagtcacctctgtggatcgacagacagtggcagtatgacgccaacccattcctgcagagcgtgcaccgatgcatgacctccaggttactgcagcttcccgacaaacacagtgtaacagcactcttaaacacatgggctcaaagtgtgcatcaggcctgcctgagtgccgcttag

SEQ ID NO: 323622 - DNA, 2157 bp, Artificial Sequence
  derived and/or modified sequence
atgagaaaggccggcgtggcccacagcaagagcagcaaggacatggagagccacgtgttcctgaaggccaagaccagagacgagtacctgagcctggtggccagactgatcatccacttcagagacatccacaacaagaagagccaggccagcgtgagcgaccccatgaacgccctgcagagcctgaccggcggccccgccgccggcgccgccggcatcggcatgccccccagaggccccggccagagcctgggcggcatgggcagcctgggcgccatgggccagcccatgagcctgagcggccagcccccccccggcaccagcggcatggccccccacagcatggccgtggtgagcaccgccaccccccagacccagctgcagctgcagcaggtggccctgcagcagcagcagcagcagcagcagttccagcagcagcagcaggccgccctgcagcagcagcagcagcagcagcagcagcagcagttccaggcccagcagagcgccatgcagcagcagttccaggccgtggtgcagcagcagcagcagctgcagcagcagcagcagcagcagcagcacctgatcaagctgcaccaccagaaccagcagcagcagcagcagcaggccctgcaggcccagccccccatccagcagccccccatgcagcagccccagcccccccccagccaggccctgccccagcagctgcagcagatgcaccacacccagcaccaccagccccccccccagccccagcagccccccgtggcccagaaccagcccagccagctgcccccccagagccagacccagcccctggtgagccaggcccaggccctgcccggccagatgctgtacacccagccccccctgaagttcgtgagagcccccatggtggtgcagcagccccccgtgcagccccaggtgcagcagcagcagaccgccgtgcagaccgcccaggccgcccagatggtggcccccggcgtgcagatgatcaccgaggccctggcccagggcggcatgcacatcagagccagattcccccccaccaccgccgtgagcgccatccccagcagcagcatccccctgggcagacagcccatggcccagcaggtgcagaccccccagagcatgcccccccccccccagcccagcccccagcccggccagcccagcagccagcccaacagcaacgtgagcagcggccccgcccccagccccagcagcttcctgcccagccccagcccccagcccagccagagccccgtgaccgccagaaccccccagaacttcagcgtgcccagccccggccccctgaacacccccgtgaaccccagcagcgtgatgagccccgccggcagcagccaggccgaggagcagcagtacctggacaagctgaagcagctgagcaagtacatcgagcccctgagaagaatgatcaacaagatcgacaagaacgaggacagaaagaaggacctgagcaagatgaagagcctgctggacatcctgaccgaccccagcaagagatgccccctgaagaccctgcagaagtgcgagatcgccctggagaagctgaagaacgacatggccgtgcccacccccccccccccccccgtgccccccaccaagcagcagtacctgtgccagcccctgctggacgccgtgctggccaacatcagaagccccgtgttcaaccacagcctgtacagaaccttcgtgcccgccatgaccgccatccacggcccccccatcaccgcccccgtggtgtgcaccagaaagagaagactggaggacgacgagagacagagcatccccagcgtgctgcagggcgaggtggccagactggaccccaagttcctggtgaacctggaccccagccactgcagcaacaacggcaccgtgcacctgatctgcaagctggacgacaaggacctgcccagcgtgccccccctggagctgagcgtgcccgccgactaccccgcccagagccccctgtggatcgacagacagtggcagtacgacgccaaccccttcctgcagagcgtgcacagatgcatgaccagcagactgctgcagctgcccgacaagcacagcgtgaccgccctgctgaacacctgggcccagagcgtgcaccaggcctgcctgagcgccgcctag

SEQ ID NO: 323623 - DNA, 522 bp, Artificial Sequence
  derived and/or modified sequence
atgggcgacctgccctgggccccccccgaggcccaggcccccagcaccgccggcgccggcgacgtggccgagcaccaggtggcccccgccagattcctgcagggcgcctggagacaggccgccggctggctgtgcagagagaccggcgccgcccccggcagcgcccaggccggcccccccgagaccgcccacgccgccgacccccagcccagaggcccccaggccccccccagactgccccccagcctgagccccgagagagtgcaccccggccagcccgccgcccccgccgagcccgcccccggcgcccccgccctgagaagcggccccagccagcccagaggcctgagactgcccgtgcccgtgcccgcctgcgccggcagcagcgcccccggcagccccgccgccctgcccgacagctacccctggcccccccccgccagaaacagacccgccaccctgccccccaccagcagagtgagccccctggccgccttcctggccagcgccccccagagatag

SEQ ID NO: 323624 - DNA, 273 bp, Artificial Sequence
  derived and/or modified sequence
atgtggcactacatcggcgccgccgagtgcccctacctgcagctgcccagatgcagaggcagcagcaccagatactggcacaagaagagcagaggcagactgacctggccctggctgctgatgagccagctgagaacctgccacatcaacagccccttccccctggccgtgacctgcggcgtgaagttcagcgaggccgccgtgcccgtgcacctgagcggctgcgtgcagaagatgaacatctgcctgcagctgcagttcagcaacgactag

SEQ ID NO: 323625 - DNA, 888 bp, Artificial Sequence
  derived and/or modified sequence
atgctgcccgacttcaagctgtactacaaggccaccgtgaccaagaccgcctggtacagataccagaacagagacatcgaccagtggaacagaaccgagcccagcgagatcaccccccacatctacaactacctgatcttcgacaagcccgagaagaacaagcagtggggcaaggacagcctgttcaacaagtggtgctgggagaactggctggccatctgcagaaagctgaagctggaccccttcctgaccccctacaccaagatcaacagcagatggatcaagtacctgaacgtgagacccaagaccatcaagaccgtggaggagaacctgggcatcaccatccaggacatcggcatgggcaaggacttcatgagcaagacccccaaggccatggccaccaaggccaagatcgacaagtgggacctgatcaagctgaagagcttctgcaccgccaaggagaccaccatcagagtgaacagacagcccaccaagtgggagaagatcttcgccacctacagcagcgacaagggcctgatcagcagaatctacaacgagttcaagcagatctacaagaagaagaccaacaaccccatcaagaagtgggccaaggacatgaacagacacttcagcaaggaggacatctacgccgccaagaagcacatgaagaagtgcagccccagcctggccatcagagagatgcagatcaagaccaccatgagataccacctgacccccgtgagaatggccgtgatcaagaagagcggcaacaacagatgctggagaggctgcggcgagatcggcaccctgctgcactgctggtgggactgcaagctggtgcagcccctgtggaagagcgtgtggagattcctgagagacctggagtag

SEQ ID NO: 323626 - DNA, 570 bp, Artificial Sequence
  derived and/or modified sequence
atgcagcagcagttccaggccgtcgtgcaacagcagcaacaactacagcagcagcagcagcaacagcaacacctcattaagctgcaccatcagaaccaacagcagattcagcagcaacagcagcagcttcagcgaattgctcaacttcagctgcaacagcagcagcaacagcaacagcaacaacagcagcagcaacagcaggcgcttcaagcccaaccacctattcagcagcccccaatgcagcagccccaaccccccccaagtcaagccttaccccagcaactgcagcaaatgcatcacactcagcaccatcagccacctccacagcctcagcagccaccagtcgcacagaaccagccatcccagttgcctccccaaagccagactcaacctcttgtttcccaagcccaggctctgcctggccagatgttgtacacccaacctcccctcaaatttgttagggctcccatggtggttcagcagccacctgtacagcctcaagtgcaacagcagcagactgcggtacagaccgcccaggctgctcagatggtggcaccgggagtgcagtag

SEQ ID NO: 323627 - DNA, 570 bp, Artificial Sequence
  derived and/or modified sequence
atgcagcagcagttccaggccgtggtgcagcagcagcagcagctgcagcagcagcagcagcagcagcagcacctgatcaagctgcaccaccagaaccagcagcagatccagcagcagcagcagcagctgcagagaattgcccagctgcagctgcagcagcagcagcagcagcagcagcagcagcagcagcagcagcagcaggccctgcaggcccagccccccatccagcagccccccatgcagcagccccagcccccacccagccaggccctgccccagcagctgcagcagatgcaccacacccagcaccaccagcccccaccccagccccagcagccccctgtggcccagaaccagcccagccagctgcccccccagagccagacccagcccctggtgtcccaggcccaggccctgcccggccagatgctgtacacccagccccccctgaagtttgtgcgggcccccatggtggtgcagcagccccctgtgcagccccaggtgcagcagcagcagacagctgtgcagacagcccaggccgcccagatggtggcccctggggtgcagtag

SEQ ID NO: 323628 - DNA, 570 bp, Artificial Sequence
  derived and/or modified sequence
atgcagcagcagttccaggccgtggtgcagcagcagcagcagctgcaacagcagcagcagcagcagcagcacctcatcaaactgcatcatcagaaccagcagcagatccaacagcagcagcagcagctgcagcgcattgcccaactgcagctacagcagcaacagcagcagcagcaacagcagcagcagcagcagcagcaagctctgcaggctcagccccctatccagcagcctccgatgcagcaaccccagccccctccttcacaagctctgccccagcaactccagcagatgcatcacacccagcatcaccagccacccccccaaccccaacagcctccagtagctcaaaaccagccctctcagctgccgcctcagtcgcagactcagccgctggtgagtcaagctcaagctctgcccggtcagatgctgtacactcagccacctctgaagttcgttcgcgcccctatggtggttcagcagccccccgttcagcctcaggtgcagcagcagcagaccgcagttcaaaccgcccaggcagcgcaaatggttgctcccggcgtgcaatag

SEQ ID NO: 323629 - DNA, 570 bp, Artificial Sequence
  derived and/or modified sequence
atgcagcagcaattccaagccgtagtgcagcagcaacagcagctgcaacagcagcagcaacagcagcagcacctgattaagctgcaccaccagaaccaacagcagatccagcaacagcagcagcagctgcagcgtatcgcacagctgcaactccaacagcaacaacagcaacaacagcagcagcagcagcagcagcagcaagccctccaggcgcagccccctattcagcagccacctatgcagcagcctcagccccctccatcacaggccctgccccagcagctacagcagatgcaccacacacaacatcatcagcctcctccgcagcctcagcagcccccagtggctcagaaccaaccttcgcagctccccccacaatctcagactcaacctcttgtttcccaggcacaggccttgccaggacagatgctgtacactcaaccaccattgaaattcgtgcgggcaccaatggttgttcagcagcctccagtgcagccgcaggtgcagcagcagcaaacagcagtacaaactgcccaggctgcacaaatggtggcgccaggagtgcagtag

SEQ ID NO: 323630 - DNA, 570 bp, Artificial Sequence
  derived and/or modified sequence
atgcagcagcagttccaggccgtggtgcagcagcagcagcagctgcagcagcagcagcagcagcagcagcacctgatcaagctgcaccaccagaaccagcagcagatccagcagcagcagcagcagctgcagagaatcgcccagctgcagctgcagcagcagcagcagcagcagcagcagcagcagcagcagcagcagcaggccctgcaggcccagccccccatccagcagccccccatgcagcagccccagcccccccccagccaggccctgccccagcagctgcagcagatgcaccacacccagcaccaccagccccccccccagccccagcagccccccgtggcccagaaccagcccagccagctgcccccccagagccagacccagcccctggtgagccaggcccaggccctgcccggccagatgctgtacacccagccccccctgaagttcgtgagagcccccatggtggtgcagcagccccccgtgcagccccaggtgcagcagcagcagaccgccgtgcagaccgcccaggccgcccagatggtggcccccggcgtgcagtag

SEQ ID NO: 323631 - DNA, 2367 bp, Artificial Sequence
  derived and/or modified sequence
atggatgtgagcggtcaggagacagattggagatccaccgcattcaggcaaaagctagtttctcagatcgaggacgcaatgcgcaaggccggcgttgcccacagcaagtcctctaaagacatggagtcacatgtgtttttgaaggccaagacaagagacgagtatttatccctggtcgccaggcttatcatccacttccgcgatatccataataagaaatctcaggcttctgttagtgaccctatgaacgctctacagagcttgaccggggggccagctgcaggcgccgccgggattggaatgccacctcgaggccccgggcagtctcttggtggtatgggttcactaggggcgatgggacaaccaatgtccctttctggtcagccacccccaggaactagtggaatggctcctcattctatggcggtcgtatccaccgcaacccctcagacgcagcttcagttacaacaagtggctctgcaacagcagcagcagcaacaacagtttcagcaacaacagcaggccgcgcttcaacagcagcagcaacagcagcaacagcaacagttccaggctcagcagtctgcgatgcagcagcagttccaagccgttgtacagcagcagcagcagttacaacagcagcagcagcaacaacagcaccttataaaactccaccatcagaatcagcaacagatccagcagcagcaacaacagctgcagaggattgctcaactccagctccagcagcagcagcaacaacagcagcagcagcagcagcagcagcaacaggcactccaagcacaaccacctatccagcaaccgcctatgcagcagccccagccaccccccagccaagcattgccgcagcagctgcagcagatgcaccatacccaacaccaccaacctcctcctcaaccgcagcaacctcccgtcgcacagaaccaaccttcacagttgcccccgcaatctcagactcagcctctcgtgagtcaggctcaagcattgcccggccagatgctgtacactcagcccccccttaaattcgtgcgcgctcccatggtggtccagcaaccaccggtgcagccacaagtgcagcaacagcagaccgcggtgcagactgctcaagccgctcagatggttgcaccgggcgtgcagatgattacagaggcactcgcccagggtggcatgcacatacgagcccggtttccccccacaactgctgtttcagcaataccttctagctccatacctctggggaggcagcctatggcccaggtcagccagtcgtccctgcctatgctcagtagtcctagccctggccagcaggtgcagacccctcagtccatgccaccacccccacagccttccccacagccagggcagcccagctcacagcctaatagtaacgtcagttcagggcccgcgccttccccttcgtcctttctgccctcgcctagtccacagccatcacaatcaccagtgaccgccaggaccccccagaacttctccgtgccctctccggggcctctgaacacaccagtgaacccgtcatctgtcatgtcgcctgctggctctagtcaggccgaggagcagcagtatttggataaactgaaacaactttccaagtatatcgagcccctaagaaggatgatcaacaagattgacaagaacgaagaccggaagaaggatctaagcaagatgaaaagcttactcgacatactgacggaccccagtaagcggtgccccctgaagactctccagaaatgcgaaattgcactagagaagctgaagaatgacatggcggtccccactcctcctcctccccctgtgccccccaccaaacagcagtatctgtgtcagcctctgctcgatgccgtgctcgcaaatattaggtctcctgtgttcaatcactccctgtaccggacattcgtccccgctatgacagcaatccatggccctcccatcacagcgcctgttgtgtgcactcggaaaaggcgactggaggacgatgaaagacagagcatcccttctgtcctccagggggaagtagctaggctggaccccaagtttctggtcaaccttgatcccagccattgctccaacaatgggaccgtacacctgatttgtaaactggatgacaaggatcttcctagtgtgccgcccctcgagctgagcgtgcccgcagactatcctgcacaatcccctttatggattgaccgtcagtggcaatatgatgccaaccctttcttgcagtccgtccacagatgtatgacaagcaggcttttgcagctacctgataaacacagtgtgactgcgttgcttaatacatgggcccagagcgtgcatcaggcctgcctgtctgcggcttag

SEQ ID NO: 323632 - DNA, 2247 bp, Artificial Sequence
  derived and/or modified sequence
atggacgttagcggacaggagactgactggcggagcaccgctttccgacagaaactcgttagtcaaattgaggacgccatgcgcaaggccggtgtggctcactccaaaagtagtaaggatatggagtctcacgtctttttgaaggccaagacacgggatgaatatctgtcactggtcgccagactgattatccactttagggatatccacaacaaaaaatcccaggcctccgtgagtgatcctatgaatgccctccagagcctcacgggaggccccgccgctggtgctgccgggattggcatgcccccaagaggccccgggcaaagcttggggggaatggggtccctcggagccatgggccagcctatgtctctgagcggacagccccccccagggacgtccggcatggccccccactctatggcagttgtgtccaccgccacaccccagacacaattacagctccagcaagtggccctccagcagcagcagcagcagcagcagtttcagcagcagcaacaagccgcgttacaacaacaacagcaacagcagcagcagcagcaattccaggcacagcagagtgcgatgcaacagcaattccaggccgtggtgcaacagcagcagcagcttcagcagcagcagcaacagcagcagcatttaatcaaattgcaccaccagaatcagcagcagattcagcagcagcagcaacagctccaaaggattgcacaactgcagttacaacagcagcaacagcagcagcaacaacaacaacagcaacaacagcaggctctgcaggcccagcccccaatccagcagccccccatgcagcagccgcagccaccccccagccaagctctcccgcagcaactccagcagatgcaccacactcagcaccatcagccccccccccagcctcagcagcctcctgttgctcagaaccaacccagccagctccctccacagtcgcagactcaacccttggtttctcaggctcaagccctccctgggcaaatgttgtatacacagcccccactcaaatttgtgcgagctcctatggtggtccaacagcctcccgtgcagccccaggtgcagcagcagcaaacagcagttcagacagctcaggctgcgcaaatggttgcacccggagtccaggtctcccagtcaagcctaccaatgttaagttcaccgagcccagggcaacaggttcaaaccccacaatccatgccgccacctccccagccctcgcctcaacccggtcagcccagctcccagccaaactcaaacgtgtcatccgggccagccccctccccctcttctttcctgcccagcccctcccctcaaccttctcagtccccagtgacggctcgtactccgcagaacttttccgtgccttcgcctggacctttgaatacccctgtcaacccatctagcgtgatgtcccctgcagggagcagccaagccgaggagcaacagtacctcgataaactgaaacagctcagtaaatacatagaaccactgcggcgtatgataaataagattgacaagaatgaagatcgcaagaaagacctctctaagatgaagagtctcctggatatcctcaccgatccaagtaagagatgtccgttgaagactctgcaaaagtgcgagattgccctagagaagctcaaaaatgacatggccgtgcctacccccccaccgcccccagtgccaccaaccaagcaacagtacctgtgtcagccgctacttgatgcggtgctggccaacattagatcaccagtattcaaccatagtttgtaccgcaccttcgttccagcaatgacggctatccacgggccccctatcacagctccagtggtgtgcacccgcaagaggcgcctggaagatgacgaaaggcaaagcataccttcagtgcttcagggagaagtggcaagattggatcctaagttccttgtaaacctagacccttcacactgttccaataatggtacagtgcatttgatttgcaaactggatgacaaagaccttccaagtgtaccgcccctggagctcagtgtgcccgctgattaccctgctcagagcccgctgtggattgataggcagtggcaatatgacgcaaatcctttcctgcaatcagtgcaccggtgcatgacctcgcgtctcttacagctgcccgacaaacacagcgttaccgccctcctgaacacatgggcccagtccgtgcatcaagcatgtttgagtgctgcatag

SEQ ID NO: 323633 - DNA, 2034 bp, Artificial Sequence
  derived and/or modified sequence
atggacgtctcgggccaggaaactgactggcgctccaccgcttttaggcagaaattagtatctcaaattgaggatgccatgaggaaggccggggtggcacactccaagtcttctaaggatatggagagccacgtctttttgaaggcaaagaccagggacgaatacctttctctcgttgcccgcctgatcattcactttcgggacattcacaataagaaatctcaagcaagcgtgtccgcccaactccaacttcaacaggtagcgctccagcaacaacaacagcaacaacagttccaacaacagcaacaagccgccctccagcagcaacagcagcagcagcagcagcaacaattccaagcccagcagtccgctatgcaacagcaatttcaggccgttgtccaacagcagcagcaactgcaacaacagcagcagcagcaacagcatttgattaagctgcaccaccaaaatcagcagcagattcagcagcagcagcaacaactgcagcgaattgcccagctgcagttacagcaacagcagcagcagcaacagcagcagcaacaacaacagcagcaagcgttacaggcacaaccgccgatacagcaaccgcctatgcagcaaccacagccacccccgtcgcaggcactgccccagcagctgcagcagatgcaccatactcagcatcaccagcctccccctcagcctcagcagcccccagtagcccaaaatcagccttctcagctaccaccgcaaagccagacgcaaccactagttagccaggcccaggctctgcccggccagatgctgtacacccagccacccctgaaattcgtcagagccccgatggtggttcagcagccgccagtgcagccccaggtccagcaacagcagactgcggttcagaccgcccaagccgcacagatggtggcgccaggtgtccaagtctctcagtcttctctcccaatgctcagttccccttctcccgggcagcaggtgcagacccctcagtcgatgcctccacctccacagccctctcctcagccaggccagccatcctcccaaccaaatagtaatgttagctcagggcctgccccctctccttcgtccttcctgccctctccatcccctcagccctctcagagtccagtaaccgctcgcacccctcagaacttctccgtgccctcccctggccccctgaacaccccagtcaatccatccagtgtaatgagcccagcaggtagctcccaagctgaggagcagcagtacctggataagcttaagcaactcagcaagtatatcgaaccgttgcgcaggatgataaataagatcgataaaaatgaagacagaaaaaaagatttgtctaagatgaagagtctgctggacattctgaccgaccccagtaaacgatgccctctcaaaacactgcagaaatgcgaaatcgcgctggagaaactgaagaacgatatggcggtgcctacgccaccaccaccacccgttcctcctacaaagcagcaatatctctgccagcctttgttggacgcagtgctggctaatattcgctcacccgtgttcaaccatagtttatatcgaacttttgtgccagctatgaccgcaatccacggtcctcctattaccgcaccagttgtatgcacccggaagagaaggttggaagacgacgagcgccaaagcatcccgtctgtgttgcagggggaagtggcaagactagacccaaaatttctggtaaatctagatccaagtcactgctccaataacggcacagtacacctgatctgcaagcttgatgacaaagacctgcccagcgtcccacccttggagctaagcgtgccggctgattaccccgcccaatctcctctctggatagaccgccagtggcagtacgatgcaaatcctttcctccagagcgtccatcggtgtatgacctctaggctcctccagttgcccgacaaacatagtgttactgctcttctcaatacttgggcccagtccgtacatcaagcatgtctatctgccgcatag

SEQ ID NO: 323634 - DNA, 2169 bp, Artificial Sequence
  derived and/or modified sequence
atgaggaaagcaggagtcgctcattctaagtcaagtaaggatatggagtcccacgttttcctgaaagcgaagactagggatgaatacctcagtttggtggctcgactaatcatccattttagagatatccacaacaaaaagagccaggcgtcagtctcggatccaatgaatgcactgcagtcactgactgggggccccgccgcgggcgccgccggaatcggaatgccaccccgtgggcctggccaatcattgggaggcatgggtagcttgggtgccatgggccagcctatgtctcttagcggtcagccacctccaggtactagcgggatggcgccccattctatggccgttgttagcaccgctaccccccagacccagcttcaacttcagcaggttgctctacaacagcagcagcaacagcagcagttccagcaacagcagcaggccgcccttcagcagcaacagcagcaacaacagcagcaacagttccaggctcaacaatctgccatgcagcagcagtttcaggcagtggtgcagcaacagcagcaacttcagcaacagcaacagcagcagcagcaccttatcaagctgcatcatcagaatcagcaacaaattcagcaacagcagcaacagcttcaacggatcgcgcagttgcagttgcagcagcagcaacagcagcaacagcagcaacaacaacagcaacagcaagccctgcaggctcaacccccaattcagcaaccccccatgcaacagccgcagccgcccccgtcccaagcccttccacaacagctccagcaaatgcaccacacacagcaccatcagccccccccacagccccaacagcctcccgtcgcccagaaccagccctcacaacttcctcctcagagccaaacccagccattggtgtcccaagcccaagcactgccagggcagatgctgtacacccaacccccgttgaaattcgtacgcgcacctatggtggtccagcagccaccagtgcaacctcaggtgcagcagcagcagaccgccgtgcagacagcccaggctgctcagatggttgcccccggagtacaggtcagtcagtcatctctccctatgttgtcttcacccagtccgggtcagcaggtccagacgcctcagtccatgccccccccgccacagccctccccacaacctggacagccatcctcacaaccaaactctaacgtctcgtccgggccagcccctagtccgtcatctttcctcccttctccctcccctcagccttcacagagccctgtcaccgctcgtactccccaaaacttttccgtcccctctccagggccccttaatacccccgttaacccttcttctgtgatgtcccccgcaggtagtagccaggcagaggagcagcagtacctggataagcttaagcagctgtccaaatatattgaacctctgaggcgaatgattaataagatcgataaaaatgaggataggaagaaagacctgtcgaaaatgaaatctctacttgacatcctgacggacccttctaagcggtgtccactgaaaactcttcagaagtgcgagattgctttagaaaagctgaagaatgatatggctgtccccacgcctcctccgccccccgttcccccaacaaagcagcagtatctgtgtcagcccttacttgatgctgtcttggcaaacatacggtctccggtgttcaatcacagcctatatcgtacatttgtgccagcaatgaccgcaattcacggtccgcctatcacagcgcccgtcgtatgtactagaaaaagaagacttgaagacgacgagcggcagtcgattccttctgttttgcagggtgaggtcgcacgcctggatccgaagtttttggtcaatctggatccaagtcattgttctaataacggtacggtgcacttgatctgcaaattggatgataaagatctcccatcagtacccccactggagctgtctgttcccgcagattatccagcccagtctcccctgtggatcgacagacagtggcaatatgatgctaacccttttctgcagtcagttcaccgctgtatgacctctagactgctacagctgccagacaagcactctgtgaccgcattgctcaacacatgggctcagagtgttcatcaggcctgtctcagcgcagcctag

SEQ ID NO: 323635 - DNA, 1914 bp, Artificial Sequence
  derived and/or modified sequence
atggagtcacacgtgttcctgaaagcaaaaacaagagacgagtacctgtctttggtcgcccgacttattatacactttcgcgacatccacaacaagaagtcccaagctagcgtttcagcccaattgcaacttcaacaagtcgccctgcagcaacaacaacagcagcagcagttccagcaacagcagcaggccgccctgcagcaacaacagcagcagcagcagcagcagcaatttcaggcacagcagagtgccatgcagcagcagtttcaggccgtggttcaacaacaacagcagcttcagcagcagcagcaacaacagcagcacctgatcaaactccaccaccagaatcaacagcagattcagcagcagcaacagcagctccagagaattgctcaattgcagctacaacaacaacagcagcaacagcagcagcagcagcagcaacaacagcaagcattgcaagcccagcccccaatccagcaacctccaatgcagcagccccagccacctccctcccaggcgctgcctcagcagctgcagcagatgcaccacacccagcatcatcagccgccaccccagccacagcagcctcctgtggcacagaaccagccttcccagctccctcctcagtctcagacgcagccactggtgtcccaggctcaggccttgcccgggcagatgctgtacacccagccccccctaaagtttgtgagagctccgatggtggtgcaacagccccccgttcaacctcaggtgcagcagcagcaaacagctgtacagacggcccaggctgcccagatggttgcccccggtgtccaggtgtctcagtctagcctgcccatgttatcctcccccagccccggacaacaagtgcaaaccccacagagcatgcctcctccgccccagccctccccccaacctggacagcccagctctcagcctaattcaaatgtgagcagcgggcccgcacctagccccagtagtttcctgcctagccccagcccccaaccatctcaaagcccagtgactgctcggacaccgcagaacttcagtgtaccttcaccgggccccctgaatacacctgtcaaccccagctcagtgatgtctcctgctgggagttctcaagctgaggagcagcagtacctggacaagttgaagcagctatctaagtatattgagcctttgaggcgaatgatcaacaagatcgacaaaaacgaagaccggaagaaggatttatctaaaatgaagtccctgttggatattctgacagacccctccaagaggtgccccttgaagactctgcagaagtgcgagatcgctctcgagaagctgaagaacgatatggcggttccaaccccccccccccctcctgtccctcctacaaagcaacagtacctgtgccaacctcttctcgacgcggttttagcaaacatccggtcaccagtgttcaatcattccctttaccgtacttttgttccagcaatgaccgccattcacggcccccccataaccgcacccgtggtgtgtacaaggaaacggagactggaagacgacgaacggcagagtattccaagtgtgctgcagggagaagttgcaaggctggacccgaaatttttagttaatcttgacccatcccattgcagtaacaatgggaccgtccacctcatctgcaaactggatgataaggacttgccctccgttccacctttagaactttccgttccagcagattatccagcccagagtcctctgtggatcgaccgtcagtggcaatatgacgccaacccatttctgcaatcagtgcataggtgtatgacatcaaggctcctccagttaccagataagcacagcgttactgccttgctgaacacatgggctcaatctgtgcaccaggcctgtctgtcggcagcctag

SEQ ID NO: 323636 - DNA, 2169 bp, Artificial Sequence
  derived and/or modified sequence
atgcgaaaagctggggtcgcccatagcaaatcttccaaagatatggagtctcacgtcttcctgaaggctaagaccagggatgagtatctcagcctggttgcccggcttattatccactttagagatattcacaacaaaaagtcacaggcatccgtctctgaccccatgaatgctctccagagcctgaccgggggccccgccgccggcgcagcaggcatagggatgcctcccaggggccctggccagtccctgggtggcatgggcagcctgggcgccatggggcaacctatgtctttgagcggccagcccccacccggaacaagcggtatggccccacactcaatggccgtagtgagcacggctaccccccagactcaactgcagctgcagcaagtggccctgcagcaacaacagcagcagcagcagtttcagcagcaacagcaggccgctttacagcaacagcaacagcagcagcaacagcagcagttccaagcccagcaatccgccatgcagcaacagttccaggcagtcgtacagcagcagcaacagcttcaacagcagcagcagcagcagcaacatctgataaaattgcaccaccagaaccagcaacaaatccaacaacaacagcagcaactgcagcggatcgcacagttgcagctccaacagcagcagcagcagcagcagcagcagcagcagcagcaacagcaagctttgcaggcccagccaccgattcagcagcctcctatgcagcagcctcaaccaccaccatcacaggcccttcctcaacaattgcaacagatgcatcacacccaacaccaccaaccccctccgcagccccagcagcctcctgtcgcacagaaccaaccgtcacagctgcctcctcagagccagacccagcctttggtgtctcaggctcaggctctacccgggcagatgctttacacccaacccccactgaaattcgtgagagctccgatggtggtacagcagcccccggttcagcctcaagtacagcagcagcagacagccgttcagaccgctcaggccgcccagatggtggccccgggtgttcaggtcagtcagtcttccctccctatgctcagctctccctcgcccggccagcaggtgcagacaccccagtccatgcctcctccccctcagccatcgccccagcccggtcagccaagcagccagcctaattctaacgtctcctctggacctgctccttcccctagtagttttctaccaagtccttcaccccagccttcacagtcgcctgtcacggccagaacaccccagaacttttccgttccatcccccggacccctgaacacgcccgtgaaccctagttccgtaatgtctcccgccggctcgagtcaagctgaagagcagcagtacttggataagctcaaacagctcagcaaatatatcgaacctctgcgaagaatgattaacaaaatagataaaaacgaagaccgcaaaaaagacttgtctaaaatgaagtcactgctggatattctcactgacccaagtaagcgatgtccacttaagacactccagaagtgtgagatcgcattagaaaagctgaaaaatgatatggctgtgccgacccctcctccgccaccagtccctcctaccaagcaacagtacctgtgtcagccgcttctcgatgccgtgttggcaaacatcaggtctcctgtgtttaaccacagcctctaccgcactttcgtgcctgccatgacagctatccacggcccccctataactgcccctgtggtgtgcacaagaaaacgacgcctggaagatgacgagcggcaaagcatcccgtcagtcctgcagggcgaggtcgcccgtttggaccccaaatttctggtaaatctggacccatctcattgcagtaacaacggaaccgtgcaccttatctgtaaactcgatgacaaggacctcccatctgttcctccattggaactcagcgtccctgctgactatcccgcccaaagtccgctgtggatagacagacaatggcagtacgatgccaatccctttctgcagagcgtccatagatgcatgaccagcaggctcctgcaactccctgataaacactcagtgacagcattactcaatacgtgggcgcagagcgtccaccaagcttgcctttctgcagcctag

SEQ ID NO: 323637 - DNA, 2367 bp, Artificial Sequence
  derived and/or modified sequence
atggatgtgtctggccaggagacagactggaggagcacagccttccggcagaagctggtgtcccagattgaagatgccatgaggaaggccggcgtggcccacagcaagagcagcaaggacatggagagccacgtgttcctgaaggccaagaccagagatgagtacctgagcctggtggcccggctcatcatccacttccgggacatccacaacaagaagagccaggcctctgtgtctgaccccatgaatgccctgcagagcctgactggaggccctgctgctggagctgctggcatcggcatgccaccccggggccctggccagagcctgggcggcatgggcagcctgggcgccatgggccagcccatgagcctgagcggccagcccccacctggcaccagcggcatggccccccacagcatggctgtggtgtccacagccaccccccagacccagctgcagctgcagcaggtggccctgcagcagcagcagcagcagcagcagttccagcagcagcagcaggccgccctgcagcagcagcagcagcagcagcagcagcagcagttccaggcccagcagagcgccatgcagcagcagttccaggccgtggtgcagcagcagcagcagctgcagcagcagcagcagcagcagcagcacctgatcaagctgcaccaccagaaccagcagcagatccagcagcagcagcagcagctgcagagaattgcccagctgcagctgcagcagcagcagcagcagcagcagcagcagcagcagcagcagcagcaggccctgcaggcccagccccccatccagcagccccccatgcagcagccccagcccccacccagccaggccctgccccagcagctgcagcagatgcaccacacccagcaccaccagcccccaccccagccccagcagccccctgtggcccagaaccagcccagccagctgcccccccagagccagacccagcccctggtgtcccaggcccaggccctgcccggccagatgctgtacacccagccccccctgaagtttgtgcgggcccccatggtggtgcagcagccccctgtgcagccccaggtgcagcagcagcagacagctgtgcagacagcccaggccgcccagatggtggcccctggggtgcagatgatcacagaggccctggcccagggcggcatgcacatccgggcccgcttcccccccaccacagctgtgtctgccatccccagcagcagcatccccctgggccggcagcccatggcccaggtgtcccagagcagcctgcccatgctgagcagccccagccctggccagcaggtgcagaccccccagagcatgcctcctccaccccagcccagcccccagcccggccagcccagcagccagcccaacagcaatgtgagcagcggccctgcccccagccccagcagcttcctgcccagccccagcccccagcccagccagagccctgtgacagcccggaccccccagaacttctctgtgcccagccctggccccctgaacacccctgtgaaccccagctctgtgatgagccctgctggcagcagccaggccgaggagcagcagtacctggacaagctgaagcagctgagcaagtacatcgagcccctgcggaggatgatcaacaagattgacaagaatgaagacaggaagaaggacctgagcaagatgaagagcctgctggacatcctgacagaccccagcaagcgctgccccctgaagaccctgcagaagtgtgagatcgccctggagaagctgaagaatgacatggctgtgcccaccccacctcctcctcctgtgccccccaccaagcagcagtacctgtgccagcccctgctggatgctgtgctggccaacatccgcagccctgtgttcaaccacagcctgtaccgcacctttgtgcctgccatgacagccatccacggcccccccatcacagcccctgtggtgtgcaccaggaagaggcggctggaggatgatgagcggcagagcatccccagcgtgctgcagggcgaggtggcccggctggaccccaagttcctggtgaacctggaccccagccactgcagcaacaatggaacagtgcacctgatctgcaagctggatgacaaggacctgcccagcgtgccccccctggagctgtctgtgcctgctgactacccagcccagagccccctgtggattgaccggcagtggcagtatgatgccaaccccttcctgcagagcgtgcaccgctgcatgaccagccggctgctgcagctgcctgacaagcacagcgtgacagccctgctgaacacctgggcccagagcgtgcaccaggcctgcctgtctgctgcctag

SEQ ID NO: 323638 - DNA, 2247 bp, Artificial Sequence
  derived and/or modified sequence
atggatgtgtctggccaggagacagactggaggagcacagccttccggcagaagctggtgtcccagattgaagatgccatgaggaaggccggcgtggcccacagcaagagcagcaaggacatggagagccacgtgttcctgaaggccaagaccagagatgagtacctgagcctggtggcccggctcatcatccacttccgggacatccacaacaagaagagccaggcctctgtgtctgaccccatgaatgccctgcagagcctgactggaggccctgctgctggagctgctggcatcggcatgccaccccggggccctggccagagcctgggcggcatgggcagcctgggcgccatgggccagcccatgagcctgagcggccagcccccacctggcaccagcggcatggccccccacagcatggctgtggtgtccacagccaccccccagacccagctgcagctgcagcaggtggccctgcagcagcagcagcagcagcagcagttccagcagcagcagcaggccgccctgcagcagcagcagcagcagcagcagcagcagcagttccaggcccagcagagcgccatgcagcagcagttccaggccgtggtgcagcagcagcagcagctgcagcagcagcagcagcagcagcagcacctgatcaagctgcaccaccagaaccagcagcagatccagcagcagcagcagcagctgcagagaattgcccagctgcagctgcagcagcagcagcagcagcagcagcagcagcagcagcagcagcagcaggccctgcaggcccagccccccatccagcagccccccatgcagcagccccagcccccacccagccaggccctgccccagcagctgcagcagatgcaccacacccagcaccaccagcccccaccccagccccagcagccccctgtggcccagaaccagcccagccagctgcccccccagagccagacccagcccctggtgtcccaggcccaggccctgcccggccagatgctgtacacccagccccccctgaagtttgtgcgggcccccatggtggtgcagcagccccctgtgcagccccaggtgcagcagcagcagacagctgtgcagacagcccaggccgcccagatggtggcccctggggtgcaggtgtcccagagcagcctgcccatgctgagcagccccagccctggccagcaggtgcagaccccccagagcatgcctcctccaccccagcccagcccccagcccggccagcccagcagccagcccaacagcaatgtgagcagcggccctgcccccagccccagcagcttcctgcccagccccagcccccagcccagccagagccctgtgacagcccggaccccccagaacttctctgtgcccagccctggccccctgaacacccctgtgaaccccagctctgtgatgagccctgctggcagcagccaggccgaggagcagcagtacctggacaagctgaagcagctgagcaagtacatcgagcccctgcggaggatgatcaacaagattgacaagaatgaagacaggaagaaggacctgagcaagatgaagagcctgctggacatcctgacagaccccagcaagcgctgccccctgaagaccctgcagaagtgtgagatcgccctggagaagctgaagaatgacatggctgtgcccaccccacctcctcctcctgtgccccccaccaagcagcagtacctgtgccagcccctgctggatgctgtgctggccaacatccgcagccctgtgttcaaccacagcctgtaccgcacctttgtgcctgccatgacagccatccacggcccccccatcacagcccctgtggtgtgcaccaggaagaggcggctggaggatgatgagcggcagagcatccccagcgtgctgcagggcgaggtggcccggctggaccccaagttcctggtgaacctggaccccagccactgcagcaacaatggaacagtgcacctgatctgcaagctggatgacaaggacctgcccagcgtgccccccctggagctgtctgtgcctgctgactacccagcccagagccccctgtggattgaccggcagtggcagtatgatgccaaccccttcctgcagagcgtgcaccgctgcatgaccagccggctgctgcagctgcctgacaagcacagcgtgacagccctgctgaacacctgggcccagagcgtgcaccaggcctgcctgtctgctgcctag

SEQ ID NO: 323639 - DNA, 2034 bp, Artificial Sequence
  derived and/or modified sequence
atggatgtgtctggccaggagacagactggaggagcacagccttccggcagaagctggtgtcccagattgaagatgccatgaggaaggccggcgtggcccacagcaagagcagcaaggacatggagagccacgtgttcctgaaggccaagaccagagatgagtacctgagcctggtggcccggctcatcatccacttccgggacatccacaacaagaagagccaggcctctgtgtctgcccagctgcagctgcagcaggtggccctgcagcagcagcagcagcagcagcagttccagcagcagcagcaggccgccctgcagcagcagcagcagcagcagcagcagcagcagttccaggcccagcagagcgccatgcagcagcagttccaggccgtggtgcagcagcagcagcagctgcagcagcagcagcagcagcagcagcacctgatcaagctgcaccaccagaaccagcagcagatccagcagcagcagcagcagctgcagagaattgcccagctgcagctgcagcagcagcagcagcagcagcagcagcagcagcagcagcagcagcaggccctgcaggcccagccccccatccagcagccccccatgcagcagccccagcccccacccagccaggccctgccccagcagctgcagcagatgcaccacacccagcaccaccagcccccaccccagccccagcagccccctgtggcccagaaccagcccagccagctgcccccccagagccagacccagcccctggtgtcccaggcccaggccctgcccggccagatgctgtacacccagccccccctgaagtttgtgcgggcccccatggtggtgcagcagccccctgtgcagccccaggtgcagcagcagcagacagctgtgcagacagcccaggccgcccagatggtggcccctggggtgcaggtgtcccagagcagcctgcccatgctgagcagccccagccctggccagcaggtgcagaccccccagagcatgcctcctccaccccagcccagcccccagcccggccagcccagcagccagcccaacagcaatgtgagcagcggccctgcccccagccccagcagcttcctgcccagccccagcccccagcccagccagagccctgtgacagcccggaccccccagaacttctctgtgcccagccctggccccctgaacacccctgtgaaccccagctctgtgatgagccctgctggcagcagccaggccgaggagcagcagtacctggacaagctgaagcagctgagcaagtacatcgagcccctgcggaggatgatcaacaagattgacaagaatgaagacaggaagaaggacctgagcaagatgaagagcctgctggacatcctgacagaccccagcaagcgctgccccctgaagaccctgcagaagtgtgaaattgccctggagaagctgaagaatgacatggctgtgcccaccccacctcctcctcctgtgccccccaccaagcagcagtacctgtgccagcccctgctggatgctgtgctggccaacatccgcagccctgtgttcaaccacagcctgtaccgcacctttgtgcctgccatgacagccatccacggcccccccatcacagcccctgtggtgtgcaccaggaagaggcggctggaggatgatgagcggcagagcatccccagcgtgctgcagggcgaggtggcccggctggaccccaagttcctggtgaacctggaccccagccactgcagcaacaacggcaccgtgcacctgatctgcaagctggatgacaaggacctgcccagcgtgccccccctggagctgtctgtgcctgctgactacccagcccagagccccctgtggattgaccggcagtggcagtatgatgccaaccccttcctgcagagcgtgcaccgctgcatgaccagccggctgctgcagctgcctgacaagcacagcgtgacagccctgctgaacacctgggcccagagcgtgcaccaggcctgcctgtctgctgcctag

SEQ ID NO: 323640 - DNA, 2169 bp, Artificial Sequence
  derived and/or modified sequence
atgaggaaggccggcgtggcccacagcaagagcagcaaggacatggagagccacgtgttcctgaaggccaagaccagagatgagtacctgagcctggtggcccggctcatcatccacttccgggacatccacaacaagaagagccaggcctctgtgtctgaccccatgaatgccctgcagagcctgactggaggccctgctgctggagctgctggcatcggcatgccaccccggggccctggccagagcctgggcggcatgggcagcctgggcgccatgggccagcccatgagcctgagcggccagcccccacctggcaccagcggcatggccccccacagcatggctgtggtgtccacagccaccccccagacccagctgcagctgcagcaggtggccctgcagcagcagcagcagcagcagcagttccagcagcagcagcaggccgccctgcagcagcagcagcagcagcagcagcagcagcagttccaggcccagcagagcgccatgcagcagcagttccaggccgtggtgcagcagcagcagcagctgcagcagcagcagcagcagcagcagcacctgatcaagctgcaccaccagaaccagcagcagatccagcagcagcagcagcagctgcagagaattgcccagctgcagctgcagcagcagcagcagcagcagcagcagcagcagcagcagcagcagcaggccctgcaggcccagccccccatccagcagccccccatgcagcagccccagcccccacccagccaggccctgccccagcagctgcagcagatgcaccacacccagcaccaccagcccccaccccagccccagcagccccctgtggcccagaaccagcccagccagctgcccccccagagccagacccagcccctggtgtcccaggcccaggccctgcccggccagatgctgtacacccagccccccctgaagtttgtgcgggcccccatggtggtgcagcagccccctgtgcagccccaggtgcagcagcagcagacagctgtgcagacagcccaggccgcccagatggtggcccctggggtgcaggtgtcccagagcagcctgcccatgctgagcagccccagccctggccagcaggtgcagaccccccagagcatgcctcctccaccccagcccagcccccagcccggccagcccagcagccagcccaacagcaatgtgagcagcggccctgcccccagccccagcagcttcctgcccagccccagcccccagcccagccagagccctgtgacagcccggaccccccagaacttctctgtgcccagccctggccccctgaacacccctgtgaaccccagctctgtgatgagccctgctggcagcagccaggccgaggagcagcagtacctggacaagctgaagcagctgagcaagtacatcgagcccctgcggaggatgatcaacaagattgacaagaatgaagacaggaagaaggacctgagcaagatgaagagcctgctggacatcctgacagaccccagcaagcgctgccccctgaagaccctgcagaagtgtgagatcgccctggagaagctgaagaatgacatggctgtgcccaccccacctcctcctcctgtgccccccaccaagcagcagtacctgtgccagcccctgctggatgctgtgctggccaacatccgcagccctgtgttcaaccacagcctgtaccgcacctttgtgcctgccatgacagccatccacggcccccccatcacagcccctgtggtgtgcaccaggaagaggcggctggaggatgatgagcggcagagcatccccagcgtgctgcagggcgaggtggcccggctggaccccaagttcctggtgaacctggaccccagccactgcagcaacaatggaacagtgcacctgatctgcaagctggatgacaaggacctgcccagcgtgccccccctggagctgtctgtgcctgctgactacccagcccagagccccctgtggattgaccggcagtggcagtatgatgccaaccccttcctgcagagcgtgcaccgctgcatgaccagccggctgctgcagctgcctgacaagcacagcgtgacagccctgctgaacacctgggcccagagcgtgcaccaggcctgcctgtctgctgcctag

SEQ ID NO: 323641 - DNA, 1914 bp, Artificial Sequence
  derived and/or modified sequence
atggagagccacgtgttcctgaaggccaagaccagagatgagtacctgagcctggtggcccggctcatcatccacttccgggacatccacaacaagaagagccaggcctctgtgtctgcccagctgcagctgcagcaggtggccctgcagcagcagcagcagcagcagcagttccagcagcagcagcaggccgccctgcagcagcagcagcagcagcagcagcagcagcagttccaggcccagcagagcgccatgcagcagcagttccaggccgtggtgcagcagcagcagcagctgcagcagcagcagcagcagcagcagcacctgatcaagctgcaccaccagaaccagcagcagatccagcagcagcagcagcagctgcagagaattgcccagctgcagctgcagcagcagcagcagcagcagcagcagcagcagcagcagcagcagcaggccctgcaggcccagccccccatccagcagccccccatgcagcagccccagcccccacccagccaggccctgccccagcagctgcagcagatgcaccacacccagcaccaccagcccccaccccagccccagcagccccctgtggcccagaaccagcccagccagctgcccccccagagccagacccagcccctggtgtcccaggcccaggccctgcccggccagatgctgtacacccagccccccctgaagtttgtgcgggcccccatggtggtgcagcagccccctgtgcagccccaggtgcagcagcagcagacagctgtgcagacagcccaggccgcccagatggtggcccctggggtgcaggtgtcccagagcagcctgcccatgctgagcagccccagccctggccagcaggtgcagaccccccagagcatgcctcctccaccccagcccagcccccagcccggccagcccagcagccagcccaacagcaatgtgagcagcggccctgcccccagccccagcagcttcctgcccagccccagcccccagcccagccagagccctgtgacagcccggaccccccagaacttctctgtgcccagccctggccccctgaacacccctgtgaaccccagctctgtgatgagccctgctggcagcagccaggccgaggagcagcagtacctggacaagctgaagcagctgagcaagtacatcgagcccctgcggaggatgatcaacaagattgacaagaatgaagacaggaagaaggacctgagcaagatgaagagcctgctggacatcctgacagaccccagcaagcgctgccccctgaagaccctgcagaagtgtgaaattgccctggagaagctgaagaatgacatggctgtgcccaccccacctcctcctcctgtgccccccaccaagcagcagtacctgtgccagcccctgctggatgctgtgctggccaacatccgcagccctgtgttcaaccacagcctgtaccgcacctttgtgcctgccatgacagccatccacggcccccccatcacagcccctgtggtgtgcaccaggaagaggcggctggaggatgatgagcggcagagcatccccagcgtgctgcagggcgaggtggcccggctggaccccaagttcctggtgaacctggaccccagccactgcagcaacaacggcaccgtgcacctgatctgcaagctggatgacaaggacctgcccagcgtgccccccctggagctgtctgtgcctgctgactacccagcccagagccccctgtggattgaccggcagtggcagtatgatgccaaccccttcctgcagagcgtgcaccgctgcatgaccagccggctgctgcagctgcctgacaagcacagcgtgacagccctgctgaacacctgggcccagagcgtgcaccaggcctgcctgtctgctgcctag

SEQ ID NO: 323642 - DNA, 3351 bp, Artificial Sequence
  derived and/or modified sequence
ggctctgtgactgaggcggcggcggtggcggccaagcgggatacgggcggcgggagctggggaacaggcatggacgtttccgggcaagagaccgactggcggagcaccgccttccggcagaagctggtcagtcaaatcgaggatgccatgaggaaagctggtgtggcacacagtaaatccagcaaggatatggagagccatgttttcctgaaggccaagacccgggacgaatacctttctctcgtggccaggctcattatccattttcgagacattcataacaagaaatctcaagcttccgtcagtgatcctatgaatgcactccagagcctgactggcggacctgctgcgggagccgctggaattggcatgcctcctcggggcccgggacagtctctgggcgggatgggtagccttggtgccatgggacagccaatgtctctctcagggcagccgcctcctgggacctcggggatggcccctcacagcatggctgtcgtgtctacggcaactccacagacccagctgcagctccagcaggtggcgctgcagcagcagcagcaacagcagcagttccagcagcagcagcaggcggcgctacagcagcagcagcagcagcagcaacagcagcagttccaggctcagcagagtgccatgcagcagcagttccaagcagtagtgcagcagcagcagcagctccagcagcagcagcagcagcagcagcatctaattaaattgcatcatcaaaatcagcaacagatacagcagcagcaacagcagctgcagcgaatagcacagctgcagctccaacaacagcaacagcagcagcagcagcagcagcagcagcagcagcaggctttgcaggcccagccaccaattcagcagccaccgatgcagcagccacagcctccgccctcccaggctctgccccagcagctgcagcagatgcatcacacacagcaccaccagccgccaccacagccccagcagcctccagttgctcagaaccaaccatcacaactcccgccacagtcgcagacccagcctttggtgtcacaggcgcaagctctccctggacaaatgttgtatacccaaccaccactgaaatttgtccgagctccgatggtggtgcagcagcccccagtgcagccccaggtgcagcagcagcagacagcagtacagacagctcaggctgcccagatggtggctcccggagtccagatgatcacggaagccttggcccaaggtgggatgcacataagagcccggttcccgcctaccaccgctgtgtccgccatcccgtcaagctccatccctttgggcagacagcccatggcacaggtcagccagagcagcctccccatgctgtcctcgccgtcaccgggccagcaggtgcagaccccgcagtcgatgccccctcccccccagccgtccccgcagcccggccagcccagctcacagcccaactccaacgtcagctctggccctgccccatctcccagtagcttcctgcccagcccctcaccgcagccctcccagagcccagtgacggcgcggaccccacagaacttcagtgtcccctcacctggacctttaaacacacctgtgaaccccagctctgtcatgagcccagctggctccagccaggctgaggagcagcagtacctggacaagctgaagcagctgtcgaagtacatcgagcccctgcgccgcatgatcaacaagatcgacaagaacgaagacagaaaaaaggacctgagtaagatgaagagccttctggacattctgacagacccctcgaagcggtgtcccctgaagaccttgcaaaagtgtgagatcgccctggagaaactcaagaatgacatggcggtgcccactcccccaccgcccccggtgccaccgaccaaacagcagtacctatgccagccgctcctggatgccgtcctggccaacatccgctcacctgtcttcaaccattccctgtaccgcacattcgttccagccatgaccgccattcacggcccacccatcacggccccagtggtgtgcacccggaagcgcaggcttgaggatgatgagcggcagagcatccccagtgtgctccagggtgaggtggccaggctggaccccaagttcctggtaaacctggacccttctcactgcagcaacaatggcactgtccacctgatctgcaagctggatgacaaggacctcccaagtgtgccaccactggagctcagtgtgcccgctgactatcctgcccaaagcccgctgtggatagaccggcagtggcagtacgacgccaaccccttcctccagtcggtgcaccgctgcatgacctccaggctgctgcagctcccggacaagcactcggtcaccgccttgctcaacacctgggcccagagcgtccaccaggcctgcctctcagccgcctagccaagactgcagggatggcccgcagcctcatcggggccaaggacacacgcctcctgtcagacacttctaggtgttggcttccttagagagcctggggttaggttagctttcctgcttttatcttctgccttggggacctgccaaacgaaatcccacacctgtacagaactgggataggcgcagtggagcgggttgcttggggggcgttggccgacttcttagagaaggccctccatgtgacttcctcccaggagccagatgcgatcctcaggctgctctcaccgtggcctgtccacggtccaggtccatctcagcagcgtgagggtgcactcagggtgttgttagagcgtctcgtgtgtgctagacgcacccctactcgttcctatagaacacagaggacataggaaacccttaaaacacacatgggattctctggtcacagttttgggttcaggctatgctgctttgggcaggtggagcaccccccgaggaagcctgcaagtccagggcacaggctgccttttggagggagggctggcccataggtgctgctggctccccgccaccagctgggcctcagccctcacggcattcctgctgagcaccgtggggcacccagggagcaggggcgtcagggatcctgctgccggcacccctgtgccgctggcatgagggccgtgtccccactgtgaaggatgaagagcaaggccctcaggacccgtgtcctcagagcaccacacactgagcacccagagacagcgggcctggcagcgggccgggccatgcagggagcgcctccctatgttgcctgccactctgggcaccggccagcaccctctggtgagaagaggtcccccctttttatgtgcactaccccaccatctgtgattataataaatttattattcctgtgtt

SEQ ID NO: 323643 - DNA, 3252 bp, Artificial Sequence
  derived and/or modified sequence
ttgggcctggctctgtgactgaggcggcggcggtggcggccaagcgggatacgggcggcgggagctggggaacaggcatggacgtttccgggcaagagaccgactggcggagcaccgccttccggcagaagctggtcagtcaaatcgaggatgccatgaggaaagctggtgtggcacacagtaaatccagcaaggatatggagagccatgttttcctgaaggccaagacccgggacgaatacctttctctcgtggccaggctcattatccattttcgagacattcataacaagaaatctcaagcttccgtcagtgatcctatgaatgcactccagagcctgactggcggacctgctgcgggagccgctggaattggcatgcctcctcggggcccgggacagtctctgggcgggatgggtagccttggtgccatgggacagccaatgtctctctcagggcagccgcctcctgggacctcggggatggcccctcacagcatggctgtcgtgtctacggcaactccacagacccagctgcagctccagcaggtggcgctgcagcagcagcagcaacagcagcagttccagcagcagcagcaggcggcgctacagcagcagcagcagcagcagcaacagcagcagttccaggctcagcagagtgccatgcagcagcagttccaagcagtagtgcagcagcagcagcagctccagcagcagcagcagcagcagcagcatctaattaaattgcatcatcaaaatcagcaacagatacagcagcagcaacagcagctgcagcgaatagcacagctgcagctccaacaacagcaacagcagcagcagcagcagcagcagcagcagcagcaggctttgcaggcccagccaccaattcagcagccaccgatgcagcagccacagcctccgccctcccaggctctgccccagcagctgcagcagatgcatcacacacagcaccaccagccgccaccacagccccagcagcctccagttgctcagaaccaaccatcacaactcccgccacagtcgcagacccagcctttggtgtcacaggcgcaagctctccctggacaaatgttgtatacccaaccaccactgaaatttgtccgagctccgatggtggtgcagcagcccccagtgcagccccaggtgcagcagcagcagacagcagtacagacagctcaggctgcccagatggtggctcccggagtccaggtcagccagagcagcctccccatgctgtcctcgccgtcaccgggccagcaggtgcagaccccgcagtcgatgccccctcccccccagccgtccccgcagcccggccagcccagctcacagcccaactccaacgtcagctctggccctgccccatctcccagtagcttcctgcccagcccctcaccgcagccctcccagagcccagtgacggcgcggaccccacagaacttcagtgtcccctcacctggacctttaaacacacctgtgaaccccagctctgtcatgagcccagctggctccagccaggctgaggagcagcagtacctggacaagctgaagcagctgtcgaagtacatcgagcccctgcgccgcatgatcaacaagatcgacaagaacgaagacagaaaaaaggacctgagtaagatgaagagccttctggacattctgacagacccctcgaagcggtgtcccctgaagaccttgcaaaagtgtgagatcgccctggagaaactcaagaatgacatggcggtgcccactcccccaccgcccccggtgccaccgaccaaacagcagtacctatgccagccgctcctggatgccgtcctggccaacatccgctcacctgtcttcaaccattccctgtaccgcacattcgttccagccatgaccgccattcacggcccacccatcacggccccagtggtgtgcacccggaagcgcaggcttgaggatgatgagcggcagagcatccccagtgtgctccagggtgaggtggccaggctggaccccaagttcctggtaaacctggacccttctcactgcagcaacaatggcactgtccacctgatctgcaagctggatgacaaggacctcccaagtgtgccaccactggagctcagtgtgcccgctgactatcctgcccaaagcccgctgtggatagaccggcagtggcagtacgacgccaaccccttcctccagtcggtgcaccgctgcatgacctccaggctgctgcagctcccggacaagcactcggtcaccgccttgctcaacacctgggcccagagcgtccaccaggcctgcctctcagccgcctagccaagactgcagggatggcccgcagcctcatcggggccaaggacacacgcctcctgtcagacacttctaggtgttggcttccttagagagcctggggttaggttagctttcctgcttttatcttctgccttggggacctgccaaacgaaatcccacacctgtacagaactgggataggcgcagtggagcgggttgcttggggggcgttggccgacttcttagagaaggccctccatgtgacttcctcccaggagccagatgcgatcctcaggctgctctcaccgtggcctgtccacggtccaggtccatctcagcagcgtgagggtgcactcagggtgttgttagagcgtctcgtgtgtgctagacgcacccctactcgttcctatagaacacagaggacataggaaacccttaaaacacacatgggattctctggtcacagttttgggttcaggctatgctgctttgggcaggtggagcaccccccgaggaagcctgcaagtccagggcacaggctgccttttggagggagggctggcccataggtgctgctggctccccgccaccagctgggcctcagccctcacggcattcctgctgagcaccgtggggcacccagggagcaggggcgtcagggatcctgctgccggcacccctgtgccgctggcatgagggccgtgtccccactgtgaaggatgaagagcaaggccctcaggacccgtgtcctcagagcaccacacactgagcacccagagacagcgggcctggcagcgggccgggccatgcagggagcgcctccctatgttgcctgccactctgggcaccggccagcaccctctggtgagaagaggtcccccctttttatgtgcactaccccaccatctgtgattataataaatttattattcctgtgtttgtcagttgttca

SEQ ID NO: 323644 - DNA, 2235 bp, Artificial Sequence
  derived and/or modified sequence
ccaagcgggatacgggcggcgggagctggggaacaggcatggacgtttccgggcaagagaccgactggcggagcaccgccttccggcagaagctggtcagtcaaatcgaggatgccatgaggaaagctggtgtggcacacagtaaatccagcaaggatatggagagccatgttttcctgaaggccaagacccgggacgaatacctttctctcgtggccaggctcattatccattttcgagacattcataacaagaaatctcaagcttccgtcagtgcccagctgcagctccagcaggtggcgctgcagcagcagcagcaacagcagcagttccagcagcagcagcaggcggcgctacagcagcagcagcagcagcagcaacagcagcagttccaggctcagcagagtgccatgcagcagcagttccaagcagtagtgcagcagcagcagcagctccagcagcagcagcagcagcagcagcatctaattaaattgcatcatcaaaatcagcaacagatacagcagcagcaacagcagctgcagcgaatagcacagctgcagctccaacaacagcaacagcagcagcagcagcagcagcagcagcagcagcaggctttgcaggcccagccaccaattcagcagccaccgatgcagcagccacagcctccgccctcccaggctctgccccagcagctgcagcagatgcatcacacacagcaccaccagccgccaccacagccccagcagcctccagttgctcagaaccaaccatcacaactcccgccacagtcgcagacccagcctttggtgtcacaggcgcaagctctccctggacaaatgttgtatacccaaccaccactgaaatttgtccgagctccgatggtggtgcagcagcccccagtgcagccccaggtgcagcagcagcagacagcagtacagacagctcaggctgcccagatggtggctcccggagtccaggtcagccagagcagcctccccatgctgtcctcgccgtcaccgggccagcaggtgcagaccccgcagtcgatgccccctcccccccagccgtccccgcagcccggccagcccagctcacagcccaactccaacgtcagctctggccctgccccatctcccagtagcttcctgcccagcccctcaccgcagccctcccagagcccagtgacggcgcggaccccacagaacttcagtgtcccctcacctggacctttaaacacacctgtgaaccccagctctgtcatgagcccagctggctccagccaggctgaggagcagcagtacctggacaagctgaagcagctgtcgaagtacatcgagcccctgcgccgcatgatcaacaagatcgacaagaacgaagacagaaaaaaggacctgagtaagatgaagagccttctggacattctgacagacccctcgaagcggtgtcccctgaagaccttgcaaaagtgtgagatcgccctggagaaactcaagaatgacatggcggtgcccactcccccaccgcccccggtgccaccgaccaaacagcagtacctatgccagccgctcctggatgccgtcctggccaacatccgctcacctgtcttcaaccattccctgtaccgcacattcgttccagccatgaccgccattcacggcccacccatcacggccccagtggtgtgcacccggaagcgcaggcttgaggatgatgagcggcagagcatccccagtgtgctccagggtgaggtggccaggctggaccccaagttcctggtaaacctggacccttctcactgcagcaacaatggcactgtccacctgatctgcaagctggatgacaaggacctcccaagtgtgccaccactggagctcagtgtgcccgctgactatcctgcccaaagcccgctgtggatagaccggcagtggcagtacgacgccaaccccttcctccagtcggtgcaccgctgcatgacctccaggctgctgcagctcccggacaagcactcggtcaccgccttgctcaacacctgggcccagagcgtccaccaggcctgcctctcagccgcctagccaagactgcagggatggcccgcagcctcatcggggccaaggacacacgcctcctgtcagacacttctaggtgttggcttccttagagagcctggggttaggttagctttcctgcttttatcttctgccttggggacctgccaaacgaaatcccacacctgta

SEQ ID NO: 323645 - DNA, 3210 bp, Artificial Sequence
  derived and/or modified sequence
gactgaggcggcggcggtggcggccaagcgggatacgggcggcgggagctggggaacaggcatggacgtttccgggcaagagaccgactggcggagcaccgccttccggcagaagctgcgaggatgccatgaggaaagctggtgtggcacacagtaaatccagcaaggatatggagagccatgttttcctgaaggccaagacccgggacgaatacctttctctcgtggccaggctcattatccattttcgagacattcataacaagaaatctcaagcttccgtcagtgatcctatgaatgcactccagagcctgactggcggacctgctgcgggagccgctggaattggcatgcctcctcggggcccgggacagtctctgggcgggatgggtagccttggtgccatgggacagccaatgtctctctcagggcagccgcctcctgggacctcggggatggcccctcacagcatggctgtcgtgtctacggcaactccacagacccagctgcagctccagcaggtggcgctgcagcagcagcagcaacagcagcagttccagcagcagcagcaggcggcgctacagcagcagcagcagcagcagcaacagcagcagttccaggctcagcagagtgccatgcagcagcagttccaagcagtagtgcagcagcagcagcagctccagcagcagcagcagcagcagcagcatctaattaaattgcatcatcaaaatcagcaacagatacagcagcagcaacagcagctgcagcgaatagcacagctgcagctccaacaacagcaacagcagcagcagcagcagcagcagcagcagcagcaggctttgcaggcccagccaccaattcagcagccaccgatgcagcagccacagcctccgccctcccaggctctgccccagcagctgcagcagatgcatcacacacagcaccaccagccgccaccacagccccagcagcctccagttgctcagaaccaaccatcacaactcccgccacagtcgcagacccagcctttggtgtcacaggcgcaagctctccctggacaaatgttgtatacccaaccaccactgaaatttgtccgagctccgatggtggtgcagcagcccccagtgcagccccaggtgcagcagcagcagacagcagtacagacagctcaggctgcccagatggtggctcccggagtccaggtcagccagagcagcctccccatgctgtcctcgccgtcaccgggccagcaggtgcagaccccgcagtcgatgccccctcccccccagccgtccccgcagcccggccagcccagctcacagcccaactccaacgtcagctctggccctgccccatctcccagtagcttcctgcccagcccctcaccgcagccctcccagagcccagtgacggcgcggaccccacagaacttcagtgtcccctcacctggacctttaaacacacctgtgaaccccagctctgtcatgagcccagctggctccagccaggctgaggagcagcagtacctggacaagctgaagcagctgtcgaagtacatcgagcccctgcgccgcatgatcaacaagatcgacaagaacgaagacagaaaaaaggacctgagtaagatgaagagccttctggacattctgacagacccctcgaagcggtgtcccctgaagaccttgcaaaagtgtgagatcgccctggagaaactcaagaatgacatggcggtgcccactcccccaccgcccccggtgccaccgaccaaacagcagtacctatgccagccgctcctggatgccgtcctggccaacatccgctcacctgtcttcaaccattccctgtaccgcacattcgttccagccatgaccgccattcacggcccacccatcacggccccagtggtgtgcacccggaagcgcaggcttgaggatgatgagcggcagagcatccccagtgtgctccagggtgaggtggccaggctggaccccaagttcctggtaaacctggacccttctcactgcagcaacaatggcactgtccacctgatctgcaagctggatgacaaggacctcccaagtgtgccaccactggagctcagtgtgcccgctgactatcctgcccaaagcccgctgtggatagaccggcagtggcagtacgacgccaaccccttcctccagtcggtgcaccgctgcatgacctccaggctgctgcagctcccggacaagcactcggtcaccgccttgctcaacacctgggcccagagcgtccaccaggcctgcctctcagccgcctagccaagactgcagggatggcccgcagcctcatcggggccaaggacacacgcctcctgtcagacacttctaggtgttggcttccttagagagcctggggttaggttagctttcctgcttttatcttctgccttggggacctgccaaacgaaatcccacacctgtacagaactgggataggcgcagtggagcgggttgcttggggggcgttggccgacttcttagagaaggccctccatgtgacttcctcccaggagccagatgcgatcctcaggctgctctcaccgtggcctgtccacggtccaggtccatctcagcagcgtgagggtgcactcagggtgttgttagagcgtctcgtgtgtgctagacgcacccctactcgttcctatagaacacagaggacataggaaacccttaaaacacacatgggattctctggtcacagttttgggttcaggctatgctgctttgggcaggtggagcaccccccgaggaagcctgcaagtccagggcacaggctgccttttggagggagggctggcccataggtgctgctggctccccgccaccagctgggcctcagccctcacggcattcctgctgagcaccgtggggcacccagggagcaggggcgtcagggatcctgctgccggcacccctgtgccgctggcatgagggccgtgtccccactgtgaaggatgaagagcaaggccctcaggacccgtgtcctcagagcaccacacactgagcacccagagacagcgggcctggcagcgggccgggccatgcagggagcgcctccctatgttgcctgccactctgggcaccggccagcaccctctggtgagaagaggtcccccctttttatgtgcactaccccaccatctgtgattataataaatttattattcctgtg

SEQ ID NO: 323646 - DNA, 3041 bp, Artificial Sequence
  derived and/or modified sequence
ggtttgggcctggctctgtgactgaggcggcggcggtggcggccaagcgggatacgggcggcgggagctggggaacaggcatggacgtttccgggcaagagaccgactggcggagcaccgccttccggcagaagctggtcagtcaaatcgaggatgccatgaggaaagctggtgtggcacacagtaaatccagcaaggatatggagagccatgttttcctgaaggccaagacccgggacgaatacctttctctcgtggccaggctcattatccattttcgagacattcataacaagaaatctcaagcttccgtcagtgcccagctgcagctccagcaggtggcgctgcagcagcagcagcaacagcagcagttccagcagcagcagcaggcggcgctacagcagcagcagcagcagcagcaacagcagcagttccaggctcagcagagtgccatgcagcagcagttccaagcagtagtgcagcagcagcagcagctccagcagcagcagcagcagcagcagcatctaattaaattgcatcatcaaaatcagcaacagatacagcagcagcaacagcagctgcagcgaatagcacagctgcagctccaacaacagcaacagcagcagcagcagcagcagcagcagcagcagcaggctttgcaggcccagccaccaattcagcagccaccgatgcagcagccacagcctccgccctcccaggctctgccccagcagctgcagcagatgcatcacacacagcaccaccagccgccaccacagccccagcagcctccagttgctcagaaccaaccatcacaactcccgccacagtcgcagacccagcctttggtgtcacaggcgcaagctctccctggacaaatgttgtatacccaaccaccactgaaatttgtccgagctccgatggtggtgcagcagcccccagtgcagccccaggtgcagcagcagcagacagcagtacagacagctcaggctgcccagatggtggctcccggagtccaggtcagccagagcagcctccccatgctgtcctcgccgtcaccgggccagcaggtgcagaccccgcagtcgatgccccctcccccccagccgtccccgcagcccggccagcccagctcacagcccaactccaacgtcagctctggccctgccccatctcccagtagcttcctgcccagcccctcaccgcagccctcccagagcccagtgacggcgcggaccccacagaacttcagtgtcccctcacctggacctttaaacacacctgtgaaccccagctctgtcatgagcccagctggctccagccaggctgaggagcagcagtacctggacaagctgaagcagctgtcgaagtacatcgagcccctgcgccgcatgatcaacaagatcgacaagaacgaagacagaaaaaaggacctgagtaagatgaagagccttctggacattctgacagacccctcgaagcggtgtcccctgaagaccttgcaaaagtgtgagatcgccctggagaaactcaagaatgacatggcggtgcccactcccccaccgcccccggtgccaccgaccaaacagcagtacctatgccagccgctcctggatgccgtcctggccaacatccgctcacctgtcttcaaccattccctgtaccgcacattcgttccagccatgaccgccattcacggcccacccatcacggccccagtggtgtgcacccggaagcgcaggcttgaggatgatgagcggcagagcatccccagtgtgctccagggtgaggtggccaggctggaccccaagttcctggtaaacctggacccttctcactgcagcaacaatggcactgtccacctgatctgcaagctggatgacaaggacctcccaagtgtgccaccactggagctcagtgtgcccgctgactatcctgcccaaagcccgctgtggatagaccggcagtggcagtacgacgccaaccccttcctccagtcggtgcaccgctgcatgacctccaggctgctgcagctcccggacaagcactcggtcaccgccttgctcaacacctgggcccagagcgtccaccaggcctgcctctcagccgcctagccaagactgcagggatggcccgcagcctcatcggggccaaggacacacgcctcctgtcagacacttctaggtgttggcttccttagagagcctggggttaggttagctttcctgcttttatcttctgccttggggacctgccaaacgaaatcccacacctgtacagaactgggataggcgcagtggagcgggttgcttggggggcgttggccgacttcttagagaaggccctccatgtgacttcctcccaggagccagatgcgatcctcaggctgctctcaccgtggcctgtccacggtccaggtccatctcagcagcgtgagggtgcactcagggtgttgttagagcgtctcgtgtgtgctagacgcacccctactcgttcctatagaacacagaggacataggaaacccttaaaacacacatgggattctctggtcacagttttgggttcaggctatgctgctttgggcaggtggagcaccccccgaggaagcctgcaagtccagggcacaggctgccttttggagggagggctggcccataggtgctgctggctccccgccaccagctgggcctcagccctcacggcattcctgctgagcaccgtggggcacccagggagcaggggcgtcagggatcctgctgccggcacccctgtgccgctggcatgagggccgtgtccccactgtgaaggatgaagagcaaggccctcaggacccgtgtcctcagagcaccacacactgagcacccagagacagcgggcctggcagcgggccgggccatgcagggagcgcctccctatgttgcctgccactctgggcaccggccagcaccctctggtgagaagaggtcccccctttttatgtgcactaccccaccatctgtgattataataaatttattattcctgtgtttgtcagttgttc

SEQ ID NO: 323647 - DNA, 2703 bp, Artificial Sequence
  derived and/or modified sequence
acactgaatagggaaagggagagaagcagccggctgtagtgggtttagcagggctgggtgcttcatggtttctcttccagaaaagcgcatcaacggtgaaagaaagtgatgggaggagggtggatgtaagatgagattgggaaggtagttgtttggggtgtgggcggtgggacggaggatctgagggtgaccccccgaaggaatgtggactttgccgaaggatggcaggaagccgctgtcaggaagcgatcgtcgtttctggaggagagcgtgaagagctggggtcagtggccccgctcagaggaactctagcccctcaccaccgactgcttgtttctgttagcagtttttttcatgcgcgtccgtgtgaagagaccaccaaacaggctttgtcgaggatgccatgaggaaagctggtgtggcacacagtaaatccagcaaggatatggagagccatgttttcctgaaggccaagacccgggacgaatacctttctctcgtggccaggctcattatccattttcgagacattcataacaagaaatctcaagcttccgtcagtgatcctatgaatgcactccagagcctgactggcggacctgctgcgggagccgctggaattggcatgcctcctcggggcccgggacagtctctgggcgggatgggtagccttggtgccatgggacagccaatgtctctctcagggcagccgcctcctgggacctcggggatggcccctcacagcatggctgtcgtgtctacggcaactccacagacccagctgcagctccagcaggtggcgctgcagcagcagcagcaacagcagcagttccagcagcagcagcaggcggcgctacagcagcagcagcagcagcagcaacagcagcagttccaggctcagcagagtgccatgcagcagcagttccaagcagtagtgcagcagcagcagcagctccagcagcagcagcagcagcagcagcatctaattaaattgcatcatcaaaatcagcaacagatacagcagcagcaacagcagctgcagcgaatagcacagctgcagctccaacaacagcaacagcagcagcagcagcagcagcagcagcagcagcaggctttgcaggcccagccaccaattcagcagccaccgatgcagcagccacagcctccgccctcccaggctctgccccagcagctgcagcagatgcatcacacacagcaccaccagccgccaccacagccccagcagcctccagttgctcagaaccaaccatcacaactcccgccacagtcgcagacccagcctttggtgtcacaggcgcaagctctccctggacaaatgttgtatacccaaccaccactgaaatttgtccgagctccgatggtggtgcagcagcccccagtgcagccccaggtgcagcagcagcagacagcagtacagacagctcaggctgcccagatggtggctcccggagtccaggtcagccagagcagcctccccatgctgtcctcgccgtcaccgggccagcaggtgcagaccccgcagtcgatgccccctcccccccagccgtccccgcagcccggccagcccagctcacagcccaactccaacgtcagctctggccctgccccatctcccagtagcttcctgcccagcccctcaccgcagccctcccagagcccagtgacggcgcggaccccacagaacttcagtgtcccctcacctggacctttaaacacacctgtgaaccccagctctgtcatgagcccagctggctccagccaggctgaggagcagcagtacctggacaagctgaagcagctgtcgaagtacatcgagcccctgcgccgcatgatcaacaagatcgacaagaacgaagacagaaaaaaggacctgagtaagatgaagagccttctggacattctgacagacccctcgaagcggtgtcccctgaagaccttgcaaaagtgtgagatcgccctggagaaactcaagaatgacatggcggtgcccactcccccaccgcccccggtgccaccgaccaaacagcagtacctatgccagccgctcctggatgccgtcctggccaacatccgctcacctgtcttcaaccattccctgtaccgcacattcgttccagccatgaccgccattcacggcccacccatcacggccccagtggtgtgcacccggaagcgcaggcttgaggatgatgagcggcagagcatccccagtgtgctccagggtgaggtggccaggctggaccccaagttcctggtaaacctggacccttctcactgcagcaacaatggcactgtccacctgatctgcaagctggatgacaaggacctcccaagtgtgccaccactggagctcagtgtgcccgctgactatcctgcccaaagcccgctgtggatagaccggcagtggcagtacgacgccaaccccttcctccagtcggtgcaccgctgcatgacctccaggctgctgcagctcccggacaagcactcggtcaccgccttgctcaacacctgggcccagagcgtccaccaggcctgcctctcagccgcctagccaagactgcagggatggcccgcagcctcatcggggccaaggacacacgcctcctgtcagacacttctaggtgttggcttccttagagagcctggggttaggttagctttcctgcttttatcttctgcctt

SEQ ID NO: 323648 - DNA, 2367 bp, Artificial Sequence
  derived and/or modified sequence
atggacgtgagcggccaggagaccgactggcggagcaccgccttccgtcagaagctcgtttcacagattgaggatgcaatgagaaaggccggagtggcccattcgaagtcaagtaaggacatggaatctcacgtcttcctgaaggctaagacacgcgatgagtatttgagtctggtcgcacgccttattattcatttccgagatatccataataaaaaatcccaggcaagtgtctccgacccaatgaacgccttacagtcgttgacaggggggcctgccgctggcgcagctggcattgggatgcctcctcgcggtccaggacagagcctcgggggtatgggatcactaggcgctatgggacagccaatgagtctgtcgggacagccccctccgggaacctcgggtatggcacctcattccatggccgtagtgtctactgctaccccacagacacagcttcagctccagcaagtcgctctccagcagcagcagcaacagcagcaattccagcagcagcagcaagccgccttacaacaacagcaacagcagcaacagcagcaacaattccaggcccagcagagcgctatgcagcagcaattccaagcagtcgttcagcaacaacaacagttgcagcagcaacagcagcagcagcagcacttaataaagctccaccaccaaaatcaacagcagatacagcagcaacaacaacagctccagcgaattgcacagctacagctacagcaacagcagcagcaacagcagcagcagcagcaacagcaacagcaggccctgcaggcacagccgcctatccagcagcctcccatgcagcaaccccaaccacctccatcccaggcactcccccaacagctgcagcaaatgcatcacacgcagcaccaccaaccaccccctcagccccagcagcctcccgtcgcacagaatcaaccgtcgcagctccccccacagtcccagacacagcctctggtgtctcaagcgcaggcgctgcctggtcagatgctgtatacccagccgccgctcaagttcgtccgagcccccatggttgtgcaacagccccccgttcagccccaggtgcagcaacagcagacagccgttcagactgcgcaagctgcccagatggtggcacctggtgtgcaaatgattaccgaggccctggctcaaggcgggatgcacatccgcgcaaggtttcctcctacgactgccgtgtctgccatcccttcatcttctatccctcttggccgccaaccgatggcccaggtgagccaatcctcccttcccatgctaagctcccctagccctggtcagcaagtgcaaactccccagtccatgcccccgcccccccagccaagcccacagcccggccagcccagtagccaacctaatagcaacgtctctagcggtccagcaccatctcccagctccttcctcccctcccctagtccacagccctcacagtcgcctgtaactgcacgcacaccccaaaacttctccgtgccctctccaggcccattgaacaccccagttaatccctcaagtgtgatgtcacccgcaggtagttcccaggccgaggagcagcaatatcttgacaagttgaaacagctgtccaagtacatcgagccacttagaagaatgattaacaaaatagacaagaacgaggatcggaaaaaggatctaagcaagatgaagtctttactcgacatcctgactgatccctctaaacgctgcccactgaagactctccagaaatgtgagattgccctcgagaagcttaaaaacgacatggctgtgccaaccccaccacctcctccagtgcctcccaccaagcagcaatatctgtgccagcccctccttgatgcagtactcgctaacatccggtcgccagtgttcaatcactctctctacaggaccttcgtgcccgcaatgaccgcgatccatggcccccccattacggccccggtggtatgcaccaggaagaggcgcctagaggacgacgaacggcagtccatccctagtgttctccagggtgaggtcgccaggctggatcctaaatttctggtcaatctggatcctagtcactgcagtaacaatgggactgtgcacctcatctgtaagctggatgacaaggacctgccttcagtccccccactggaactgagcgttcctgctgattaccccgctcagtcaccactctggattgaccggcaatggcagtatgatgcaaatccattcctgcagtctgtccaccgctgcatgacatccagactcctccagctcccagacaagcactcagtgacagccttgttgaatacttgggcacagtctgtccaccaggcatgcttgagtgccgcatag

SEQ ID NO: 323649 - DNA, 2247 bp, Artificial Sequence
  derived and/or modified sequence
atggacgtgagcggccaggagaccgactggcggagcaccgccttccggcagaaactagtgtctcaaatagaagatgccatgaggaaggctggggtggcacactctaaatcgtctaaggacatggagtcacatgtattccttaaagctaaaacccgcgatgaatacctgtcactggtggcccggctgataatccactttagggatattcataacaaaaaatcccaggcaagcgtcagtgatcccatgaatgcactgcaaagtctgacgggcggacccgccgcaggggccgctgggattggcatgcccccaaggggcccagggcagtcactgggcggcatgggcagcctgggtgctatgggtcagcccatgtcgctgagcggccagccccccccaggcacctccgggatggcacctcactccatggcagttgtgagtactgccacaccacagacacagcttcagcttcaacaagttgcacttcagcagcagcaacagcagcagcagtttcagcagcagcagcaggccgccttgcagcagcaacaacagcagcagcagcagcagcagtttcaggcccagcaatcagctatgcaacagcaattccaggctgttgtccaacagcagcagcaattgcagcagcaacagcagcagcagcagcacctgatcaaacttcatcatcaaaatcagcagcagattcaacagcaacaacagcagctccagcggatcgctcagctacagttgcagcagcagcagcagcagcagcaacagcagcagcagcagcagcaacaagccttgcaggctcagcccccaatccagcagcccccaatgcaacagccccaacccccaccatcgcaggcacttcctcagcagctccagcaaatgcatcacactcaacatcaccagccaccccctcagcctcagcagccacctgttgctcaaaatcagccgagtcagctccctccccagtcccaaactcagccgttagtcagccaagcccaagccctccctggacagatgctctacactcagccacctctcaaattcgttcgggcacccatggttgtgcagcagcctccggtgcaacctcaggtgcaacagcagcagactgctgtgcagactgcccaagcggctcaaatggtggcacccggggtgcaagtgtcacagagctctctgcctatgctgtctagtccctcccccgggcagcaggtgcagactccccagagcatgccaccacccccacagccgtcccctcagcccggacagcccagttcccagccaaacagcaacgttagttctggacctgcgccttctccatcaagtttcttgccaagtccatcaccacagccttcgcagtcgccagttacagcacgaactccgcagaacttcagcgtcccttccccgggacccctgaacacgccagtcaacccttcgtccgtgatgtcacccgcgggctcatctcaggccgaagagcagcaatacctggacaaacttaagcagttgtccaagtatattgagcccttgcggaggatgatcaataaaattgataagaacgaagatagaaaaaaggacctgtctaaaatgaagtccctcctggacatccttacagacccctctaagcgatgcccactgaaaaccttacagaaatgtgaaatcgccctcgagaagttgaagaacgatatggctgtcccgacgccaccccctcccccagttccacccactaagcaacagtacctttgtcagccactcctagatgccgtgctcgccaatatacgttcgccggtgttcaatcattccttgtatagaacctttgtgcctgctatgacagctattcacgggcctccgattactgcccccgtagtttgtaccaggaaacggcgcctggaggatgacgagcggcagagcattccctcggtcctacaaggagaggttgccaggctggacccaaagttcctggtaaatttagatccttctcactgctccaataacggcacagtccacctcatttgcaaactcgacgacaaagaccttccctctgtgcctccactcgaactcagcgtgcctgcggattatccagcccagagtcccctttggattgatcggcagtggcagtacgatgccaatccatttctgcagagcgtccaccgatgcatgacttctcgcctcctgcagttacctgataaacatagtgtgacggccttgctgaacacctgggcccaaagcgtacatcaggcctgcctgagcgcggcctag

SEQ ID NO: 323650 - DNA, 2034 bp, Artificial Sequence
  derived and/or modified sequence
atggacgtgagcggccaggagaccgactggcggagcaccgccttccggcagaaactagtttcccaaatcgaggatgcaatgcggaaggccggcgtagcccactcaaagtcgagcaaggacatggagagccacgtctttctgaaggccaaaacgcgagatgagtacctctcattggtagcccgcctcatcatccactttcgcgatatccacaacaagaagtcgcaagctagcgtatccgctcaacttcagctgcagcaggtggctttacagcagcagcagcaacagcagcagtttcagcaacaacagcaggcggccttacaacagcaacagcaacaacagcagcagcagcagtttcaggcgcaacagtcagccatgcagcagcaattccaggccgttgtgcaacagcaacaacaactgcagcagcagcagcagcagcagcaacatctgatcaaactgcaccatcaaaatcagcagcagatccagcaacaacagcagcagcttcagcggatagcgcagctccagctacagcagcagcaacagcagcaacaacaacagcagcagcaacagcaacaggctctccaggcccagccccctatccaacagcctccaatgcagcagccccaacctcctcccagccaagctctgccccagcaattgcagcagatgcatcacacacagcatcaccagcccccgcctcagcctcagcagcctcctgtcgcacagaaccaaccttctcagttgccaccccagtcacagactcagcctctggtgtcccaggcgcaggctctaccagggcagatgctgtacacacagcctcctctgaagtttgtcagagctcctatggtggtgcagcagccacccgtccagccccaggtccaacagcagcagacggctgttcaaaccgcacaagctgctcaaatggtggcccctggtgttcaggtctcgcaatcctccctacccatgcttagcagcccatctccgggccagcaggtgcagaccccacagtctatgcctccacctccgcagccttccccgcagcccggccagccatcctcccagcccaactccaatgtatcctcaggtcccgccccctcacctagctcttttcttccatcacctagcccccagccatcccagtcacccgtcactgcgcggacccctcagaacttcagcgtacctagcccagggcctctgaacaccccggtcaatccatctagtgtgatgtcaccagccggaagttctcaggccgaagaacaacagtacctagataaattgaaacaattatccaagtacattgagcccctgaggcgaatgattaataagatagataaaaacgaggaccggaaaaaggacctgagtaaaatgaagagtctcctagacatcctcacagacccctctaagaggtgcccactcaagactctccaaaagtgcgaaatagccctggagaaactaaagaacgacatggcagtgcccaccccccccccgccacccgtgcctccgactaaacagcagtacctgtgccagccactgctagatgcagtcctcgccaacatccgctcaccggtgttcaatcacagcttgtaccgaactttcgtgcctgccatgactgctattcacggtcctccgatcacagcccctgtggtgtgtaccaggaagaggcggcttgaggacgacgagagacagagtatacccagcgtattacagggcgaggtagcccggctggatccaaagttccttgtaaaccttgatccaagccattgctctaacaatggtacagtgcacctcatctgtaaactcgatgacaaagacctgcccagtgtgcctccattggaactgtctgtgcccgctgattaccctgcccaaagccctctgtggatcgaccgccaatggcaatacgacgctaacccatttttgcagagtgtacacaggtgtatgacaagccgcctcctccagctacctgacaagcattccgtcacagctctgctcaacacatgggcccaatccgtccaccaagcatgtcttagcgcggcctag

SEQ ID NO: 323651 - DNA, 2169 bp, Artificial Sequence
  derived and/or modified sequence
atgcggaaggccggcgtggcccacagcaagagcagcaaggacatggagtcccatgttttcttgaaagcgaaaactcgtgacgagtatctaagcttagtagctagacttatcatccacttcagagatattcacaataaaaaatcccaggcctctgtctcagacccaatgaacgctctgcaatctctgaccggagggccagcagccggagccgccggcattggcatgcctccacggggacccggccaaagtctaggtggcatgggctctctaggggcaatgggccaacccatgtcattaagcggccagccgccccccggtacctccgggatggctccacactccatggccgtggtgagcacagctacacctcaaacacaactacaattacagcaagtcgccctgcagcagcagcaacaacagcagcagttccagcagcagcagcaggctgcgttgcaacaacagcagcagcagcagcagcaacaacagttccaggcccagcagagcgcaatgcaacagcagttccaggctgtggttcagcagcaacagcagctgcagcagcagcagcagcagcaacagcatcttatcaagctgcaccaccagaatcaacagcagatacagcagcaacagcaacagctccagcgcatagcccagttgcagctccagcagcagcagcagcagcagcagcagcaacagcagcaacagcagcaggctctgcaagctcagcccccaattcagcagccacctatgcaacaaccacaaccgccaccatcacaagcccttccgcagcagctacagcaaatgcaccatacccaacatcaccagccccctcctcagccacagcaacccccagttgcccagaaccagccttctcagttgccccctcagtcacagacacaacccctggtgtcacaggcacaggcactgcctggccagatgctgtacacccagcctccacttaagtttgtacgcgccccaatggttgtgcagcagccccccgtgcagccccaagtccagcagcaacagacagcggtccagacggcccaagctgcccagatggtggctcctggcgtgcaagtgagtcagtcctctttaccaatgctgtctagtcctagtcctggacagcaggtgcagaccccccagtctatgccacccccaccccagccaagtccacagccgggccaaccctccagccagcccaatagtaacgtctctagcggccccgctccatccccgtcctcattcctgcccagtccttccccacagcccagtcagagccccgtgacagcacgaacacctcagaatttttcagtgcccagccctggacctctaaacacaccggtgaatccctccagtgtgatgagccctgccggatcgtcacaggccgaggagcagcaatacctcgacaagctgaagcagctgtccaagtatatagagcctctgaggcgcatgattaataagatcgataagaatgaggaccgcaagaaagacctgagtaagatgaaatcgttgctggacatcttgaccgatccaagtaagcggtgtccactcaagaccctacagaaatgtgaaatagctctagagaagctgaagaacgatatggcggtacctactccccctcccccacccgtccctccaacaaaacaacaatacttatgtcaacccttgctggatgccgtcctggctaacatcagatccccagtgttcaaccacagcctatatagaaccttcgtgcctgccatgacagccatacacgggccgccaattacagcccctgttgtgtgcacccggaagcgacgcctggaagacgacgagcggcagtcgataccatccgtcctacaaggcgaggtggccaggttagaccccaagtttctggtcaatctggacccttcccactgcagtaacaacggcactgtgcatctcatatgtaagctggacgacaaggacctcccatccgtgccaccgctggaactgagtgttcccgctgactaccccgcacaatcacctctgtggatcgaccggcagtggcaatatgatgccaacccttttctgcagtctgttcatcgctgtatgacatctcgcctgctgcagcttccagataaacactcagtcaccgcgcttctaaacacatgggcgcagtctgtacatcaggcttgtctctccgctgcctag

SEQ ID NO: 323652 - DNA, 1914 bp, Artificial Sequence
  derived and/or modified sequence
atggagagccacgtgttcctgaaggccaagacccgggacgagtacctgtctctggtagcacggctgattatacacttccgcgatatccacaacaagaagtctcaggcatccgttagcgcccagctacagttacagcaagtagctctgcagcagcagcaacagcagcagcagttccaacaacagcagcaggcggccctgcagcagcaacaacagcagcagcaacaacagcaattccaggcacaacaaagtgctatgcagcagcagttccaggcggtggttcagcagcagcaacaactgcagcaacagcaacaacagcaacaacacctgataaagctgcatcatcaaaaccagcagcaaatccagcagcagcaacaacagctccagcgtattgctcagcttcagttgcagcaacagcaacagcagcagcagcaacaacagcagcagcagcagcaggcactgcaagctcagccccccatccagcaaccccccatgcagcagccacagccccccccctcgcaggcactcccccagcagctgcaacagatgcaccacacacagcaccaccagcctccaccccagccccaacagcctccggtggcgcagaatcagccctctcagctccccccacagtctcaaacgcaacccctagtgtcacaggctcaggccctaccaggacagatgctctacacccagccccctctgaaatttgtccgagcgcccatggtagtgcagcagcccccagttcagccacaagtgcagcagcagcagaccgctgtccagacagcccaggcggctcagatggtggctccgggagtgcaggtctcacagagttccctgcccatgttgagctccccctcccccgggcagcaggtgcagactcctcagtcaatgccacctccacctcagccctcaccacagcccggccagcctagctcacaacctaatagcaatgtgagctcagggccagcaccctcaccttcatccttcttgccatcaccgtcacctcagccctcccaatcacctgtgacagcccggaccccccagaacttttcagtgccctctcccggccccctgaatacccccgtgaaccccagctccgttatgtcaccggccggctcttctcaggcggaggagcagcagtacctcgacaagctgaaacaactctctaagtacatcgagccccttcggcggatgattaataagatcgataagaacgaagataggaagaaggatcttagcaagatgaaatccctcctggacattttgactgacccatccaagcgttgccccctgaagactctgcagaaatgcgaaattgccctcgagaagctcaagaacgacatggcggtaccaacgccaccaccaccccctgtgcctcccactaaacagcagtacttgtgccagcctttgctggatgcggtgctggcgaatattcgctctccagtcttcaaccatagcctctatcgcacatttgttccagccatgacagctatacacggaccacctataactgcacccgttgtgtgtacaagaaaacggcgccttgaagacgatgagaggcagagcattccatccgtgctgcagggggaagttgcccggctagaccccaaatttctagtgaatctcgaccctagtcactgctccaacaatggcactgttcacctgatctgcaaattagatgataaggatttaccatctgtgcctccacttgagctgagcgtgccggctgattatcccgcccaaagcccattatggatagacagacagtggcagtatgatgctaacccctttctccagagtgttcaccgttgtatgacctcccgcctgctgcagctgcctgataagcactccgtgacagccctcctgaatacatgggcccagtcagtgcaccaggcctgcctgtcagccgcctag

SEQ ID NO: 323653 - DNA, 2169 bp, Artificial Sequence
  derived and/or modified sequence
atgcggaaggccggcgtggcccacagcaagagcagcaaggacatggagtcccatgtttttctgaaagcaaaaaccagggacgaatatctttctcttgtggcaaggctgatcattcactttcgtgacatccacaataagaaatctcaggcatcagtctcagacccgatgaacgccctccagtccctgacggggggtcccgctgctggtgcagcaggcattggcatgccccccaggggacccggccaatccttaggtggaatggggtcccttggcgcgatggggcagcccatgagtctgagtggccaacccccaccgggcacatctggcatggctccccattcaatggcggtggttagcacagcgacaccacagactcaactgcagctgcagcaggtggcgctccagcagcagcaacagcaacagcagtttcagcagcagcaacaggctgcactccagcagcagcaacagcagcagcaacagcagcagttccaggcacagcagtccgccatgcagcagcaattccaggcggtggttcagcaacaacaacaactgcagcagcagcaacagcagcagcagcatcttataaagctccatcatcagaaccaacagcagattcagcagcagcagcagcaattgcaaagaatagcccaactgcagcttcaacagcagcagcagcagcagcagcagcagcaacagcagcagcaacaggctctccaggctcagccaccaattcagcagccaccaatgcagcagccccagcctcccccttctcaggccttgccacaacaactgcagcagatgcatcatacacagcatcaccagccccctccacagccacagcaacccccggtagcacagaaccaaccatcgcaattgcctccacaatcacagacacagccacttgttagccaggctcaggctctccctggtcagatgttatacacacagccgcccctcaagtttgtacgagccccaatggtggtccagcagcctcccgtccagccacaggtgcaacagcagcagaccgctgtccagactgcccaagctgcacagatggtggcaccgggggtgcaggtatcacagtcctctctgccaatgctgtccagcccatcgccaggacagcaggttcaaacaccacagtcaatgccccctcccccacagcccagccctcagcccggccagccatctagtcagcccaactctaatgtgtcctccggcccagcaccatcaccatccagtttccttccatcacccagcccccagcccagtcaaagcccggtgaccgcccgcaccccacagaactttagcgtgccctccccgggaccactcaatacaccagtgaatcctagttctgttatgtcgcccgccggcagtagccaggctgaagaacagcagtatcttgataaactcaagcagttgtccaagtacattgagcctttacgccgcatgatcaacaaaattgacaaaaatgaagacaggaagaaagacctcagcaagatgaaatctctgctagacatcctcaccgacccctcaaaaaggtgccctctcaaaacccttcagaagtgcgaaatcgctctggaaaagttaaagaacgacatggccgtgcccacccctccacctcccccagtcccgccaaccaagcagcaatatctctgtcagccattactcgatgctgtcctggctaatatcagatcaccagtgttcaaccactcactttaccgaacattcgttccagctatgacagcaatccatggccctcccattaccgccccagtcgtttgtaccaggaagaggaggctcgaggacgatgagcgacagtcgatccctagcgtcctgcagggggaggtggctaggttggaccctaaatttctggtgaatctggatcccagccactgcagtaacaacgggacagtgcatttgatatgtaagctcgacgacaaggatctcccttctgtgccaccccttgaattgtctgtgccagccgattatcctgcacagagcccactgtggattgaccgtcagtggcagtatgacgccaaccccttcctgcaatcagtgcatcggtgcatgacgtccagacttctgcagctcccagacaagcacagtgtgacagccctgttaaacacctgggcccagtcagttcatcaggcatgcctttcagccgcctag

SEQ ID NO: 323654 - DNA, 2367 bp, Artificial Sequence
  derived and/or modified sequence
atggatgtgtccgggcaggaaaccgactggcgatctacagctttcaggcagaagctggtttcccagatagaagacgcgatgcgtaaagccggtgttgcacactcaaaaagttctaaggacatggaatcccacgtctttctgaaggctaaaacacgggatgaatatctgtctctggtggccaggctaattatccattttcgtgatatccacaacaagaaaagccaggcttccgtgtcagaccccatgaatgcactacagtctttaacaggcggtccagcagctggtgcggcaggcatcgggatgccgcctcggggaccgggacagtcacttggagggatgggttccctgggcgctatgggacaaccaatgtctctctcaggccagcctccacctggaacctccggcatggcaccccacagcatggccgtagtcagtactgccacccctcaaacacagctccaattgcagcaggtcgctttacagcagcagcagcagcagcaacaatttcagcagcagcaacaagctgcccttcagcagcagcagcagcagcagcagcagcagcagttccaagcacagcagagcgctatgcagcagcagtttcaggccgtagtgcagcagcagcagcagttgcagcaacagcagcagcagcagcagcatttgatcaagcttcaccaccagaatcagcagcagatccagcagcaacagcagcagttgcagcgcatcgcacagctgcagctacagcagcaacagcagcagcagcagcaacagcaacagcagcagcagcaagcactccaggcccaacctcctattcagcaacctcccatgcagcaaccacagccacccccaagccaggcattaccacaacagttgcagcagatgcaccacactcagcatcaccaacctcccccacagcctcagcagcctcctgtggctcaaaatcagccatcacagttacctcctcagagtcaaacgcaaccattggtctcacaagcacaggcactgccgggtcagatgctgtatactcagccaccattgaagttcgttcgagctcctatggtcgtgcaacagcccccagtacagccgcaagtgcagcagcagcagaccgccgtccagaccgcacaggccgcacagatggtcgccccaggagtgcagatgatcacggaggctctggcccagggcggaatgcacattagggcacgcttcccccctacaaccgcagtgtcggcaattcctagttccagcatacctctgggacgccagccgatggcccaggtttcccagagttccctgccaatgttaagttcaccatcccccggtcaacaggtgcagacgccacagtcaatgcccccacccccacagccctcgcctcagcccggacagccctcctcacagccgaatagtaatgtctccagtggccctgctccttcgccaagtagcttcctgccatccccttctccccagcccagccaatctcccgtgaccgcaagaaccccccagaacttcagtgtgccctcacctggccctctgaacacacctgtgaatccatccagcgtaatgtcaccagccggtagttcccaggccgaagagcagcagtatctcgacaaacttaaacagctgagtaaatatatagaaccactccggaggatgatcaataaaattgacaagaatgaggatcggaaaaaagacctcagcaaaatgaagtccctgctggacatcctgacagacccctcaaagcggtgtccactcaagacactgcagaagtgcgaaattgcgctcgagaaactgaaaaatgacatggcggtgcccaccccacccccaccacccgtccctcctaccaagcaacagtacctgtgccagccgctcctcgatgccgtgctggctaacattagaagcccagtgttcaatcattctctctacagaacgttcgtgccagctatgaccgccattcacggccctcctataaccgcaccagtcgtctgcaccagaaagcgaaggttggaggatgacgagagacagtcgatcccttctgttctgcaaggggaggttgctcgcttggacccaaagttcctggtgaatttagatccctctcactgtagtaacaacggaaccgtgcatctaatctgcaagctggatgacaaggatctccccagtgtgcctccccttgaactctcagtacccgcagattacccagctcaatctcccctgtggattgacaggcagtggcagtatgatgctaatcctttccttcagtccgtacacagatgcatgaccagtaggctgctgcagttgcccgataaacattccgtcactgccctgctgaatacctgggctcaatcggttcaccaggcttgtcttagcgccgcttag

SEQ ID NO: 323655 - DNA, 2247 bp, Artificial Sequence
  derived and/or modified sequence
atggatgtaagcggacaggagacagactggagaagcacggcctttagacagaagcttgtttctcaaattgaggatgcgatgaggaaagctggcgtggcccactcaaaaagctctaaagacatggaaagtcacgtctttctgaaagccaagacacgcgacgaatatctgtcccttgtggctcgcctgatcattcattttagggacattcataacaagaaaagtcaggcgagtgtctctgatcccatgaatgcgctccagtcgctgactggaggtcccgctgcgggtgccgcagggatcgggatgccacccagggggccagggcagtcattaggaggcatgggcagcctgggtgccatgggacaacctatgtctctttctggccagcctcccccagggacctccgggatggcccctcactctatggcggtggtttccaccgcaaccccacagacccagttgcagctccaacaagtcgctctgcagcaacagcagcagcagcagcagttccaacagcagcaacaggccgcattacagcagcagcagcagcagcagcagcaacagcagttccaagcgcaacagtctgctatgcagcagcaatttcaagcagtggtgcagcagcaacaacagctgcagcaacagcagcaacaacaacagcaccttattaagctgcaccaccagaaccagcagcagatacagcaacagcagcagcaactccaaagaattgcccagctccagcttcagcagcaacaacagcaacagcagcagcaacagcagcagcagcaacaggcactccaagcacagccgcctatacaacaaccccctatgcaacagccacagcctccaccctctcaagctctgcctcagcagttacagcagatgcatcatacacagcatcaccaacctcctccacagcctcagcagccacccgtggctcagaaccagccgagccagcttccaccccagtctcagacacaacctcttgtaagtcaggcacaagctctgcctggccaaatgctgtatactcagccgcctctgaagtttgtccgtgccccaatggtggtgcagcagccacctgtgcaaccccaggtgcagcagcagcagacagccgtccagaccgcacaagccgctcagatggtcgcccctggcgtccaggtgtcacaatcatctctaccaatgctctcatctcccagtcccggtcagcaggtacagacgcctcaatctatgcccccaccacctcagccctccccccaacctggtcagccatccagccaacccaattcaaatgtgagcagtggtccggctccatcaccatcctccttccttcctagtccgagtccccagccatctcagtctccagtgacggcaaggacccctcaaaatttctccgtaccatctcccggaccactcaatacaccagtgaacccaagttcagttatgagccctgctgggtctagtcaggcagaggaacagcagtatttggataagctgaagcagctgagtaagtatatagagcccttgcggaggatgattaacaagatagataagaacgaggaccgcaagaaagacctgtctaaaatgaagtccctcttagacatcttgacagaccctagtaagaggtgcccactgaaaactctccagaagtgtgaaatcgcccttgagaagctgaagaacgacatggccgtgccaaccccccctccacctcctgtgccacccaccaagcagcaatatctgtgccagccacttttggacgcagtcctggccaatataaggtccccggttttcaaccactccctttatagaacgttcgtgcctgctatgaccgccatccacggacccccaattactgcccctgtcgtttgtaccaggaaaaggagactagaggacgacgaacggcaaagcatcccatctgttcttcaaggagaagtggccagactcgatccaaaattcttagtgaacctcgacccgtcccattgttccaataatgggacagtacaccttatctgtaaattagatgacaaggaccttccttctgtgcctccactagaattgagtgttccggctgactatccagcccagtctcctctatggattgaccgtcaatggcagtacgacgccaatccttttttgcagtctgtccatcggtgcatgaccagccggcttctacagctgccggacaaacatagcgtaacagctctgctgaatacatgggcacaatctgtccatcaagcctgtctgtccgctgcctag

SEQ ID NO: 323656 - DNA, 2034 bp, Artificial Sequence
  derived and/or modified sequence
atggatgtttccggccaggagaccgattggcggagcactgctttcagacagaaactggtctctcagatagaagatgcaatgcgtaaagcaggtgtcgcgcactccaaatctagcaaggacatggagtctcacgttttcctaaaggctaagacacgggacgaatacttatcactcgtggcgagactcattatccacttccgcgacattcataataaaaaatcgcaggctagcgtctcggcccagcttcagctacaacaggtggccctgcagcaacagcagcagcagcaacagtttcagcagcagcagcaggccgctctgcaacagcagcagcaacagcagcaacagcagcaattccaggctcaacaatctgcaatgcagcaacaatttcaggcagtcgtccagcagcagcaacagctgcagcaacagcagcaacagcaacagcacctgataaaactacatcatcagaaccaacagcaaatccagcaacaacaacagcaactgcagagaatcgcccagctgcagctgcagcagcaacaacagcaacagcagcagcagcagcagcagcagcaacaggcgttacaggcccagccccctatccaacagccccctatgcagcagccccaaccaccaccatcccaggctctgccacagcagctccaacagatgcaccatacccagcatcatcagccacctcctcagccccagcaacctcccgtggcccaaaatcagccctctcaactgccccctcagagtcaaacacaaccgctggtctcccaggcccaagctctgccgggacaaatgctgtatacccagcctccgctgaaatttgtcagggcaccaatggtcgtgcaacagccgccagttcaaccccaagtccagcagcagcagactgcagtgcagactgcgcaagcagcgcagatggtcgcgccaggggtgcaggtttctcagtcctctcttccaatgctttcttctccgtcaccaggacagcaggttcaaacacctcagagcatgccgccacccccacagccctcccctcagcccggacagccctcgtcccagcctaattcaaacgttagttcaggacctgcacccagtccatcaagcttcctacctagtccttcgccccagccgtcccagagtcccgtgacagccaggactcctcaaaacttctcggtcccttcacctggaccactgaacactccagtgaatcccagctccgttatgagccccgctggcagcagccaggctgaagaacagcagtatctggacaaactcaaacaactctcaaagtatattgagccacttcgtcgaatgataaacaaaattgataagaatgaggaccgcaagaaggatttgtccaaaatgaaaagcctgctggatattctgaccgatcccagtaaacgatgtcctctgaagacactacagaaatgcgaaatagcacttgagaaactcaaaaacgacatggccgtgccaaccccacctcccccacctgttccgcctactaagcagcaatatctgtgtcaaccattgctggacgcagtgctggccaatatccggagtcccgtttttaatcactcgctctacaggactttcgtgcccgctatgactgccatccacggacccccaatcaccgccccagttgtttgcacaaggaagaggcgtctggaagatgacgaacggcagagtatcccttccgtgctgcagggggaagtggccaggctagatccaaagttccttgtcaacttggatccctcacactgttcgaacaatgggaccgtgcatctcatatgtaagctggatgacaaagatttgcccagtgtgcctcccctcgagctgtcggtgcccgcagactatccggcacagtctcctctgtggatcgaccggcagtggcagtacgacgctaaccccttccttcaatccgtgcatcgctgcatgacaagccggctgctgcagctgcccgacaagcacagtgttacagcgttgctgaacacctgggcacagtccgtgcaccaggcctgtttaagtgctgcctag

SEQ ID NO: 323657 - DNA, 2169 bp, Artificial Sequence
  derived and/or modified sequence
atgcgaaaagccggtgttgcacacagtaagtcttcgaaggacatggaaagccatgtttttttgaaggcaaagactagggacgagtacctctcactggtggccagactgatcattcattttcgggatatacacaataagaaatctcaggcaagcgtgtccgatcccatgaacgctttgcagtctttgacaggtggacccgcagccggagccgctggaatcgggatgccacccaggggacccggtcaaagtctgggtggaatgggcagtttaggagccatgggccagcctatgtccctctccggtcagccacctcccggtacatccggaatggctccccattctatggccgtggtgtctactgcgacgccccagactcaactgcagctgcaacaggtggcacttcagcagcagcagcaacagcaacagtttcagcagcaacagcaagccgctcttcagcaacagcaacaacaacagcaacaacaacagttccaggcacagcagagcgctatgcagcagcagtttcaagccgtagtccagcagcagcagcagttacagcagcaacagcaacagcaacagcacctaatcaagttgcaccaccagaaccagcaacagatccaacaacagcagcagcaactgcagcggattgcccagttacagctgcaacagcaacagcagcagcagcagcaacagcagcagcagcagcagcaagctcttcaggcccagcccccaatacagcaaccgcctatgcagcaaccacagcctcccccaagccaggcgctgccccagcagctgcagcagatgcaccatacacagcaccaccaacccccaccccagccacagcagccacccgtggcccaaaatcagcccagtcagctgcctcctcaaagtcagactcagccattggtatcccaggcacaggcacttcctggccaaatgttgtacacacaaccccctctcaaattcgtaagggcccctatggtagtgcagcagccccctgtacaacctcaggttcagcaacagcagactgctgtgcagacagcacaggccgctcaaatggtagcccctggagtgcaggttagccagtctagtctgcctatgctatctagcccatctcctgggcaacaggttcagaccccacagtccatgccaccaccccctcagccaagccctcagcctggacagcctagctcccaaccaaatagcaacgtgagttcaggaccagctccgtcacccagcagttttctgcccagtccaagcccccaaccctcacagtcacccgtaacggcgcgtacgccccagaatttctccgttcccagtccaggtcccctgaacacgcctgtgaacccttctagcgtgatgagccccgctggcagctcccaggcagaggagcaacagtacctcgacaaactaaaacaactgagcaaatatatcgagccactaaggcgaatgataaataagatcgacaaaaatgaggaccgtaagaaggacctcagcaaaatgaagagtcttctcgacatcttgaccgatcctagcaagaggtgccctctcaagaccttgcagaaatgtgaaattgcgttggagaagctgaagaatgacatggctgtccccacccccccacccccaccagtaccacccaccaaacagcaatatctctgtcagcccctcctggacgctgttcttgcaaacattcgtagcccagttttcaatcactcactgtacaggactttcgtgcccgctatgacagctattcatggccctccaattaccgcacctgtcgtctgcacaaggaaacgtaggcttgaggacgacgagcgacagtctattccatccgtcctgcaaggggaagttgctaggcttgaccccaagttcctcgtaaacttggacccttctcattgcagtaataatggtactgtacacctcatttgcaagctggatgacaaagatctaccctcagtgcccccactcgaactgagcgttccagccgactacccagctcagtctcccctgtggattgatcggcagtggcagtacgatgctaatccatttttgcagtcggtccatcgatgcatgacgtctcggttgctccagttacccgacaagcatagcgtaacagccctgcttaacacctgggcacagtctgtccatcaggcgtgtctgagtgccgcttag

SEQ ID NO: 323658 - DNA, 1914 bp, Artificial Sequence
  derived and/or modified sequence
atggagagccatgtttttttaaaggctaagaccagggatgagtatctgagtctcgtcgctcgcctgattatccatttccgggatatacacaataaaaaatcccaggcaagcgtctccgcccagcttcagcttcagcaggtcgctctgcagcagcaacaacagcagcaacagtttcaacagcagcagcaggcagctttacagcaacaacagcagcagcagcagcagcagcagtttcaggcccagcagtccgccatgcaacaacagttccaagcagtggtccaacagcagcaacagttgcaacagcagcagcagcaacagcagcatctgatcaagctgcatcaccaaaatcagcaacagattcagcaacagcagcagcagcttcagcgcatagcccaacttcagctgcagcagcaacagcagcagcagcagcagcaacaacaacaacaacagcaggccctgcaggcccagcctccaattcagcagccgcctatgcagcagccacaaccaccaccaagccaggccctgccacagcagctgcaacaaatgcatcacacacaacatcatcagcctcctccacaaccgcagcagcctcctgtggcccagaatcagccctcacagctaccgcctcagtcccaaacccagccactagtttcccaggctcaggctctgccaggacagatgctctatacgcagccacccttaaaatttgtaagggcaccaatggtggtccagcaaccacctgtgcagccccaagtccagcagcaacaaacagctgttcagaccgctcaggccgcacagatggtggctccgggagtgcaagtctcccagagctccctcccaatgctgagctccccctctccagggcagcaagtccaaactccccaatctatgcctccgcctccacagcctagcccacagcctgggcagccctcctctcagcctaacagtaatgtctcctctgggccagcgcctagcccaagctcttttctgccaagccccagtccccagcccagccagtcgccagtcaccgcacgcactccacaaaattttagcgtgccctctcccggaccgctgaatacccccgtgaacccatctagtgtgatgagcccagccggatcaagccaggccgaggagcagcaatacctggataagcttaagcagctttctaaatatattgagcctttgcggcgaatgattaataagatcgacaaaaacgaggatcggaagaaagacctgagcaagatgaagagcttgctggacatactcacagatcccagtaaaagatgtccacttaagacactacagaaatgcgagatcgctcttgagaaactcaagaatgacatggctgtgcctactccgccacccccacctgtacctccgaccaagcaacagtatctttgccagcctctgttggatgctgttctggccaatataagatcgcctgtgttcaatcactcactgtacagaacatttgtaccagcaatgaccgccatccatggaccaccgattactgccccagtggtctgtacccgcaagcggcgactcgaagacgatgagagacaaagtatccccagtgtacttcagggcgaggtcgcacggctggatcccaagttcctggtcaacttggacccatcgcactgctccaataacggcaccgtgcatctgatctgtaagctggacgacaaggacttgccatccgtcccgccactggagctcagtgttccagcagactaccctgcccagagtcccctgtggattgatagacagtggcaatatgacgcgaacccatttctccagtccgtacaccggtgcatgacttcccgcctcctgcagctgcccgacaagcacagcgttactgctctgctgaatacctgggcccagagtgtgcatcaggcttgtttaagcgccgcatag

SEQ ID NO: 323659 - DNA, 2169 bp, Artificial Sequence
  derived and/or modified sequence
atgaggaaagcgggtgtggcccacagtaagtcttctaaggatatggaatcccacgtgttcctcaaggcaaagactcgcgatgagtacctgtccttggtagctcggctcataatccacttcagagacatccacaataaaaaaagccaggcttctgtgtccgaccccatgaacgcccttcagtctcttaccgggggacccgctgcgggagccgctggcattggtatgccccctaggggccctggccagtccttgggcggtatggggagcttgggagcaatgggccagccaatgagcttatctggccagccacctccaggcacgagcggaatggcaccacattcaatggctgtagtgtcaacagctactccacagactcaactgcagctccagcaggtcgcgctgcagcagcagcagcagcaacagcaatttcaacagcaacaacaggctgcccttcagcaacagcagcagcaacaacagcagcagcagtttcaggctcagcagagcgccatgcagcagcaattccaagccgtagtacaacagcaacagcaattgcaacagcagcagcagcagcaacagcacctcataaagctccatcaccagaaccagcagcagatccagcagcagcagcaacaactgcagcgtattgctcagctacaacttcagcagcagcagcagcagcaacagcaacagcagcaacagcagcagcaggcactacaagcccagcccccaatccagcaaccccctatgcagcagccacagcccccaccctcacaggcactgcctcagcaactgcagcagatgcaccacacccagcaccatcagcccccacctcagccccagcaaccacctgttgcccagaatcagccctctcagctgccacctcagagccagacacagcctctggtttcacaggcccaggccttgcccggtcagatgctctatacccagcctcctcttaaattcgtccgggctcccatggtggtgcaacaacccccagtacaaccacaggtccagcagcagcaaacggcagtacagaccgctcaggcagcccaaatggttgcaccaggggtgcaggttagtcaatcgagcctgcctatgctgagtagcccatcccccggtcagcaggtccagaccccacagtccatgccacctcctccacagccatctccacagccagggcagccttctagccaacccaacagtaatgtctcaagtgggccagccccttccccctcgagctttctccccagtcccagcccccagccctctcagtcacccgtcacggccaggacacctcagaatttctctgtcccatctcctggtccgctgaacacgcccgtcaacccctccagcgtgatgtcaccagcgggttccagtcaggcagaagaacagcagtacctcgacaagttgaaacagctctccaagtatattgaacctcttcggaggatgatcaacaagatagataagaatgaggaccgcaagaaggacttaagcaaaatgaaatctctactagacatcctaacagacccgtctaaaagatgtcccctcaagacattacagaagtgtgaaatcgcgctcgagaagttgaaaaatgacatggccgtcccaacacccccaccaccacctgttcccccaacaaagcagcagtatttgtgccagccactcctggacgctgtgttggcaaacatccggagccctgtctttaaccattccctttaccgcacctttgttcccgcaatgactgccatacacggccctcccattactgctccagtggtgtgcactagaaaacggcgattggaagatgacgaacgacaatctatcccctcagttttgcaaggggaggtggctagactggatccaaagtttctcgtcaacctcgatccttcgcattgtagcaataacggtaccgtgcacttgatctgcaagttagacgacaaggacctgccctctgtgccgcctcttgagctgtctgtgccagcagattatcccgctcagagccccctctggattgataggcaatggcagtacgacgccaatccctttctgcagtccgtccatagatgtatgacatcacggttactgcagttaccagataagcattccgtgacagctctgcttaatacatgggcacagtctgtacaccaggcttgcctcagcgctgcctag

SEQ ID NO: 323660 - DNA, 2367 bp, Artificial Sequence
  derived and/or modified sequence
atggacgtgagcggccaggagaccgactggagaagcaccgccttcagacagaagctggtgagccagatcgaggacgccatgagaaaggccggcgtggcccacagcaagagcagcaaggacatggagagccacgtgttcctgaaggccaagaccagagacgagtacctgagcctggtggccagactgatcatccacttcagagacatccacaacaagaagagccaggccagcgtgagcgaccccatgaacgccctgcagagcctgaccggcggccccgccgccggcgccgccggcatcggcatgccccccagaggccccggccagagcctgggcggcatgggcagcctgggcgccatgggccagcccatgagcctgagcggccagcccccccccggcaccagcggcatggccccccacagcatggccgtggtgagcaccgccaccccccagacccagctgcagctgcagcaggtggccctgcagcagcagcagcagcagcagcagttccagcagcagcagcaggccgccctgcagcagcagcagcagcagcagcagcagcagcagttccaggcccagcagagcgccatgcagcagcagttccaggccgtggtgcagcagcagcagcagctgcagcagcagcagcagcagcagcagcacctgatcaagctgcaccaccagaaccagcagcagatccagcagcagcagcagcagctgcagagaatcgcccagctgcagctgcagcagcagcagcagcagcagcagcagcagcagcagcagcagcagcaggccctgcaggcccagccccccatccagcagccccccatgcagcagccccagcccccccccagccaggccctgccccagcagctgcagcagatgcaccacacccagcaccaccagccccccccccagccccagcagccccccgtggcccagaaccagcccagccagctgcccccccagagccagacccagcccctggtgagccaggcccaggccctgcccggccagatgctgtacacccagccccccctgaagttcgtgagagcccccatggtggtgcagcagccccccgtgcagccccaggtgcagcagcagcagaccgccgtgcagaccgcccaggccgcccagatggtggcccccggcgtgcagatgatcaccgaggccctggcccagggcggcatgcacatcagagccagattcccccccaccaccgccgtgagcgccatccccagcagcagcatccccctgggcagacagcccatggcccaggtgagccagagcagcctgcccatgctgagcagccccagccccggccagcaggtgcagaccccccagagcatgcccccccccccccagcccagcccccagcccggccagcccagcagccagcccaacagcaacgtgagcagcggccccgcccccagccccagcagcttcctgcccagccccagcccccagcccagccagagccccgtgaccgccagaaccccccagaacttcagcgtgcccagccccggccccctgaacacccccgtgaaccccagcagcgtgatgagccccgccggcagcagccaggccgaggagcagcagtacctggacaagctgaagcagctgagcaagtacatcgagcccctgagaagaatgatcaacaagatcgacaagaacgaggacagaaagaaggacctgagcaagatgaagagcctgctggacatcctgaccgaccccagcaagagatgccccctgaagaccctgcagaagtgcgagatcgccctggagaagctgaagaacgacatggccgtgcccacccccccccccccccccgtgccccccaccaagcagcagtacctgtgccagcccctgctggacgccgtgctggccaacatcagaagccccgtgttcaaccacagcctgtacagaaccttcgtgcccgccatgaccgccatccacggcccccccatcaccgcccccgtggtgtgcaccagaaagagaagactggaggacgacgagagacagagcatccccagcgtgctgcagggcgaggtggccagactggaccccaagttcctggtgaacctggaccccagccactgcagcaacaacggcaccgtgcacctgatctgcaagctggacgacaaggacctgcccagcgtgccccccctggagctgagcgtgcccgccgactaccccgcccagagccccctgtggatcgacagacagtggcagtacgacgccaaccccttcctgcagagcgtgcacagatgcatgaccagcagactgctgcagctgcccgacaagcacagcgtgaccgccctgctgaacacctgggcccagagcgtgcaccaggcctgcctgagcgccgcctag

SEQ ID NO: 323661 - DNA, 2247 bp, Artificial Sequence
  derived and/or modified sequence
atggacgtgagcggccaggagaccgactggagaagcaccgccttcagacagaagctggtgagccagatcgaggacgccatgagaaaggccggcgtggcccacagcaagagcagcaaggacatggagagccacgtgttcctgaaggccaagaccagagacgagtacctgagcctggtggccagactgatcatccacttcagagacatccacaacaagaagagccaggccagcgtgagcgaccccatgaacgccctgcagagcctgaccggcggccccgccgccggcgccgccggcatcggcatgccccccagaggccccggccagagcctgggcggcatgggcagcctgggcgccatgggccagcccatgagcctgagcggccagcccccccccggcaccagcggcatggccccccacagcatggccgtggtgagcaccgccaccccccagacccagctgcagctgcagcaggtggccctgcagcagcagcagcagcagcagcagttccagcagcagcagcaggccgccctgcagcagcagcagcagcagcagcagcagcagcagttccaggcccagcagagcgccatgcagcagcagttccaggccgtggtgcagcagcagcagcagctgcagcagcagcagcagcagcagcagcacctgatcaagctgcaccaccagaaccagcagcagatccagcagcagcagcagcagctgcagagaatcgcccagctgcagctgcagcagcagcagcagcagcagcagcagcagcagcagcagcagcagcaggccctgcaggcccagccccccatccagcagccccccatgcagcagccccagcccccccccagccaggccctgccccagcagctgcagcagatgcaccacacccagcaccaccagccccccccccagccccagcagccccccgtggcccagaaccagcccagccagctgcccccccagagccagacccagcccctggtgagccaggcccaggccctgcccggccagatgctgtacacccagccccccctgaagttcgtgagagcccccatggtggtgcagcagccccccgtgcagccccaggtgcagcagcagcagaccgccgtgcagaccgcccaggccgcccagatggtggcccccggcgtgcaggtgagccagagcagcctgcccatgctgagcagccccagccccggccagcaggtgcagaccccccagagcatgcccccccccccccagcccagcccccagcccggccagcccagcagccagcccaacagcaacgtgagcagcggccccgcccccagccccagcagcttcctgcccagccccagcccccagcccagccagagccccgtgaccgccagaaccccccagaacttcagcgtgcccagccccggccccctgaacacccccgtgaaccccagcagcgtgatgagccccgccggcagcagccaggccgaggagcagcagtacctggacaagctgaagcagctgagcaagtacatcgagcccctgagaagaatgatcaacaagatcgacaagaacgaggacagaaagaaggacctgagcaagatgaagagcctgctggacatcctgaccgaccccagcaagagatgccccctgaagaccctgcagaagtgcgagatcgccctggagaagctgaagaacgacatggccgtgcccacccccccccccccccccgtgccccccaccaagcagcagtacctgtgccagcccctgctggacgccgtgctggccaacatcagaagccccgtgttcaaccacagcctgtacagaaccttcgtgcccgccatgaccgccatccacggcccccccatcaccgcccccgtggtgtgcaccagaaagagaagactggaggacgacgagagacagagcatccccagcgtgctgcagggcgaggtggccagactggaccccaagttcctggtgaacctggaccccagccactgcagcaacaacggcaccgtgcacctgatctgcaagctggacgacaaggacctgcccagcgtgccccccctggagctgagcgtgcccgccgactaccccgcccagagccccctgtggatcgacagacagtggcagtacgacgccaaccccttcctgcagagcgtgcacagatgcatgaccagcagactgctgcagctgcccgacaagcacagcgtgaccgccctgctgaacacctgggcccagagcgtgcaccaggcctgcctgagcgccgcctag

SEQ ID NO: 323662 - DNA, 2034 bp, Artificial Sequence
  derived and/or modified sequence
atggacgtgagcggccaggagaccgactggagaagcaccgccttcagacagaagctggtgagccagatcgaggacgccatgagaaaggccggcgtggcccacagcaagagcagcaaggacatggagagccacgtgttcctgaaggccaagaccagagacgagtacctgagcctggtggccagactgatcatccacttcagagacatccacaacaagaagagccaggccagcgtgagcgcccagctgcagctgcagcaggtggccctgcagcagcagcagcagcagcagcagttccagcagcagcagcaggccgccctgcagcagcagcagcagcagcagcagcagcagcagttccaggcccagcagagcgccatgcagcagcagttccaggccgtggtgcagcagcagcagcagctgcagcagcagcagcagcagcagcagcacctgatcaagctgcaccaccagaaccagcagcagatccagcagcagcagcagcagctgcagagaatcgcccagctgcagctgcagcagcagcagcagcagcagcagcagcagcagcagcagcagcagcaggccctgcaggcccagccccccatccagcagccccccatgcagcagccccagcccccccccagccaggccctgccccagcagctgcagcagatgcaccacacccagcaccaccagccccccccccagccccagcagccccccgtggcccagaaccagcccagccagctgcccccccagagccagacccagcccctggtgagccaggcccaggccctgcccggccagatgctgtacacccagccccccctgaagttcgtgagagcccccatggtggtgcagcagccccccgtgcagccccaggtgcagcagcagcagaccgccgtgcagaccgcccaggccgcccagatggtggcccccggcgtgcaggtgagccagagcagcctgcccatgctgagcagccccagccccggccagcaggtgcagaccccccagagcatgcccccccccccccagcccagcccccagcccggccagcccagcagccagcccaacagcaacgtgagcagcggccccgcccccagccccagcagcttcctgcccagccccagcccccagcccagccagagccccgtgaccgccagaaccccccagaacttcagcgtgcccagccccggccccctgaacacccccgtgaaccccagcagcgtgatgagccccgccggcagcagccaggccgaggagcagcagtacctggacaagctgaagcagctgagcaagtacatcgagcccctgagaagaatgatcaacaagatcgacaagaacgaggacagaaagaaggacctgagcaagatgaagagcctgctggacatcctgaccgaccccagcaagagatgccccctgaagaccctgcagaagtgcgagatcgccctggagaagctgaagaacgacatggccgtgcccacccccccccccccccccgtgccccccaccaagcagcagtacctgtgccagcccctgctggacgccgtgctggccaacatcagaagccccgtgttcaaccacagcctgtacagaaccttcgtgcccgccatgaccgccatccacggcccccccatcaccgcccccgtggtgtgcaccagaaagagaagactggaggacgacgagagacagagcatccccagcgtgctgcagggcgaggtggccagactggaccccaagttcctggtgaacctggaccccagccactgcagcaacaacggcaccgtgcacctgatctgcaagctggacgacaaggacctgcccagcgtgccccccctggagctgagcgtgcccgccgactaccccgcccagagccccctgtggatcgacagacagtggcagtacgacgccaaccccttcctgcagagcgtgcacagatgcatgaccagcagactgctgcagctgcccgacaagcacagcgtgaccgccctgctgaacacctgggcccagagcgtgcaccaggcctgcctgagcgccgcctag

SEQ ID NO: 323663 - DNA, 2169 bp, Artificial Sequence
  derived and/or modified sequence
atgagaaaggccggcgtggcccacagcaagagcagcaaggacatggagagccacgtgttcctgaaggccaagaccagagacgagtacctgagcctggtggccagactgatcatccacttcagagacatccacaacaagaagagccaggccagcgtgagcgaccccatgaacgccctgcagagcctgaccggcggccccgccgccggcgccgccggcatcggcatgccccccagaggccccggccagagcctgggcggcatgggcagcctgggcgccatgggccagcccatgagcctgagcggccagcccccccccggcaccagcggcatggccccccacagcatggccgtggtgagcaccgccaccccccagacccagctgcagctgcagcaggtggccctgcagcagcagcagcagcagcagcagttccagcagcagcagcaggccgccctgcagcagcagcagcagcagcagcagcagcagcagttccaggcccagcagagcgccatgcagcagcagttccaggccgtggtgcagcagcagcagcagctgcagcagcagcagcagcagcagcagcacctgatcaagctgcaccaccagaaccagcagcagatccagcagcagcagcagcagctgcagagaatcgcccagctgcagctgcagcagcagcagcagcagcagcagcagcagcagcagcagcagcagcaggccctgcaggcccagccccccatccagcagccccccatgcagcagccccagcccccccccagccaggccctgccccagcagctgcagcagatgcaccacacccagcaccaccagccccccccccagccccagcagccccccgtggcccagaaccagcccagccagctgcccccccagagccagacccagcccctggtgagccaggcccaggccctgcccggccagatgctgtacacccagccccccctgaagttcgtgagagcccccatggtggtgcagcagccccccgtgcagccccaggtgcagcagcagcagaccgccgtgcagaccgcccaggccgcccagatggtggcccccggcgtgcaggtgagccagagcagcctgcccatgctgagcagccccagccccggccagcaggtgcagaccccccagagcatgcccccccccccccagcccagcccccagcccggccagcccagcagccagcccaacagcaacgtgagcagcggccccgcccccagccccagcagcttcctgcccagccccagcccccagcccagccagagccccgtgaccgccagaaccccccagaacttcagcgtgcccagccccggccccctgaacacccccgtgaaccccagcagcgtgatgagccccgccggcagcagccaggccgaggagcagcagtacctggacaagctgaagcagctgagcaagtacatcgagcccctgagaagaatgatcaacaagatcgacaagaacgaggacagaaagaaggacctgagcaagatgaagagcctgctggacatcctgaccgaccccagcaagagatgccccctgaagaccctgcagaagtgcgagatcgccctggagaagctgaagaacgacatggccgtgcccacccccccccccccccccgtgccccccaccaagcagcagtacctgtgccagcccctgctggacgccgtgctggccaacatcagaagccccgtgttcaaccacagcctgtacagaaccttcgtgcccgccatgaccgccatccacggcccccccatcaccgcccccgtggtgtgcaccagaaagagaagactggaggacgacgagagacagagcatccccagcgtgctgcagggcgaggtggccagactggaccccaagttcctggtgaacctggaccccagccactgcagcaacaacggcaccgtgcacctgatctgcaagctggacgacaaggacctgcccagcgtgccccccctggagctgagcgtgcccgccgactaccccgcccagagccccctgtggatcgacagacagtggcagtacgacgccaaccccttcctgcagagcgtgcacagatgcatgaccagcagactgctgcagctgcccgacaagcacagcgtgaccgccctgctgaacacctgggcccagagcgtgcaccaggcctgcctgagcgccgcctag

SEQ ID NO: 323664 - DNA, 1914 bp, Artificial Sequence
  derived and/or modified sequence
atggagagccacgtgttcctgaaggccaagaccagagacgagtacctgagcctggtggccagactgatcatccacttcagagacatccacaacaagaagagccaggccagcgtgagcgcccagctgcagctgcagcaggtggccctgcagcagcagcagcagcagcagcagttccagcagcagcagcaggccgccctgcagcagcagcagcagcagcagcagcagcagcagttccaggcccagcagagcgccatgcagcagcagttccaggccgtggtgcagcagcagcagcagctgcagcagcagcagcagcagcagcagcacctgatcaagctgcaccaccagaaccagcagcagatccagcagcagcagcagcagctgcagagaatcgcccagctgcagctgcagcagcagcagcagcagcagcagcagcagcagcagcagcagcagcaggccctgcaggcccagccccccatccagcagccccccatgcagcagccccagcccccccccagccaggccctgccccagcagctgcagcagatgcaccacacccagcaccaccagccccccccccagccccagcagccccccgtggcccagaaccagcccagccagctgcccccccagagccagacccagcccctggtgagccaggcccaggccctgcccggccagatgctgtacacccagccccccctgaagttcgtgagagcccccatggtggtgcagcagccccccgtgcagccccaggtgcagcagcagcagaccgccgtgcagaccgcccaggccgcccagatggtggcccccggcgtgcaggtgagccagagcagcctgcccatgctgagcagccccagccccggccagcaggtgcagaccccccagagcatgcccccccccccccagcccagcccccagcccggccagcccagcagccagcccaacagcaacgtgagcagcggccccgcccccagccccagcagcttcctgcccagccccagcccccagcccagccagagccccgtgaccgccagaaccccccagaacttcagcgtgcccagccccggccccctgaacacccccgtgaaccccagcagcgtgatgagccccgccggcagcagccaggccgaggagcagcagtacctggacaagctgaagcagctgagcaagtacatcgagcccctgagaagaatgatcaacaagatcgacaagaacgaggacagaaagaaggacctgagcaagatgaagagcctgctggacatcctgaccgaccccagcaagagatgccccctgaagaccctgcagaagtgcgagatcgccctggagaagctgaagaacgacatggccgtgcccacccccccccccccccccgtgccccccaccaagcagcagtacctgtgccagcccctgctggacgccgtgctggccaacatcagaagccccgtgttcaaccacagcctgtacagaaccttcgtgcccgccatgaccgccatccacggcccccccatcaccgcccccgtggtgtgcaccagaaagagaagactggaggacgacgagagacagagcatccccagcgtgctgcagggcgaggtggccagactggaccccaagttcctggtgaacctggaccccagccactgcagcaacaacggcaccgtgcacctgatctgcaagctggacgacaaggacctgcccagcgtgccccccctggagctgagcgtgcccgccgactaccccgcccagagccccctgtggatcgacagacagtggcagtacgacgccaaccccttcctgcagagcgtgcacagatgcatgaccagcagactgctgcagctgcccgacaagcacagcgtgaccgccctgctgaacacctgggcccagagcgtgcaccaggcctgcctgagcgccgcctag

SEQ ID NO: 323665 - DNA, 561 bp, Artificial Sequence
  derived and/or modified sequence
atggccggcgccgagtggaagagcctggaggagtgcctggagaagcacctgcccctgcccgacctgcaggaggtgaagagagtgctgtacggcaaggagctgagaaagctggacctgcccagagaggccttcgaggccgccagcagagaggacttcgagctgcagggctacgccttcgaggccgccgaggagcagctgagaagacccagaatcgtgcacgtgggcctggtgcagaacagaatccccctgcccgccaacgcccccgtggccgagcaggtgagcgccctgcacagaagaatcaaggccatcgtggaggtggccgccatgtgcggcgtgaacatcatctgcttccaggaggcctggatcctgagaccccaccaccaggagcccagacccccctgctgctacgcccccagctgctgcctgatccccagcgtgttcccccacagaagcgagagcatcagaagcagccccagcctgtaccaccacctggtgcaggcccccggcagcagccccctggccttcgtgatccccagcagctggagccccgtgcccagctag

SEQ ID NO: 323666 - DNA, 561 bp, Artificial Sequence
  derived and/or modified sequence
atggccggtgcagaatggaaatctttagaggagtgcctggaaaaacacctgcccctgcccgaccttcaagaggtcaagagggtactgtatggaaaagaattaaggaagctggacttgcctcgagaggccttcgaggctgctagcagagaagactttgagctgcaagggtacgcgtttgaggcggccgaggagcagttgcggcggcctaggatcgtacatgttgggctggtccagaataggattccacttccagcaaacgcgccggtcgcagagcaggtctctgcacttcaccggcgcatcaaggccattgtggaagtggccgcaatgtgtggggtgaacattatatgctttcaggaggcctggattctgcgacctcaccaccaggagcctcgtccaccatgctgctatgcaccctcctgttgcctcatcccatctgtgttcccccatcgctccgagagcatccgctctagtcccagcctgtatcaccacctagtgcaggcccctggatccagccccctggcttttgttatccctagttcgtggtcaccagtgccaagctag

SEQ ID NO: 323667 - DNA, 561 bp, Artificial Sequence
  derived and/or modified sequence
atggccggggctgagtggaagagcctggaggagtgcctggagaagcacctgcccctgcctgacctgcaggaggtgaagagggtgctgtatggcaaggagctgaggaagctggacctgccccgggaggcctttgaggccgccagccgggaggactttgagctgcagggctacgcctttgaagctgctgaggagcagctgcggcggcccagaattgtgcacgtgggcctggtgcagaaccgcatccccctgcctgccaatgcccctgtggccgagcaggtgtctgccctgcaccggcgcatcaaggccatcgtggaggtggccgccatgtgtggggtgaacatcatctgcttccaggaggcctggatcctgcggccccaccaccaggagccccggcccccctgctgctacgcccccagctgctgcctgatccccagcgtcttcccccacaggtctgagagcatccgcagcagccccagcctgtaccaccacctggtgcaggcccctggcagcagccccctggcctttgtgatccccagctcctggagccctgtgcccagctag

SEQ ID NO: 323668 - DNA, 561 bp, Artificial Sequence
  derived and/or modified sequence
atggccggcgccgagtggaagagcctggaggagtgcctggagaagcacttgcctctgcccgacttgcaggaggtcaagagagtcctgtacgggaaggagctgcgcaaacttgacctccccagggaagcatttgaggcggcatcaagggaagactttgagcttcagggatacgccttcgaggctgcggaagagcagctccggcgcccccgaatagtccacgtcgggttggtccagaaccgtatacctctccctgccaacgctcccgtcgcagaacaggtgagcgccttgcaccggagaatcaaggcaatcgtagaggtcgcagccatgtgcggagtcaacatcatctgcttccaggaggcctggatcctgcggccccatcaccaggaacctcgacctccttgttgttatgcaccctcatgttgcttgatcccgtcagtgttcccacatcggtccgaatccattcgcagctctccaagcttgtaccatcatctcgtccaggcacccggctcttccccacttgcatttgtgatcccttcatcctggagtcccgtgccatcctag

SEQ ID NO: 323669 - DNA, 561 bp, Artificial Sequence
  derived and/or modified sequence
atggctggtgcggagtggaagtccttggaagaatgcctggagaagcatctgccactccccgatctgcaggaggtcaaaagggtgctctatggaaaggaattaaggaagctggatctaccccgagaagcttttgaggcggctagtcgtgaagatttcgaactgcagggctacgcgttcgaagcagccgaagagcagcttcgacgaccccgtatagtacatgtgggccttgtccagaataggattcctttgcccgcaaatgccccagtggcggagcaggtcagtgccttgcatcgtcgcataaaggccattgtcgaggttgccgcaatgtgtggagtcaacatcatttgcttccaggaggcctggattctgcggcctcatcatcaggagccgcgacccccttgttgctacgcccctagttgctgcttgattcccagcgtctttccccatcggagtgagagcatccgcagctctccttcactgtaccatcatttggtccaggcacccggatctagtcctctggcctttgtaatccctagttcatggtcccctgtgccaagttag

SEQ ID NO: 323670 - DNA, 4726 bp, Artificial Sequence
  derived and/or modified sequence
ggattggctgcgcgaggaagtggcgtgtcctcacttgagctgtctgggagcgagagtaagagataaaggcaagggcgcctgaccgggcctgggcacctcctcccactgcgggcaaagggcaggcagttcgtgcgcggacacaagcactggcggaccgtggccatggcgggcgctgagtggaagtcgctggaggaatgcttggagaagcacctgccgctccccgacttgcaggaagtgaagcgcgttctctatggcaaggaactcaggaagcttgatctgcccagggaagctttcgaagctgcctccagagaagactttgaactgcagggatatgcctttgaagcagcggaggagcagctgagacgaccccgcattgtgcacgtggggctggttcagaacagaatccccctccccgcaaatgcccctgtggcagaacaggtctctgcccttcatagacgcataaaggctatcgtagaggtggctgcaatgtgtggagtcaacatcatctgtttccaggaagcatggattctccgtccacatcaccaggaaccccggcctccctgctgttacgcaccgagctgttgtctgattccttcagttttcccacatcgttctgaatccattcgctcctctccatctctctaccaccacctggtccaagcccctggcagctcacctctggcttttgtaattccctccagctggtctcctgtgccctcctgaccaggacttctttaccttcagatctcagcccagagccagcccccccatctaaacatcctggtagtatgtacctttgtggtttttatttttatcagagttttacatgctcatggtttagagtcagatgggtgtacaaggtctgttaccaaaaaatagctattatccccagcatcaacactgagctagttcctttggaatttacctttgttagtgttgctacttcctaattttttagttttgcatcacctattgacttccccctatggaagatgtcagtgttagccctttcttgcctcctcctggcccttcgacatacatgtgtccttgttctatccccccagcccattttgtcaactttgattccttttctttttttttaagacaaggacttactctgtcacccaggcttagagtacaatcacagctcactgcagccttgatcccaggcccaagcaatcctcccacctcagcctcccaagtagctgggaccacaggtgcacaccatcacgcccagctaattgaaaaaaaaaagtttgtagagatggagatctcactatattgctaggctgaactttgatttcttttcctgaattattttctgttttccctagagtttgctttgttttctacttgccacgcattcaaccccaaactttctatcaattcctaaatctcccttaatgtgttttagacgcatcaaacagtctatcagtttcatctcctccaaggaatctgccccagagccttgtgactgctgtggtctgaatcaggtgccccctctgctggccacacagttattgtcctgggatcccccctcatcatcaccctggggaatccctttgccttgctcttgtgtttctctgttcccacagcttcctctttcttggtttatacccttattttagtggagtggtgtagtggatccttatagatttatgttgcctcggcatccatgttgaatacaagtttaactctctcataccagcggcagggctcggtcacgctggacacagtttccagatctacaccacaccgagatggctcaagccaagtggccagaggtaagaacttaagaggcctctctcccaccagcagactgggctgcccactttcctgctgcttcctttaaatggaccatccaggcatttggccattaacttaaggtgaccacatcttagtcattatgtgtactgctagttgccccatactctctctgactcttcatttctccctcatctgacctggggacagaggactgccctcctgactcatggcactctccttgcccaggatctgtaagtaaaaaaatctttaaacttgtttcctattgcgattgtgtgttgaatttgcaccttccatgagaagaaccaggggctgccccaggctgggttttccttgggataccggtggaaacacaaagttgggctcctagggccagagtggtagtcaggcagggacaggtcaggcaagagctgccacacagcatgtgccagtataaacaagtttcacgtatgagggaccccctggtcacgggttggacagacaggcattaggctgtccaccatgtacaagatgtatcctgtgaaaggcacactgtagagaccacatccagctcccttcatttcctgttagtgctgggttgccaaccgctctggtactggagcccccatttagctagggactctcagaacaagtagttccctgaggaagaacacatcagaggtaaactttttgaggccttgcccatctgaaaatatgttccttctacaattttcttgatagtttggttgagcatcaaattttaggttagaaatcattttccttcagaagtttgaacacattgttccattgtcttctagttttttgggcattgttgagtagtccacagccattttaatttgtgacccattgtctatgacttgtttttctctggaagactgtaggagtttctctttttcaccagtactctacaatttcataatgatattccattgtgtatatctattttaatccactctaggcactcagtgggttcttttagtctagaaacttgggttctgaagctctaggaaatgttcttgcattatttcattcattattttcccctctttttttctctttctagacagtcctactattaggatgttggaaccctggactagttccctaattttgttatgtatttcctccttttttttttttttttttttttgatacgtggtcttactctgtcactgaggctgtagtgcagtggcacaatcacagctcactgcagccttgacctcccaggatcaagcaatcctcccgccccagcctcctgagtagctgggaccatagatgcataccaccacacctggctaattttcttgaatttttttttttttttttttttgtaaagatgagatctgtgttgcccaggcaggtctcaaattcctgggcccaagcaattctcccaccttggactcccaaaatgctgcaactataggcgtgagccacagggcccagtcaccactttgtctttttgctcaattttctggtggatttgatctgatttgtcagtcagccctcctattcaacctttcatttctgctgtcaaattttgaatttactagtgttcttttggtctgaaagtccctgttgtattacatcctgttcttgcatcatggttgcgatatcttctcttacctctaaggatactaatattaagtaaattttgttttctctcttattccaagagtccttattccaagttggacgctttgtttgattgctcatattttaagaattggggattaaaaatctgtgagctctgagtttgtagtaggggctcacccactgagctccattatagggtgatctgatttagtggtaattcccaggtaatcccagtgttagtatctctgggtcattcttttcaggctggtcagagtccccagagatttttctgcccttgtgccaagaagggaaggagaacaaaggttcagcatgctgatgtttactcaatccctctgttttgacacttcacttgctttcatctgccctgctccaaagccagagagcctctgctgaaccatctctggaggatgagcctctggccttcttctggggtagatggggcaggtcccagcctcttggtgtggagaaaggacctggatttctaactgcttctttttttatttttatttttatttttttttgaggtggagtcttggtctgtcacccaggctggagggcagtggcgcgatctcagctcactgcaacctctgcctcctggattcaagcgatttttctgcctcagcctcctgaggtcaggagtttgagaccagcctggccaacatgatgaaaacccatctctactaaaaatacaaaaaaaattagatgggcatggtggtgggctcctgtaatttcagctacttgggaggctgaggcagaagaatcgcttgaacccaggaggtggaggtttcagtgagccaagatcgtgccattgcactccagcctgggcaacaagaacaagactccatctcaaaagaaaagaaaaaaagaaagaaatgcacttgggttattgtgaggtgggagatctacaaagtatactgaattagtccagacaaggattgagttctccacattgagaaagaaaaagacgaatagcacagtaggaaataggcaaagggtatgaacaaaaaaatgtaggggaggaatccagactggccagtgaatgtgtggtgaggggttcagcctcaccggggatatgggaaacatttactcacagtgaggcaccgttcacaccagcagactggcaggtactaaaggtaactccatgcactgcagatattcacgtgtggctgggctgtagagcagcattaggcacatagccaaaggtcccaagggcccaccccagcggagtcccctccatcccctgcataggagactgctctgaacttggtgtgcatggagatgaccagtatctttgaactgttaatctgtgtgtatgtacctactgttt

SEQ ID NO: 323671 - DNA, 574 bp, Artificial Sequence
  derived and/or modified sequence
aaaacatttctcgtctccgtttgacagcacagagaccggcgagtccacaccagccctgccccaggctcacctcggaagaggcgaccccaaccttctcggactcgtacatgagggccagggacctgctggtgctggcggccgtggcctcagccctgcggaggacctcctgccgcaagtactgctgcctgtccgcgggcgcgtcgggcccgtcggggaggtctcgggcgtccctccaaggggccggccgggcgccttcgtcctccccgtcgtcgtcgaacggattgtagcttttagggtccaaaagcttctttgcatgtgtccagtggatttccatgggatcttccagttagatgaaagacggagagatgcagtgattgcattgggcatttttctgattgaatctgatcttcagcacaaagattgtgtggttccttaccttcttcgacttctcaaaggtcttccaaaagtgtattgggtagaagaaagcacagctcggaaaggcagaggtgccctcccggttgcagagagcttcagcttctgcttggtaactctgctgtctgatgtggcctatagg

SEQ ID NO: 323672 - protein, 126 aa, Artificial Sequence
  derived and/or modified sequence
MSDNEDNFDGDDFDDVEEDEGLDDLENAEEEGQENVEILPSGERPQANQKRITTPYMTKYERARVLGTRALQIAMCAPVMVELEGETDPLLIAMKELKLLWGLEYTVLRPSYALAHSLGSFSISSR

SEQ ID NO: 323673 - protein, 468 aa, Artificial Sequence
  derived and/or modified sequence
MVDTESPLCPLSPLEAGDLESPLSEEFLQEMGNIQEISQSIGEDSSGSFGFTEYQYLGSCPGSDGSVITDTLSPASSPSSVTYPVVPGSVDESPSGALNIECRICGDKASGYHYGVHACEGCKGFFRRTIRLKLVYDKCDRSCKIQKKNRNKCQYCRFHKCLSVGMSHNAIRFGRMPRSEKAKLKAEILTCEHDIEDSETADLKSLAKRIYEAYLKNFNMNKVKARVILSGKASNNPPFVIHDMETLCMAEKTLVAKLVANGIQNKEAEVRIFHCCQCTSVETVTELTEFAKAIPGFANLDLNDQVTLLKYGVYEAIFAMLSSVMNKDGMLVAYGNGFITREFLKSLRKPFCDIMEPKFDFAMKFNALELDDSDISLFVAAIICCGDRPGLLNVGHIEKMQEGIVHVLRLHLQSNHPDDIFLFPKLLQKMADLRQLVTEHAQLVQIIKKTESDAALHPLLQEIYRDMY

SEQ ID NO: 323674 - protein, 69 aa, Artificial Sequence
  derived and/or modified sequence
MVDTESPLCPLSPLEAGDLESPLSEEFLQEMGNIQEISQSIGEDSSGSFGFTEYQYLGSCPGSDGSVIT

SEQ ID NO: 323675 - protein, 133 aa, Artificial Sequence
  derived and/or modified sequence
MVDTESPLCPLSPLEAGDLESPLSEEFLQEMGNIQEISQSIGEDSSGSFGFTEYQYLGSCPGSDGSVITDTLSPASSPSSVTYPVVPGSVDESPSGALNIECRICGDKASGYHYGVHACEGCKVEGSWNRAWW

SEQ ID NO: 323676 - protein, 174 aa, Artificial Sequence
  derived and/or modified sequence
MVDTESPLCPLSPLEAGDLESPLSEEFLQEMGNIQEISQSIGEDSSGSFGFTEYQYLGSCPGSDGSVITDTLSPASSPSSVTYPVVPGSVDESPSGALNIECRICGDKASGYHYGVHACEGCKGFFRRTIRLKLVYDKCDRSCKIQKKNRNKCQYCRFHKCLSVGMSHNAFCHT

SEQ ID NO: 323677 - DNA, 10049 bp, Artificial Sequence
  derived and/or modified sequence
gcgccgcctccttcggcgttcgccccacggaccggcaggcggcggaccgcggcccaggctgaagctcagggccctgtctgctctgtggactcaacagtttgtggcaagacaagctcagaactgagaagctgtcaccacagttctggaggctgggaagttcaagatcaaagtgccagcagattcagtgtcatgtgaggacgtgcttcctgcttcatagataagagtagcttggagctcggcggcacaaccagcaccatctggtcgcgatggtggacacggaaagcccactctgccccctctccccactcgaggccggcgatctagagagcccgttatctgaagagttcctgcaagaaatgggaaacatccaagagatttcgcaatccatcggcgaggatagttctggaagctttggctttacggaataccagtatttaggaagctgtcctggctcagatggctcggtcatcacggacacgctttcaccagcttcgagcccctcctcggtgacttatcctgtggtccccggcagcgtggacgagtctcccagtggagcattgaacatcgaatgtagaatctgcggggacaaggcctcaggctatcattacggagtccacgcgtgtgaaggctgcaagggcttctttcggcgaacgattcgactcaagctggtgtatgacaagtgcgaccgcagctgcaagatccagaaaaagaacagaaacaaatgccagtattgtcgatttcacaagtgcctttctgtcgggatgtcacacaacgcgattcgttttggacgaatgccaagatctgagaaagcaaaactgaaagcagaaattcttacctgtgaacatgacatagaagattctgaaactgcagatctcaaatctctggccaagagaatctacgaggcctacttgaagaacttcaacatgaacaaggtcaaagcccgggtcatcctctcaggaaaggccagtaacaatccaccttttgtcatacatgatatggagacactgtgtatggctgagaagacgctggtggccaagctggtggccaatggcatccagaacaaggaggcggaggtccgcatctttcactgctgccagtgcacgtcagtggagaccgtcacggagctcacggaattcgccaaggccatcccaggcttcgcaaacttggacctgaacgatcaagtgacattgctaaaatacggagtttatgaggccatattcgccatgctgtcttctgtgatgaacaaagacgggatgctggtagcgtatggaaatgggtttataactcgtgaattcctaaaaagcctaaggaaaccgttctgtgatatcatggaacccaagtttgattttgccatgaagttcaatgcactggaactggatgacagtgatatctccctttttgtggctgctatcatttgctgtggagatcgtcctggccttctaaacgtaggacacattgaaaaaatgcaggagggtattgtacatgtgctcagactccacctgcagagcaaccacccggacgatatctttctcttcccaaaacttcttcaaaaaatggcagacctccggcagctggtgacggagcatgcgcagctggtgcagatcatcaagaagacggagtcggatgctgcgctgcacccgctactgcaggagatctacagggacatgtactgagttccttcagatcagccacaccttttccaggagttctgaagctgacagcactacaaaggagacgggggagcagcacgattttgcacaaatatccaccactttaaccttagagcttggacagtctgagctgtaggtaaccggcatattattccatatctttgttttaaccagtacttctaagagcatagaactcaaatgctgggggtaggtggctaatctcaggactgggaagattacggcgaattatgctcaatggtctgattttaactcacccgatgttaatcaatgcacattgctttagatcacattcgtgatttaccatttaattaactggtaacctcaaaattcgtggcctgtcttcccattcaccccgcttttgactattgtgctcctttataattctgaaaactaatcagcactttttaacaatgtttataatcctataagtctagatgtatccaaaggtgaagtatgtaaaaagcagcaaaatatttatttcaaagacttcacttctgtttcctgaatctaaagaaagacaacatgctgctttttaatcataggatggagaattttaaagaactgtttgggccaggcacagtcgctcatacttgtaatcccagcactttgggaggccgaggcgggtggatcacaaggtcagcagatcgagaccatcctggccaacatggtgaaaccctgtctctactaaaaatacaaaaattagccgggtgtggtggcacatgcctgtaatcccagctactcgggaagctgaggcaggagaattgcttgaaccagggagttggaggttgcagtgagctaagactgcaccactgcactccagcctggtgacagaacgagactctgtcttaaaaacaaacaaacaaaaaaaaaatctgttagataagctatcaaaatgcagctgttgttttgtttttggctcactgttttcgtggttgtaactaatatgtggaaaggcccatttccaggtttgcgtagaagagcccagaaaacagagtctcaagacccccgctctggactgtcataagctagcacccgtggtaagcgggacgagacaagctcccgaagcccgccagcttcctgctccactcagctccgtccagtcaacctgaacccacccagtccagctgtctgtgggaatggtggtgttcttagggacagactgacaccttacttgtcagtgttcctccgggccccatttggcagctcccgtatcttttgttatgttgcttttaaagatatgatgttttattgttttaactcttggtgacagtagatgctctctggagcgcagacgaggcacatgtgtcttcatagcctgggctgggtgggagccagtcaccctgcggatcgagagagggggtagagtcttcttcaaatggcagttttacttcaaatggcagatttcacaagagttggttattttttacaatggtttaggttgttaagtctcctttgtatgtaaggtagttttttcaacatctaaaatttttgttttagccttcaaaaccaacttaccaacctcagtccagctgggaaggcagcgttgattatggtagtttgtcaagaatatatggacctggaaacactttctctctctgtccacctggtagataaattgtcctgttgagaatttttagatctggactggaactgccaggaccaccgcctccagggagtcgctgggcacctggaggtatcgtcgatgcctctcccccatctttagaaaatttggctcttctgaggtcattattattttaagaatgattaggattgataagggtcccatgaccagcattatgaaaatgcgagagtgggaaggacacagtgtgagacttccactagaaaaaagtgaaagttagggttaggacatccttttttaaaaattacaaatttagtccgttttggtttttgtaatcaggctaggcacagtggctcacacatggaatcccagcactttgggaggccgaggtgggaggatcacttgagcccaggagttcgagaccagcctaggcaacatagcaagaccctgtctgtacacaaaatttaaaaattagttcatcggggtggcacacatcagtagtcccagctactctgcaggctgaggtgggaggattgcttgaacccaggaggtcgaggctgcagtgagctgtgatctcaccactgcattccagcctgggtgacagagttagattccaccctctcccaccccggcaaaaaaaaaaaaaaaagatgcaatcaaaggggctgttggccagcaatggcagcagcagcggcgggcagtctgcccaagtgtcttaggaaccaaaagcaaataaaagtgtttccatatatgccaccagccaagtggccatcctaattcagaaagaagctagcctttgagtgtctgtcatggtgcatccgtttcagtattatttcctaaaatgagaagcccctgtgtcaacaagatccaggggctggagcccaatgccaagcctgtgttgtccccagcgaccctgcagctgctcgctctgatgtaccctgtgccattcaaggagatgtggtccaggaaagtgagcctcatggttttcagagaagtcattgttctgtttacattttcataaaacctgtttaaaatagctccccgtctcaggctttcagcagtaacagtgagctgactggcaagttcgatgttagctcccgggacactcagcagcgatggtgagcattttggtttccttaaggcccagcaagacttccagggacatctctggtgaagccagaatggagacacccgtgacctcaggctgaaagtcactcgacattggtctcttgtgttgatagggaaggaaatcaggcattcctatttctttaaataacaaaaccactaattgccactcaatgctggaatattttgggtcacctaatcatagatttctcagggcatcaatactcaaatataggctgattatgccccagttcaaatgggaactattaacagagtgcatttcttgcttgctgggtttcaacagacatcagccaaaagaacaaaagagatgtcaggacagattccaggagtgtcggagcacatgtgtggcacccgctccctctggcagcgaatgtaggaagtcgccaaatttacccactcttcaacaagtcattgtttaaacacggtttttcattttctcaacttttaatagcaaaaagtgccaaagtcctcagagacctaacagccttggtctaccgtgctgaccagggtgaaggcacggcgagggactcctcccagacgtgcctcttgtgtgccagctggctgtggctcgggagcagacgcaggcctctccattgtccaggggagcctggcggcgcatccctcctctcccacctcctggcacttccagctgggtgtcccacatgttggattccgtccccaccacacttccagagaccggagaactgtgcagggcctaaggccgtttggatgaattgtcaaaacaagatgcttccagttacagcggcaggagcgggactgggagcacgggctgacggctgctggtgcctttcttcccacctcgcttgcctgtttccgcttgacccttcctccagctccgatgagaagagtataaagcatcttcctaacgggtgtgtttgctatacgaacataatggacgtgaagtggggcagaaacccagaactcagcattcaaggatgcccaggagagctgtccctgttttaaagagctgtgttttgttttgtttcgcatttagagagcagacaaggcacccttctgctgcgctgatacgtttcttacactgggccattttagacccccagggaaacagccttcctggagcgttgtctggaggttccagggacagggcagcctcccagagccgagcaagagctcaaggtacaaatgagagatttgctataccgtgagaagtcaacaacttagccaccacttccccgcaatggaccatgtaacaaatacctcagcaggccctgcaaaaggccatgctagagctgaggcgcacagcctgtggcctctgtagttagggcaggtgggatggagactccttgagtgcacacacctgagcctgcccacacacaggggagcagcatctcgtatgacgtctggaaggaacttcggttgtgtaaagggagccttgaagatacgtgcaaaaggtgctaccccaatttggtgaaactgacattgggcacgtcttgggcttaggagaagcggccgatggtcccggcctgcagtgacaaacccccctccccgcaccgcccccagcaccccctctcctcttcacctcttcctgctggccacgaggaagccacttcctcagagagaccctaccagatgcggatggaaacagatgcaccaaagcaagccctgatgaaaccgcgacttcctaaggtctgtctcctctgaacttgcacctgggcctctctgtgtttggttccaagcacttcccacctcaaactcccattttcaaaccactgtatctctgcgcacatctgctacttaccagccgcatacatgatggagggttttttggtcctgatccagtggccacacctgtctttgaaatgtctcactgaactccagttttaaaatagattcattgcttcaacacagcaagcccaatgcacccagctaagactggcttgaccgacagcctggcctttggtggggggcttcctggggcctggggaaagctggccaccttcaacagctggtacctcttcaacagtgtggcctttcaaaatgcagatgccaccaggagaacatgcccacagctcaccacctatggatgccatggctctgggcagctttcaaagcaggttcctgtggtctcctcagctgtttgagggggtaacagcaaatcagcctccattttaaaatgaaaacaccagcctccagatgtagggcctgctgggtgttgctagccgctggtccccaggcacggtgcactttctccacctcctgcagcctccctgttgtttctagactcttgcacctggtgagtgcaaggataggtgacccaggggcctgcagccttgtcctcagctcccatctcctggactgccagcctcaccctctgcagttagcatggttggcctgatgcagggatcccgagggattactttttagaccttctttcacattcagaaaagtagtatagattcaggagaggcaagaaaattatgctgtccatagaagtcacccatgaagactgatgccaccacctgaaggctcatgattgttaaaaatgtccacgggaacctctcgtccacaggaggtttgtctcaacacttcccatttttacggcattggcattgccaagcatggggaagtatctgctcttctcatgttaaaagtggcccagcttttcttaactcagtccaagctgacttgtttagctgcactggaatttcttaccaaccaaatatttgcatcgagcaaagggggctgtgtgcacctccctaatggcagcgatgatggctgctgtcattcaagcccatcttcagacgtcacagtctggaagtgaaatgtccacaaacatctgtggcagaaaaggctatacggaccacccagttgtgctgcagctttacagagcaaggaagggttgtggcaaataaatgattaacctgcctcgactgtgctgagggcaacaaaggccatctcaccaaaggattattcgatgccattaaatcatcccgtgaccttcctgcttccgagtccatggcctttgcccagggcatgtactcccctgagaggccttctgcctagaaagatctatgactgggttccaaagttgaggcctaggtttttgctgggatttagatattttcaggcaccattttgacagcattcaggaaaacggttattgaccccatagactagggtaagaataaaggcaataaatttggtctgactcagaatataggagatccatatatttctctggaaaccacagtgtacactaaaatgtgaaattgaaggttttgttaaaaagaaaaagataatgagcttcatgctttgtttaattacataatgatttccattacgctatttctgtgaaatgcagcaggttcttaaacgttatttcagtggcatgggctggaagcttatcacaaaaagccatgtgtgtggccttatcagaacagaaagagacaggctggtgcccaaggctgctgcctgctccaccttttgccagctctggacatctgaggacgtcccggcagatctggaatggggccctcaactgaccatttgcttctcagaatttcagtttgagacatgagaggtataatcagttacttttctccccccagagaaacccttttgtgaggggagaggagctatggtatgtggttcagctgaaacacatacaactgcatccttttggagtcctttgccaacaaaaacagaccaacagaccagatggtgtccatgttcaatatcatgtcttgatggacgcagctgatgacctcaaatacttgagtggtctcatggctgttagatggattatttgaaaaaaaaaaaaaaaaaagagagaaaaaataattgatttttacatcagagatagcaaactaagacctggggaggggggtcagcttttattttattttattttttttaagtttgctagttgggtcaaatgtgaggaggagggagtctacctgccacctcttctcttgcccctcttctgcccacacatccagcatccaaaatccattcatttaatgaattgataaagtgccgtgcaaactggtgcacaaacaggcccccagtccacgcagcctggctcctaggaaaagtggtgaccgggcgtgggggggcatgccgcagccctgggacacagtcgggcaccttccccggacccccaggccttggctgtgcctcaagtcagagagggtcagccttcaggccccggagacgagtgactggccgatcatttcacaataaaatcactcacttttggcaacttcactttttttaaggcacagtcagttccttttctcatgtacctcacaaaagatgaagaccatgtagtactctttttggtaaagttacagtgttcatgttaaatatcacttttttctacattgtgtggtaaaaagaactacgttaatagctatatcttaaatactgtgatttgactttttgaaaaatatcctaatacaaatattttactaacttacaatcactcatttaataagaaacatttggattcttttgaaatcagtgttaattgactcatattcttaaaagcctggctcttgaccctattggaaacacaaaggaagctgaaatcaaacatctaaaatacactgcgtacacgtgtgcgtgcacacacacacacacacacacacacacacagctcttcatttctcctgagccatgcagaatttactttcaatgtggaaatctgttccctttaccacactgtatatgcacagagcacaagagaggctatctctagtcacttccaccagcgaggccttagactccgtattagaggccaccgatttcatacaacagtgtttcgctaaagacccttcactattcttgtttagtaaatagctgtctgctcttcagggaactgttacctatgggttattaccaaagaacgctggcaattggaaatgtcctgatggaaattctttgcacgtgccggttctctggcatcctccaggtggcccaacccaaagcagaaagcagaaaccacagaccccgtgagtctccccataccttgtttccaataacttggcaaaacttcttggtgcatattggttacaccctctgggattcataatgccattaggctaaaaccctaagagagagggttgacagaaacacacgcgagaatgaggcagatcccagagcaaggactgggcccagactctccacatgtgctctactagtgagtgccttatactctcagtattttggggcttacagcttcttatttgtgctaaaaaggtgcagttccaaagtaggaactgccacacaggccccagcatcctctctccaacttcatacctctctcctggtggggggagcgggcatccaggacctccggaatcaaggatgtgcagagaagagcgaaagtaatttttctagtcacatgaactgattggttccaggcaattagaaaatggctataaaataaccttaattttaaaaaaaaatcttgggtcttcgttttcctattaggagactgaactgaccacatgtattgatttatatcctgaatatatgggaacttctgtgtttgggatgtcctactgtaagactgatgaatgtacagagttaatttcagggtacagttttgccttaatggttttaaaaaataaactattttttaaaatttt

SEQ ID NO: 323678 - DNA, 1407 bp, Artificial Sequence
  derived and/or modified sequence
atggtggatacggaatcccctctttgtccactttcccccctggaagcgggcgacctagagtcgcccctgtccgaggagtttctgcaagagatgggcaatatccaagaaataagtcagtccattggcgaggactcctctggcagctttggattcaccgaatatcagtatctggggtcttgtcccgggagtgacggtagcgtcatcactgatacactgagccctgcctcgtcgccaagtagcgtgacatatccggtggtccctgggagcgtggatgaaagtccatccggagccctcaacatcgagtgcaggatctgtggagacaaagcctccggctaccattatggcgtgcatgcctgcgaaggctgcaagggcttcttccgcagaaccattaggctaaaattggtgtacgataaatgcgatagatcttgtaagattcagaagaagaacaggaacaagtgccagtactgccgattccataagtgcctgagcgtcgggatgtcccacaacgctatcagattcggcaggatgcccaggtctgaaaaagccaaactcaaggccgagattttaacgtgtgagcacgatattgaagattctgagacagcagatctgaaaagcttggcaaagcggatctacgaggcttatcttaagaatttcaacatgaacaaggtgaaggcgcgcgtgattctgagcggcaaggccagtaacaatccccccttcgtgatacacgacatggagactttatgcatggctgagaagaccctggttgccaagctggtcgccaacggaattcagaacaaagaggcggaagtgcgcatctttcattgctgccagtgtacctcagtggagactgttactgaattgactgagtttgcaaaagccattccaggtttcgccaacctggatctgaacgatcaggtgactctcttgaagtatggtgtgtacgaagctatcttcgccatgctgagcagcgtaatgaacaaggatggcatgctggtggcatacggcaatggctttattacacgggaatttctcaagtcactgagaaagccattctgtgacataatggagcccaagttcgatttcgctatgaaattcaacgctctggaactcgatgactccgatatcagcctttttgtagctgctatcatctgctgcggagaccgcccaggacttctgaatgtggggcacattgaaaaaatgcaggagggtatcgttcacgtgctgcgcttacacctccagtcgaatcatccagacgacattttcctatttcccaagctgttgcagaaaatggcggatttgcgacagctagtaacagaacatgcccaacttgttcagattattaaaaagacagaatccgacgctgccttacatccactgctgcaagagatctatagagatatgtactag

SEQ ID NO: 323679 - DNA, 1407 bp, Artificial Sequence
  derived and/or modified sequence
atggtggatacagagtcgcccttgtgtccgctaagtcccctggaggccggcgaccttgagagtccactgagcgaggagttccttcaggagatgggaaacatccaagagatcagtcaaagcatcggtgaggactccagcgggtcctttgggtttacagaataccagtacctgggatcatgcccaggctctgacggctccgtaatcaccgacactctgagtccggcctcaagcccatcgtccgtgacgtatcccgtggtgccgggatcggttgacgagtctccctctggtgccttaaacattgaatgcagaatctgtggcgacaaggcgtccgggtatcactatggcgtccatgcttgcgagggatgtaaggggttcttccgcagaaccatcagactgaaactggtttatgacaaatgcgatcggtcttgtaagatccagaagaagaatcgcaataagtgccagtactgccggttccataagtgcttgtcggtcggcatgagccacaacgcgatacgattcggaagaatgccccggagcgaaaaagctaagcttaaagctgagatcttgacttgcgagcacgatatagaagattccgaaacggcagatttgaaatccctcgccaaaagaatctatgaagcctatctgaagaactttaacatgaataaggtcaaggccagagttatcttaagtggtaaagcttctaacaatccccccttcgtcattcacgatatggagacattgtgtatggctgaaaaaacattggtggccaaactagtggccaacggaatccaaaataaagaggcagaggtgaggatattccattgttgtcaatgtactagcgtggagacggtaactgagttaacggaatttgccaaagcaattccaggattcgctaatttggatctgaatgatcaagtgaccctgttgaagtatggggtgtatgaagcaatttttgctatgctgtcctctgtgatgaacaaggatggaatgctcgttgcttacgggaatgggtttattactcgggaatttctgaaatccctcagaaaacccttctgcgacatcatggagcccaagttcgatttcgctatgaagtttaatgccctggagctagatgacagcgacatatctttgttcgtggctgccattatatgctgtggagacagacccggcctcttaaacgtcgggcacatcgagaaaatgcaggaaggaatagttcatgtgttgaggcttcacttacagtcgaatcaccccgacgatatcttcctatttcccaaactcctgcagaaaatggctgacctgagacagctcgtgaccgaacatgcacaactcgtccagattataaagaagactgaaagcgacgccgccctccatccgttactccaggagatctacagagacatgtactag

SEQ ID NO: 323680 - DNA, 1407 bp, Artificial Sequence
  derived and/or modified sequence
atggtcgacacagaatcccctttgtgcccactctctccccttgaggcaggagatctcgaatcaccactctctgaggagtttctgcaggagatggggaacatccaggaaatcagccaatcgatcggcgaggatagctcaggtagctttggcttcaccgaatatcagtatctcggcagctgtcctggctctgatgggtcagtaattacagacaccttaagtcccgcaagctccccctcgtcagtgacctacccagtggtgcctgggtctgtggacgagtctccctccggcgcactgaatattgagtgccggatttgcggggacaaggcgtccggatatcactatggcgtgcatgcgtgcgagggttgtaaaggcttctttagacggaccatacgcctgaaattggtgtacgacaagtgtgataggagctgcaaaattcagaagaagaaccggaacaaatgtcagtattgccggttccacaagtgtttatccgtggggatgtcgcacaatgccatccgctttggaagaatgccgcgatctgagaaagctaagctcaaggccgagatcctcacatgtgaacacgacatcgaagactccgagacggctgatctgaaaagcctggccaaacggatctatgaagcctatctaaagaacttcaacatgaataaggtcaaggcccgcgtcatactgtctggaaaggcaagtaataatccaccttttgtcatccatgacatggagacactgtgcatggcggaaaagacccttgtcgcgaagctcgtggctaatggcatccagaataaggaggcagaggtgcgcatttttcattgctgccagtgcacctcggtggagacggtgactgaattaaccgaattcgccaaggcgatccccggtttcgcgaatctggacctgaacgaccaggtaactctgctcaaatatggagtgtatgaagccatcttcgcaatgctgtccagtgtaatgaacaaagatggaatgttggttgcctatgggaacggatttatcacgcgcgaattcctgaaatctcttcgtaaaccattctgcgatatcatggagccgaagtttgatttcgccatgaagttcaatgccttggagctcgatgactccgatatctcattatttgtagctgccatcatatgctgcggcgacaggcctggcctgctaaacgttgggcacattgaaaagatgcaggaggggatcgtacatgtcctgcggttgcacttacagagcaaccatccggacgacatattcctgttccctaagttgttacaaaaaatggccgatctgcgtcagttggtgactgagcacgcacagctggtgcagatcatcaaaaaaacagaatcggacgccgccctgcaccccctgctgcaggagatctacagagacatgtattag

SEQ ID NO: 323681 - DNA, 1407 bp, Artificial Sequence
  derived and/or modified sequence
atggtagacacagaaagtcctctgtgtcctctgagcccactggaggccggagacctggagagtccgctttcagaagaatttttacaggagatgggaaatattcaggaaatcagtcagtcaattggcgaagacagctccggttctttcgggttcactgagtaccagtacctcggctcctgccctggctctgatgggtcagtgattacagacaccttgtctcctgcatcttcgccttctagcgtcacgtatcctgtggttccgggctccgtcgatgaatctcccagtggcgcactcaatatagagtgccgaatctgcggcgataaggcgagcgggtatcattatggggtgcatgcctgcgaaggctgcaaaggctttttccgcagaactatcagactgaagttggtctatgataagtgcgacaggtcctgtaagattcagaaaaaaaaccgaaataaatgccagtactgccggttccacaaatgccttagcgtgggtatgagccacaatgccattcgctttgggcgtatgccacgcagcgagaaggccaagcttaaggctgagattctcacgtgcgagcacgatattgaagacagcgaaaccgctgacttgaaatctttggccaagaggatctatgaagcgtatctcaagaactttaacatgaacaaggtaaaagcccgagtgatcttgagtggcaaggcctctaacaatccgccctttgtgatccatgatatggaaaccttatgcatggccgaaaaaacactggttgcaaagttggtcgccaatggcattcaaaacaaggaagcggaagtcagaatattccactgttgtcagtgcacgagcgttgagaccgttactgagttaacagagtttgcgaaagccattcccgggttcgccaatttggacctgaacgatcaggtcactctcctgaagtatggcgtgtacgaggcaatattcgccatgttgtcttcagtaatgaacaaagatggcatgctggtggcgtacggaaacggattcataaccagggagtttttgaagtctctgaggaaacccttttgtgatattatggaacctaaattcgactttgctatgaaatttaacgccctggaactggacgattctgacatctccttgtttgtggcggcaattatctgctgtggcgaccgccccggcctgcttaatgtaggccatatcgagaaaatgcaggagggcatcgttcacgtactgagactccatctgcagagcaaccatcctgacgatatctttctcttcccaaaattattacagaagatggccgatttgagacaattggtcactgagcatgcacagttggtccagatcattaagaaaacagaatctgacgctgctcttcacccattattgcaagagatttatagggatatgtactag

SEQ ID NO: 323682 - DNA, 210 bp, Artificial Sequence
  derived and/or modified sequence
atggtggacaccgagtctccactctgtcccctcagtcccttggaagccggcgacttagagtcccctctgagcgaagagttccttcaggagatgggtaatattcaggaaatatcacagtcaatcggtgaagatagtagcgggtccttcggattcactgagtaccagtatctaggttcctgcccaggatctgacggctctgtaattacatag

SEQ ID NO: 323683 - DNA, 402 bp, Artificial Sequence
  derived and/or modified sequence
atggtggatactgaatctcctctgtgccccctgagtccgctagaggccggtgatctggaatcacccctgagcgaggagtttctgcaggaaatggggaatatccaggaaatttctcaaagtatcggcgaggattccagtggttcctttggctttacagaataccaatacctgggatcgtgtcccggtagtgatggatctgtgatcacagataccctgagcccagctagtagcccgagttctgtgacatatcccgtggtaccaggatctgttgacgaaagtccatccggggcccttaacattgagtgcagaatctgcggcgacaaagctagcggctaccactatggcgtgcatgcctgtgaaggttgtaaggtggaggggagttggaatcgggcatggtggtag

SEQ ID NO: 323684 - DNA, 525 bp, Artificial Sequence
  derived and/or modified sequence
atggtggatacagaatctccgctctgccccctttccccgcttgaagccggcgacctggaatccccgctcagtgaggaatttctacaggaaatgggcaatatccaagaaatcagccagtcaatcggcgaagattcctcagggagctttggatttaccgaataccagtacctcgggtcttgccctggctctgacgggagcgttataaccgatacactgtccccagctagctccccttccagcgtgacgtacccagtcgtgcctggaagtgtggatgagtcccccagcggcgcattgaacattgaatgtaggatctgtggagataaagcctctgggtatcattacggcgtgcatgcatgcgaaggctgcaagggtttctttcgacgcactatcagattaaaactggtgtacgataagtgtgatcgctcctgtaaaattcagaaaaaaaaccgaaacaagtgtcagtactgcaggttccacaaatgcttgtctgtgggtatgagtcacaatgctttctgccacacctag

SEQ ID NO: 323685 - DNA, 30 bp, Artificial Sequence
  derived and/or modified sequence
atggttgataccgagtctcccctctgttag

SEQ ID NO: 323686 - DNA, 1407 bp, Artificial Sequence
  derived and/or modified sequence
atggtggacacagagagccccctgtgccccctgagccccctggaggccggggacctggagagccccctgtctgaggagttcctgcaggagatgggcaacatccaggagatcagccagagcattggagaggacagcagcggcagctttggcttcacagagtaccagtacctgggcagctgccccggcagtgatggcagcgtcatcacagacaccctgagccctgccagcagccccagctctgtgacctaccctgtggtgcccggctctgtggatgagagccccagcggggccctgaacattgaatgtcgcatctgtggggacaaggccagcggctaccactacggcgtgcacgcctgtgagggctgcaagggcttcttccggaggaccatccggctgaagctggtgtatgacaagtgtgacaggagctgcaagatccagaagaagaacagaaacaagtgccagtactgccgcttccacaagtgcctgtctgtgggcatgagccacaatgccatccgctttggaaggatgcccaggtctgagaaggccaagctgaaggccgagatcctgacctgtgaacatgacatcgaggacagcgagacagctgacctgaagagcctggccaagaggatctatgaggcctacctgaagaacttcaacatgaacaaggtgaaggcccgggtcatcctgagcggcaaggccagcaacaaccccccatttgtgattcatgacatggagaccctgtgcatggccgagaagaccctggtggccaagctggtggccaacggcatccagaacaaggaggccgaggtgcgcatcttccactgctgccagtgcacctctgtggagaccgtgacagagctgacagaatttgccaaggccatccctggctttgccaacctggacctgaatgaccaggtgaccctgctgaagtatggagtgtatgaggccatctttgccatgctgagctctgtgatgaacaaggatggcatgctggtggcctatggaaatggcttcatcacccgggagttcctgaagagcctgaggaagcccttctgtgacatcatggagcccaagtttgattttgccatgaagttcaatgccctggagctggatgacagcgacatcagcctgtttgtggccgccatcatctgctgcggggacaggcctggcctgctgaatgtgggccacatcgagaagatgcaggagggcatcgtgcacgtgctgcggctgcacctgcagagcaaccacccagatgacatcttcctgttccccaagctgctgcagaagatggctgacctgcggcagctggtgacagagcacgcccagctggtgcagatcatcaagaagacagaaagtgatgctgccctgcaccccctgctgcaggagatctacagagacatgtactag

SEQ ID NO: 323687 - DNA, 210 bp, Artificial Sequence
  derived and/or modified sequence
atggtggacacagagagccccctgtgccccctgagccccctggaggccggggacctggagagccccctgtctgaggagttcctgcaggagatgggcaacatccaggagatcagccagagcattggagaggacagcagcggcagctttggcttcacagagtaccagtacctgggcagctgccccggcagtgatggcagcgtcatcacctag

SEQ ID NO: 323688 - DNA, 402 bp, Artificial Sequence
  derived and/or modified sequence
atggtggacacagagagccccctgtgccccctgagccccctggaggccggggacctggagagccccctgtctgaggagttcctgcaggagatgggcaacatccaggagatcagccagagcattggagaggacagcagcggcagctttggcttcacagagtaccagtacctgggcagctgccccggcagtgatggcagcgtcatcacagacaccctgagccctgccagcagccccagctctgtgacctaccctgtggtgcccggctctgtggatgagagccccagcggggccctgaacattgaatgtcgcatctgtggggacaaggccagcggctaccactacggcgtgcacgcctgtgagggctgcaaggtggagggctcctggaacagagcctggtggtag

SEQ ID NO: 323689 - DNA, 525 bp, Artificial Sequence
  derived and/or modified sequence
atggtggacacagagagccccctgtgccccctgagccccctggaggccggggacctggagagccccctgtctgaggagttcctgcaggagatgggcaacatccaggagatcagccagagcattggagaggacagcagcggcagctttggcttcacagagtaccagtacctgggcagctgccccggcagtgatggcagcgtcatcacagacaccctgagccctgccagcagccccagctctgtgacctaccctgtggtgcccggctctgtggatgagagccccagcggggccctgaacattgaatgtcgcatctgtggggacaaggccagcggctaccactacggcgtgcacgcctgtgagggctgcaagggcttcttccggaggaccatccggctgaagctggtgtatgacaagtgtgacaggagctgcaagatccagaagaagaacagaaacaagtgccagtactgccgcttccacaagtgcctgtctgtgggcatgagccacaatgccttctgccacacctag

SEQ ID NO: 323690 - DNA, 30 bp, Artificial Sequence
  derived and/or modified sequence
atggtggacacagagagccccctgtgctag

SEQ ID NO: 323691 - DNA, 1407 bp, Artificial Sequence
  derived and/or modified sequence
atggtggacaccgagagccccctgtgccccctgagccccctggaggccggggacctagagtcccccctttctgaggaatttcttcaagagatgggcaacatccaggagatctcacagagtatcggtgaggattctagcggaagcttcggctttacagaataccaatatttagggagctgcccaggaagcgatggatctgtgataaccgacaccctgtctcccgcgagtagtccgtcctccgtcacttaccccgtcgtccccgggtccgtcgacgaatccccctctggggccctcaacatagagtgtagaatctgcggagacaaagcctctgggtaccactacggagtgcacgcatgtgagggctgtaaaggtttctttcgccgcacaatccgtctgaagctggtttacgacaaatgcgacagaagctgcaaaattcagaaaaaaaatagaaataagtgccagtactgtcggtttcataagtgcctcagtgtgggtatgagtcacaatgcgatcagatttgggcgcatgccgcgatccgaaaaagccaaactcaaggccgagatcttgacatgtgaacacgatatcgaggactcagaaacagccgacctaaaaagcctggctaaaagaatttatgaggcatatctgaagaactttaatatgaataaagtgaaagcccgggtcattttgtctggaaaggcgtccaacaaccctcctttcgtaattcatgacatggaaacgctctgtatggcggagaagacattagttgctaagctggtagcgaacggaattcaaaacaaagaagcagaggtgcggatcttccattgctgtcagtgcacctctgtggaaacagtcacagagctcaccgagttcgcaaaggccattccaggcttcgcaaaccttgaccttaacgaccaggtgacactcttaaagtatggggtctatgaggcaatttttgcaatgttgagttccgttatgaacaaagacgggatgctcgttgcttatggcaacggatttatcacccgcgagttcttaaagtcacttcgaaagccattctgtgatattatggaacctaaattcgatttcgcaatgaaattcaacgcgctcgagttggacgactctgacatcagcctgtttgttgctgccatcatctgttgcggcgatcgtccaggcttacttaacgtgggtcatatcgagaaaatgcaggaggggatagtccacgtcctgaggcttcacctacagtccaaccatcctgatgacatattcctctttcccaagctcctgcagaaaatggccgatctgaggcagctcgtgacggaacatgcacagctggtgcagataataaagaaaacagagtcagatgcggcgttacacccactcctgcaggaaatctatagggatatgtactag

SEQ ID NO: 323692 - DNA, 1407 bp, Artificial Sequence
  derived and/or modified sequence
atggtggacaccgagagccccctgtgccccctgagccccctggaggctggtgacctggagtcacctctttcagaagagttcttacaggaaatgggcaacatccaggaaatatcgcagtccattggagaggatagtagtggttctttcgggtttacagagtaccaatatctgggtagctgtcccggcagcgacgggagtgtgattactgacactctgtcacctgcttctagcccgagcagcgttacctaccctgtcgtgcccgggagtgtcgacgagtcacccagcggcgccctcaacattgagtgtagaatctgcggtgacaaggcctcaggatatcattacggggtacatgcatgtgagggctgtaaggggttcttccgacgaaccatcagattaaagctggtttatgataagtgtgatagaagctgtaagattcagaagaagaatcgcaacaagtgccagtattgccggttccataaatgtctaagtgtcgggatgtcgcacaatgctataagattcgggcgtatgcctagatcagaaaaagcaaagctgaaggcagaaatcttaacatgtgaacatgacattgaggattcggagaccgccgatctgaagagtctggcaaaacgcatctacgaggcttatctcaagaatttcaatatgaataaggtgaaagcgcgggtgatcctgtctgggaaggcctccaacaatcccccgtttgtgattcacgacatggaaacattgtgcatggctgagaaaactctggtggccaaacttgtcgctaatggaattcagaataaagaggccgaggttcggatttttcattgttgtcagtgtacgagtgtggagaccgtgaccgagcttactgagttcgcaaaggccatccccggatttgccaatctggatcttaatgatcaggttacccttctcaagtacggcgtctacgaggccatattcgccatgttaagttcagtcatgaataaagatgggatgctagtggcctatgggaacggatttatcactcgtgagttcctgaaatccttgagaaagcctttctgtgatattatggagcctaaatttgattttgcaatgaaattcaatgctcttgagctggacgatagcgatatatcattgttcgttgcggccattatctgctgcggagatcgccctggcttactcaacgtgggccacattgagaagatgcaggagggcatagtgcatgtcctgagactgcacctgcagagtaaccatcccgatgacatctttctcttccccaaacttctacagaagatggctgatctgagacagttagtgacagagcacgcacagctggtgcagataatcaagaaaactgagtccgatgctgccctccaccccctgctccaggagatctatcgcgatatgtactag

SEQ ID NO: 323693 - DNA, 1407 bp, Artificial Sequence
  derived and/or modified sequence
atggtggacaccgagagccccctgtgccccctgagccccctggaggcgggggatctggagagtccgctctccgaggaatttctccaggaaatggggaatatacaggaaatttcccagtccatcggtgaagattcctcaggtagtttcggatttaccgagtatcagtacctgggctcttgtcccggttcagatggtagcgtgatcactgatacgttgagccccgccagctcgccctcttccgtcacgtatcctgtggtccctgggtcagtggatgagtcaccctcaggggccctaaatattgaatgtcgcatttgcggcgacaaggccagtgggtatcactacggagtgcacgcctgcgaggggtgtaagggcttcttcaggcgcaccattaggctgaagctagtgtatgacaaatgtgacagatcgtgcaagatccagaagaaaaataggaataaatgccaatattgccgcttccataagtgtttaagtgtgggcatgtctcacaatgcaattcgcttcggacgcatgcctcgatctgagaaagccaagctcaaggcggaaatcctgacatgcgagcatgatattgaagacagcgagaccgctgacttaaagtctctggcgaagcgaatttatgaagcctaccttaaaaactttaatatgaataaagttaaggctagagtgatccttagtggcaaggcttccaataacccccccttcgtgattcacgacatggaaacactgtgtatggcggagaagactttagtagccaagttggtcgctaatggcatacagaataaagaggcagaggtgcggattttccactgttgccaatgcacctcagtcgagaccgtcactgaactgaccgagtttgccaaagccattcccgggttcgctaatctggacctcaacgaccaggtaacgcttctgaagtacggagtgtatgaggccattttcgcgatgctatcttcggtgatgaataaggacgggatgctggtcgcctacggaaacggattcataactcgtgaatttcttaagtcgctcagaaaacccttttgtgacattatggaacctaaattcgacttcgctatgaaattcaatgctctggaattggatgacagtgacatctcactgttcgtcgcggcaatcatctgctgtggcgaccgacccggactactgaatgtggggcatatcgagaaaatgcaagagggcatcgtgcatgtgctgagattgcatctccagagtaaccatccagacgatatatttttgttcccaaaactgctccagaagatggcagacttgcgacagctcgtgaccgaacatgctcagttagtgcagatcattaaaaagaccgagagcgatgcagcccttcatcctctactgcaggaaatataccgtgatatgtactag

SEQ ID NO: 323694 - DNA, 1407 bp, Artificial Sequence
  derived and/or modified sequence
atggtggacaccgagagccccctgtgccccctgagccccctggaggcaggagatctggaatctcctctgagtgaggaatttcttcaagagatgggaaatatccaagagatatctcaatctattggtgaggattccagtgggagctttggatttaccgaatatcagtacttgggatcttgtccaggtagcgatggatccgtgattacagatacactctccccggcatcttcccccagctccgtgacctaccccgttgtgcccggctccgtagacgagagcccttcaggcgccttgaacattgagtgcaggatttgcggtgacaaagcatcgggatatcactatggcgtccacgcatgcgaggggtgcaaagggttcttcaggaggacgattaggctgaaactagtttatgacaagtgcgatcggagctgtaaaatccagaaaaaaaatcgcaataaatgtcaatactgtcgctttcataagtgcttatccgtgggaatgtcccataacgcgataaggttcgggcggatgcccagaagtgagaaggcgaagctcaaagcagaaatcctgacttgcgagcacgatattgaagacagcgagaccgcagacctaaaatctcttgccaagcggatttatgaggcctatctgaagaatttcaatatgaacaaagtgaaggcgcgggtcatcctgagcggtaaggcgagcaataatcctccctttgtcattcacgatatggagacactgtgtatggctgagaagacactggtagcgaagctggttgccaatggaatccagaacaaggaagcggaggtccgcatttttcactgctgccagtgtacaagtgtcgagactgtgaccgagcttacagaattcgccaaagccattccggggtttgcaaatctagacctgaacgaccaggttaccctgctaaaatatggggtctatgaggcgatcttcgctatgttgagctcagtcatgaataaagacgggatgttggttgcttatggcaacggtttcatcacacgcgaattcttgaaatcgctcaggaagcctttctgcgatattatggaacccaaatttgactttgcaatgaaattcaatgccttggaactcgatgattccgatataagcctgttcgtggcggcaatcatatgttgtggcgatcggcccggactgctgaacgttggacacattgaaaagatgcaagaaggaatagtacacgtactgcggttacatctgcagtctaatcaccccgacgacatcttccttttccctaagttactgcagaaaatggccgacctcaggcagctggtaacagaacatgcacagctcgtgcagataattaagaaaaccgagagtgacgcagccctacacccgcttttgcaggagatttaccgcgacatgtactag

SEQ ID NO: 323695 - DNA, 210 bp, Artificial Sequence
  derived and/or modified sequence
atggtggacaccgagagccccctgtgccccctgagccccctggaggcaggtgatctggagagtccattgagtgaagagtttctgcaggaaatgggcaacattcaggagatcagccagtccatcggtgaggactccagcggcagtttcgggtttaccgagtaccagtatcttggaagttgtccaggttctgacgggtcagtgattacttag

SEQ ID NO: 323696 - DNA, 402 bp, Artificial Sequence
  derived and/or modified sequence
atggtggacaccgagagccccctgtgccccctgagccccctggaggccggtgatctcgaatctccactgtcagaagagtttctacaggagatgggcaacatccaagagataagccagtctatcggcgaggactcaagcggctcattcggcttcaccgaataccagtacctgggctcttgcccaggttcagatgggagcgtgatcacagataccctgtctcctgcttctagcccgagcagcgtgacttaccctgtggtgcccggctcggtcgacgaaagcccatctggcgctctgaacatagagtgtcgcatttgcggagacaaagccagtgggtaccattacggtgtgcacgcctgtgaaggctgcaaggtcgaaggaagttggaacagagcctggtggtag

SEQ ID NO: 323697 - DNA, 525 bp, Artificial Sequence
  derived and/or modified sequence
atggtggacaccgagagccccctgtgccccctgagccccctggaggccggcgatctcgaatctcccctgtctgaagagtttcttcaggaaatgggcaatattcaagagattagccaaagcatcggtgaggattctagtgggtcttttggattcaccgaataccagtatttggggtcctgcccgggatcggatggcagcgtaattacagatacgttatccccggcctccagcccttcatctgtgacttatcccgtggtgccaggtagcgtcgacgagtccccctcaggcgccttgaatatcgagtgtcggatctgtggcgataaagcatcggggtaccattatggagtccacgcttgtgaaggctgtaaggggttcttcaggagaacaattcgattgaaactcgtctacgacaaatgtgaccggagctgcaagattcagaaaaagaacaggaataagtgccagtattgtcgatttcataagtgtctgtcagttggaatgtcacataatgccttttgtcatacgtag

SEQ ID NO: 323698 - DNA, 9965 bp, Artificial Sequence
  derived and/or modified sequence
gcgccgcctccttcggcgttcgccccacggaccggcaggcggcggaccgcggcccaggctgaagctcagggccctgtctgctctgtggactcaacagtttgtggcaagacaagctcagaactgagaagctgtcaccacagtagcttggagctcggcggcacaaccagcaccatctggtcgcgatggtggacacggaaagcccactctgccccctctccccactcgaggccggcgatctagagagcccgttatctgaagagttcctgcaagaaatgggaaacatccaagagatttcgcaatccatcggcgaggatagttctggaagctttggctttacggaataccagtatttaggaagctgtcctggctcagatggctcggtcatcacggacacgctttcaccagcttcgagcccctcctcggtgacttatcctgtggtccccggcagcgtggacgagtctcccagtggagcattgaacatcgaatgtagaatctgcggggacaaggcctcaggctatcattacggagtccacgcgtgtgaaggctgcaagggcttctttcggcgaacgattcgactcaagctggtgtatgacaagtgcgaccgcagctgcaagatccagaaaaagaacagaaacaaatgccagtattgtcgatttcacaagtgcctttctgtcgggatgtcacacaacgcgattcgttttggacgaatgccaagatctgagaaagcaaaactgaaagcagaaattcttacctgtgaacatgacatagaagattctgaaactgcagatctcaaatctctggccaagagaatctacgaggcctacttgaagaacttcaacatgaacaaggtcaaagcccgggtcatcctctcaggaaaggccagtaacaatccaccttttgtcatacatgatatggagacactgtgtatggctgagaagacgctggtggccaagctggtggccaatggcatccagaacaaggaggcggaggtccgcatctttcactgctgccagtgcacgtcagtggagaccgtcacggagctcacggaattcgccaaggccatcccaggcttcgcaaacttggacctgaacgatcaagtgacattgctaaaatacggagtttatgaggccatattcgccatgctgtcttctgtgatgaacaaagacgggatgctggtagcgtatggaaatgggtttataactcgtgaattcctaaaaagcctaaggaaaccgttctgtgatatcatggaacccaagtttgattttgccatgaagttcaatgcactggaactggatgacagtgatatctccctttttgtggctgctatcatttgctgtggagatcgtcctggccttctaaacgtaggacacattgaaaaaatgcaggagggtattgtacatgtgctcagactccacctgcagagcaaccacccggacgatatctttctcttcccaaaacttcttcaaaaaatggcagacctccggcagctggtgacggagcatgcgcagctggtgcagatcatcaagaagacggagtcggatgctgcgctgcacccgctactgcaggagatctacagggacatgtactgagttccttcagatcagccacaccttttccaggagttctgaagctgacagcactacaaaggagacgggggagcagcacgattttgcacaaatatccaccactttaaccttagagcttggacagtctgagctgtaggtaaccggcatattattccatatctttgttttaaccagtacttctaagagcatagaactcaaatgctgggggtaggtggctaatctcaggactgggaagattacggcgaattatgctcaatggtctgattttaactcacccgatgttaatcaatgcacattgctttagatcacattcgtgatttaccatttaattaactggtaacctcaaaattcgtggcctgtcttcccattcaccccgcttttgactattgtgctcctttataattctgaaaactaatcagcactttttaacaatgtttataatcctataagtctagatgtatccaaaggtgaagtatgtaaaaagcagcaaaatatttatttcaaagacttcacttctgtttcctgaatctaaagaaagacaacatgctgctttttaatcataggatggagaattttaaagaactgtttgggccaggcacagtcgctcatacttgtaatcccagcactttgggaggccgaggcgggtggatcacaaggtcagcagatcgagaccatcctggccaacatggtgaaaccctgtctctactaaaaatacaaaaattagccgggtgtggtggcacatgcctgtaatcccagctactcgggaagctgaggcaggagaattgcttgaaccagggagttggaggttgcagtgagctaagactgcaccactgcactccagcctggtgacagaacgagactctgtcttaaaaacaaacaaacaaaaaaaaaatctgttagataagctatcaaaatgcagctgttgttttgtttttggctcactgttttcgtggttgtaactaatatgtggaaaggcccatttccaggtttgcgtagaagagcccagaaaacagagtctcaagacccccgctctggactgtcataagctagcacccgtggtaagcgggacgagacaagctcccgaagcccgccagcttcctgctccactcagctccgtccagtcaacctgaacccacccagtccagctgtctgtgggaatggtggtgttcttagggacagactgacaccttacttgtcagtgttcctccgggccccatttggcagctcccgtatcttttgttatgttgcttttaaagatatgatgttttattgttttaactcttggtgacagtagatgctctctggagcgcagacgaggcacatgtgtcttcatagcctgggctgggtgggagccagtcaccctgcggatcgagagagggggtagagtcttcttcaaatggcagttttacttcaaatggcagatttcacaagagttggttattttttacaatggtttaggttgttaagtctcctttgtatgtaaggtagttttttcaacatctaaaatttttgttttagccttcaaaaccaacttaccaacctcagtccagctgggaaggcagcgttgattatggtagtttgtcaagaatatatggacctggaaacactttctctctctgtccacctggtagataaattgtcctgttgagaatttttagatctggactggaactgccaggaccaccgcctccagggagtcgctgggcacctggaggtatcgtcgatgcctctcccccatctttagaaaatttggctcttctgaggtcattattattttaagaatgattaggattgataagggtcccatgaccagcattatgaaaatgcgagagtgggaaggacacagtgtgagacttccactagaaaaaagtgaaagttagggttaggacatccttttttaaaaattacaaatttagtccgttttggtttttgtaatcaggctaggcacagtggctcacacatggaatcccagcactttgggaggccgaggtgggaggatcacttgagcccaggagttcgagaccagcctaggcaacatagcaagaccctgtctgtacacaaaatttaaaaattagttcatcggggtggcacacatcagtagtcccagctactctgcaggctgaggtgggaggattgcttgaacccaggaggtcgaggctgcagtgagctgtgatctcaccactgcattccagcctgggtgacagagttagattccaccctctcccaccccggcaaaaaaaaaaaaaaaagatgcaatcaaaggggctgttggccagcaatggcagcagcagcggcgggcagtctgcccaagtgtcttaggaaccaaaagcaaataaaagtgtttccatatatgccaccagccaagtggccatcctaattcagaaagaagctagcctttgagtgtctgtcatggtgcatccgtttcagtattatttcctaaaatgagaagcccctgtgtcaacaagatccaggggctggagcccaatgccaagcctgtgttgtccccagcgaccctgcagctgctcgctctgatgtaccctgtgccattcaaggagatgtggtccaggaaagtgagcctcatggttttcagagaagtcattgttctgtttacattttcataaaacctgtttaaaatagctccccgtctcaggctttcagcagtaacagtgagctgactggcaagttcgatgttagctcccgggacactcagcagcgatggtgagcattttggtttccttaaggcccagcaagacttccagggacatctctggtgaagccagaatggagacacccgtgacctcaggctgaaagtcactcgacattggtctcttgtgttgatagggaaggaaatcaggcattcctatttctttaaataacaaaaccactaattgccactcaatgctggaatattttgggtcacctaatcatagatttctcagggcatcaatactcaaatataggctgattatgccccagttcaaatgggaactattaacagagtgcatttcttgcttgctgggtttcaacagacatcagccaaaagaacaaaagagatgtcaggacagattccaggagtgtcggagcacatgtgtggcacccgctccctctggcagcgaatgtaggaagtcgccaaatttacccactcttcaacaagtcattgtttaaacacggtttttcattttctcaacttttaatagcaaaaagtgccaaagtcctcagagacctaacagccttggtctaccgtgctgaccagggtgaaggcacggcgagggactcctcccagacgtgcctcttgtgtgccagctggctgtggctcgggagcagacgcaggcctctccattgtccaggggagcctggcggcgcatccctcctctcccacctcctggcacttccagctgggtgtcccacatgttggattccgtccccaccacacttccagagaccggagaactgtgcagggcctaaggccgtttggatgaattgtcaaaacaagatgcttccagttacagcggcaggagcgggactgggagcacgggctgacggctgctggtgcctttcttcccacctcgcttgcctgtttccgcttgacccttcctccagctccgatgagaagagtataaagcatcttcctaacgggtgtgtttgctatacgaacataatggacgtgaagtggggcagaaacccagaactcagcattcaaggatgcccaggagagctgtccctgttttaaagagctgtgttttgttttgtttcgcatttagagagcagacaaggcacccttctgctgcgctgatacgtttcttacactgggccattttagacccccagggaaacagccttcctggagcgttgtctggaggttccagggacagggcagcctcccagagccgagcaagagctcaaggtacaaatgagagatttgctataccgtgagaagtcaacaacttagccaccacttccccgcaatggaccatgtaacaaatacctcagcaggccctgcaaaaggccatgctagagctgaggcgcacagcctgtggcctctgtagttagggcaggtgggatggagactccttgagtgcacacacctgagcctgcccacacacaggggagcagcatctcgtatgacgtctggaaggaacttcggttgtgtaaagggagccttgaagatacgtgcaaaaggtgctaccccaatttggtgaaactgacattgggcacgtcttgggcttaggagaagcggccgatggtcccggcctgcagtgacaaacccccctccccgcaccgcccccagcaccccctctcctcttcacctcttcctgctggccacgaggaagccacttcctcagagagaccctaccagatgcggatggaaacagatgcaccaaagcaagccctgatgaaaccgcgacttcctaaggtctgtctcctctgaacttgcacctgggcctctctgtgtttggttccaagcacttcccacctcaaactcccattttcaaaccactgtatctctgcgcacatctgctacttaccagccgcatacatgatggagggttttttggtcctgatccagtggccacacctgtctttgaaatgtctcactgaactccagttttaaaatagattcattgcttcaacacagcaagcccaatgcacccagctaagactggcttgaccgacagcctggcctttggtggggggcttcctggggcctggggaaagctggccaccttcaacagctggtacctcttcaacagtgtggcctttcaaaatgcagatgccaccaggagaacatgcccacagctcaccacctatggatgccatggctctgggcagctttcaaagcaggttcctgtggtctcctcagctgtttgagggggtaacagcaaatcagcctccattttaaaatgaaaacaccagcctccagatgtagggcctgctgggtgttgctagccgctggtccccaggcacggtgcactttctccacctcctgcagcctccctgttgtttctagactcttgcacctggtgagtgcaaggataggtgacccaggggcctgcagccttgtcctcagctcccatctcctggactgccagcctcaccctctgcagttagcatggttggcctgatgcagggatcccgagggattactttttagaccttctttcacattcagaaaagtagtatagattcaggagaggcaagaaaattatgctgtccatagaagtcacccatgaagactgatgccaccacctgaaggctcatgattgttaaaaatgtccacgggaacctctcgtccacaggaggtttgtctcaacacttcccatttttacggcattggcattgccaagcatggggaagtatctgctcttctcatgttaaaagtggcccagcttttcttaactcagtccaagctgacttgtttagctgcactggaatttcttaccaaccaaatatttgcatcgagcaaagggggctgtgtgcacctccctaatggcagcgatgatggctgctgtcattcaagcccatcttcagacgtcacagtctggaagtgaaatgtccacaaacatctgtggcagaaaaggctatacggaccacccagttgtgctgcagctttacagagcaaggaagggttgtggcaaataaatgattaacctgcctcgactgtgctgagggcaacaaaggccatctcaccaaaggattattcgatgccattaaatcatcccgtgaccttcctgcttccgagtccatggcctttgcccagggcatgtactcccctgagaggccttctgcctagaaagatctatgactgggttccaaagttgaggcctaggtttttgctgggatttagatattttcaggcaccattttgacagcattcaggaaaacggttattgaccccatagactagggtaagaataaaggcaataaatttggtctgactcagaatataggagatccatatatttctctggaaaccacagtgtacactaaaatgtgaaattgaaggttttgttaaaaagaaaaagataatgagcttcatgctttgtttaattacataatgatttccattacgctatttctgtgaaatgcagcaggttcttaaacgttatttcagtggcatgggctggaagcttatcacaaaaagccatgtgtgtggccttatcagaacagaaagagacaggctggtgcccaaggctgctgcctgctccaccttttgccagctctggacatctgaggacgtcccggcagatctggaatggggccctcaactgaccatttgcttctcagaatttcagtttgagacatgagaggtataatcagttacttttctccccccagagaaacccttttgtgaggggagaggagctatggtatgtggttcagctgaaacacatacaactgcatccttttggagtcctttgccaacaaaaacagaccaacagaccagatggtgtccatgttcaatatcatgtcttgatggacgcagctgatgacctcaaatacttgagtggtctcatggctgttagatggattatttgaaaaaaaaaaaaaaaaaagagagaaaaaataattgatttttacatcagagatagcaaactaagacctggggaggggggtcagcttttattttattttattttttttaagtttgctagttgggtcaaatgtgaggaggagggagtctacctgccacctcttctcttgcccctcttctgcccacacatccagcatccaaaatccattcatttaatgaattgataaagtgccgtgcaaactggtgcacaaacaggcccccagtccacgcagcctggctcctaggaaaagtggtgaccgggcgtgggggggcatgccgcagccctgggacacagtcgggcaccttccccggacccccaggccttggctgtgcctcaagtcagagagggtcagccttcaggccccggagacgagtgactggccgatcatttcacaataaaatcactcacttttggcaacttcactttttttaaggcacagtcagttccttttctcatgtacctcacaaaagatgaagaccatgtagtactctttttggtaaagttacagtgttcatgttaaatatcacttttttctacattgtgtggtaaaaagaactacgttaatagctatatcttaaatactgtgatttgactttttgaaaaatatcctaatacaaatattttactaacttacaatcactcatttaataagaaacatttggattcttttgaaatcagtgttaattgactcatattcttaaaagcctggctcttgaccctattggaaacacaaaggaagctgaaatcaaacatctaaaatacactgcgtacacgtgtgcgtgcacacacacacacacacacacacacacacagctcttcatttctcctgagccatgcagaatttactttcaatgtggaaatctgttccctttaccacactgtatatgcacagagcacaagagaggctatctctagtcacttccaccagcgaggccttagactccgtattagaggccaccgatttcatacaacagtgtttcgctaaagacccttcactattcttgtttagtaaatagctgtctgctcttcagggaactgttacctatgggttattaccaaagaacgctggcaattggaaatgtcctgatggaaattctttgcacgtgccggttctctggcatcctccaggtggcccaacccaaagcagaaagcagaaaccacagaccccgtgagtctccccataccttgtttccaataacttggcaaaacttcttggtgcatattggttacaccctctgggattcataatgccattaggctaaaaccctaagagagagggttgacagaaacacacgcgagaatgaggcagatcccagagcaaggactgggcccagactctccacatgtgctctactagtgagtgccttatactctcagtattttggggcttacagcttcttatttgtgctaaaaaggtgcagttccaaagtaggaactgccacacaggccccagcatcctctctccaacttcatacctctctcctggtggggggagcgggcatccaggacctccggaatcaaggatgtgcagagaagagcgaaagtaatttttctagtcacatgaactgattggttccaggcaattagaaaatggctataaaataaccttaattttaaaaaaaaatcttgggtcttcgttttcctattaggagactgaactgaccacatgtattgatttatatcctgaatatatgggaacttctgtgtttgggatgtcctactgtaagactgatgaatgtacagagttaatttcagggtacagttttgccttaatggttttaaaaaataaactattttttaaaatttt

SEQ ID NO: 323699 - DNA, 10048 bp, Artificial Sequence
  derived and/or modified sequence
gcgccgcctccttcggcgttcgccccacggaccggcaggcggcggaccgcggcccaggctgaagctcagggccctgtctgctctgtggactcaacagtttgtggcaagacaagctcagaactgagaagctgtcaccacaggtaaatagaaggtttaatttactgtttccagatggaaatatttaagtgttttcagtgtttacttctgttgcactacagaccagtagcttggagctcggcggcacaaccagcaccatctggtcgcgatggtggacacggaaagcccactctgccccctctccccactcgaggccggcgatctagagagcccgttatctgaagagttcctgcaagaaatgggaaacatccaagagatttcgcaatccatcggcgaggatagttctggaagctttggctttacggaataccagtatttaggaagctgtcctggctcagatggctcggtcatcacggacacgctttcaccagcttcgagcccctcctcggtgacttatcctgtggtccccggcagcgtggacgagtctcccagtggagcattgaacatcgaatgtagaatctgcggggacaaggcctcaggctatcattacggagtccacgcgtgtgaaggctgcaagggcttctttcggcgaacgattcgactcaagctggtgtatgacaagtgcgaccgcagctgcaagatccagaaaaagaacagaaacaaatgccagtattgtcgatttcacaagtgcctttctgtcgggatgtcacacaacgcgattcgttttggacgaatgccaagatctgagaaagcaaaactgaaagcagaaattcttacctgtgaacatgacatagaagattctgaaactgcagatctcaaatctctggccaagagaatctacgaggcctacttgaagaacttcaacatgaacaaggtcaaagcccgggtcatcctctcaggaaaggccagtaacaatccaccttttgtcatacatgatatggagacactgtgtatggctgagaagacgctggtggccaagctggtggccaatggcatccagaacaaggaggcggaggtccgcatctttcactgctgccagtgcacgtcagtggagaccgtcacggagctcacggaattcgccaaggccatcccaggcttcgcaaacttggacctgaacgatcaagtgacattgctaaaatacggagtttatgaggccatattcgccatgctgtcttctgtgatgaacaaagacgggatgctggtagcgtatggaaatgggtttataactcgtgaattcctaaaaagcctaaggaaaccgttctgtgatatcatggaacccaagtttgattttgccatgaagttcaatgcactggaactggatgacagtgatatctccctttttgtggctgctatcatttgctgtggagatcgtcctggccttctaaacgtaggacacattgaaaaaatgcaggagggtattgtacatgtgctcagactccacctgcagagcaaccacccggacgatatctttctcttcccaaaacttcttcaaaaaatggcagacctccggcagctggtgacggagcatgcgcagctggtgcagatcatcaagaagacggagtcggatgctgcgctgcacccgctactgcaggagatctacagggacatgtactgagttccttcagatcagccacaccttttccaggagttctgaagctgacagcactacaaaggagacgggggagcagcacgattttgcacaaatatccaccactttaaccttagagcttggacagtctgagctgtaggtaaccggcatattattccatatctttgttttaaccagtacttctaagagcatagaactcaaatgctgggggtaggtggctaatctcaggactgggaagattacggcgaattatgctcaatggtctgattttaactcacccgatgttaatcaatgcacattgctttagatcacattcgtgatttaccatttaattaactggtaacctcaaaattcgtggcctgtcttcccattcaccccgcttttgactattgtgctcctttataattctgaaaactaatcagcactttttaacaatgtttataatcctataagtctagatgtatccaaaggtgaagtatgtaaaaagcagcaaaatatttatttcaaagacttcacttctgtttcctgaatctaaagaaagacaacatgctgctttttaatcataggatggagaattttaaagaactgtttgggccaggcacagtcgctcatacttgtaatcccagcactttgggaggccgaggcgggtggatcacaaggtcagcagatcgagaccatcctggccaacatggtgaaaccctgtctctactaaaaatacaaaaattagccgggtgtggtggcacatgcctgtaatcccagctactcgggaagctgaggcaggagaattgcttgaaccagggagttggaggttgcagtgagctaagactgcaccactgcactccagcctggtgacagaacgagactctgtcttaaaaacaaacaaacaaaaaaaaaatctgttagataagctatcaaaatgcagctgttgttttgtttttggctcactgttttcgtggttgtaactaatatgtggaaaggcccatttccaggtttgcgtagaagagcccagaaaacagagtctcaagacccccgctctggactgtcataagctagcacccgtggtaagcgggacgagacaagctcccgaagcccgccagcttcctgctccactcagctccgtccagtcaacctgaacccacccagtccagctgtctgtgggaatggtggtgttcttagggacagactgacaccttacttgtcagtgttcctccgggccccatttggcagctcccgtatcttttgttatgttgcttttaaagatatgatgttttattgttttaactcttggtgacagtagatgctctctggagcgcagacgaggcacatgtgtcttcatagcctgggctgggtgggagccagtcaccctgcggatcgagagagggggtagagtcttcttcaaatggcagttttacttcaaatggcagatttcacaagagttggttattttttacaatggtttaggttgttaagtctcctttgtatgtaaggtagttttttcaacatctaaaatttttgttttagccttcaaaaccaacttaccaacctcagtccagctgggaaggcagcgttgattatggtagtttgtcaagaatatatggacctggaaacactttctctctctgtccacctggtagataaattgtcctgttgagaatttttagatctggactggaactgccaggaccaccgcctccagggagtcgctgggcacctggaggtatcgtcgatgcctctcccccatctttagaaaatttggctcttctgaggtcattattattttaagaatgattaggattgataagggtcccatgaccagcattatgaaaatgcgagagtgggaaggacacagtgtgagacttccactagaaaaaagtgaaagttagggttaggacatccttttttaaaaattacaaatttagtccgttttggtttttgtaatcaggctaggcacagtggctcacacatggaatcccagcactttgggaggccgaggtgggaggatcacttgagcccaggagttcgagaccagcctaggcaacatagcaagaccctgtctgtacacaaaatttaaaaattagttcatcggggtggcacacatcagtagtcccagctactctgcaggctgaggtgggaggattgcttgaacccaggaggtcgaggctgcagtgagctgtgatctcaccactgcattccagcctgggtgacagagttagattccaccctctcccaccccggcaaaaaaaaaaaaaaaagatgcaatcaaaggggctgttggccagcaatggcagcagcagcggcgggcagtctgcccaagtgtcttaggaaccaaaagcaaataaaagtgtttccatatatgccaccagccaagtggccatcctaattcagaaagaagctagcctttgagtgtctgtcatggtgcatccgtttcagtattatttcctaaaatgagaagcccctgtgtcaacaagatccaggggctggagcccaatgccaagcctgtgttgtccccagcgaccctgcagctgctcgctctgatgtaccctgtgccattcaaggagatgtggtccaggaaagtgagcctcatggttttcagagaagtcattgttctgtttacattttcataaaacctgtttaaaatagctccccgtctcaggctttcagcagtaacagtgagctgactggcaagttcgatgttagctcccgggacactcagcagcgatggtgagcattttggtttccttaaggcccagcaagacttccagggacatctctggtgaagccagaatggagacacccgtgacctcaggctgaaagtcactcgacattggtctcttgtgttgatagggaaggaaatcaggcattcctatttctttaaataacaaaaccactaattgccactcaatgctggaatattttgggtcacctaatcatagatttctcagggcatcaatactcaaatataggctgattatgccccagttcaaatgggaactattaacagagtgcatttcttgcttgctgggtttcaacagacatcagccaaaagaacaaaagagatgtcaggacagattccaggagtgtcggagcacatgtgtggcacccgctccctctggcagcgaatgtaggaagtcgccaaatttacccactcttcaacaagtcattgtttaaacacggtttttcattttctcaacttttaatagcaaaaagtgccaaagtcctcagagacctaacagccttggtctaccgtgctgaccagggtgaaggcacggcgagggactcctcccagacgtgcctcttgtgtgccagctggctgtggctcgggagcagacgcaggcctctccattgtccaggggagcctggcggcgcatccctcctctcccacctcctggcacttccagctgggtgtcccacatgttggattccgtccccaccacacttccagagaccggagaactgtgcagggcctaaggccgtttggatgaattgtcaaaacaagatgcttccagttacagcggcaggagcgggactgggagcacgggctgacggctgctggtgcctttcttcccacctcgcttgcctgtttccgcttgacccttcctccagctccgatgagaagagtataaagcatcttcctaacgggtgtgtttgctatacgaacataatggacgtgaagtggggcagaaacccagaactcagcattcaaggatgcccaggagagctgtccctgttttaaagagctgtgttttgttttgtttcgcatttagagagcagacaaggcacccttctgctgcgctgatacgtttcttacactgggccattttagacccccagggaaacagccttcctggagcgttgtctggaggttccagggacagggcagcctcccagagccgagcaagagctcaaggtacaaatgagagatttgctataccgtgagaagtcaacaacttagccaccacttccccgcaatggaccatgtaacaaatacctcagcaggccctgcaaaaggccatgctagagctgaggcgcacagcctgtggcctctgtagttagggcaggtgggatggagactccttgagtgcacacacctgagcctgcccacacacaggggagcagcatctcgtatgacgtctggaaggaacttcggttgtgtaaagggagccttgaagatacgtgcaaaaggtgctaccccaatttggtgaaactgacattgggcacgtcttgggcttaggagaagcggccgatggtcccggcctgcagtgacaaacccccctccccgcaccgcccccagcaccccctctcctcttcacctcttcctgctggccacgaggaagccacttcctcagagagaccctaccagatgcggatggaaacagatgcaccaaagcaagccctgatgaaaccgcgacttcctaaggtctgtctcctctgaacttgcacctgggcctctctgtgtttggttccaagcacttcccacctcaaactcccattttcaaaccactgtatctctgcgcacatctgctacttaccagccgcatacatgatggagggttttttggtcctgatccagtggccacacctgtctttgaaatgtctcactgaactccagttttaaaatagattcattgcttcaacacagcaagcccaatgcacccagctaagactggcttgaccgacagcctggcctttggtggggggcttcctggggcctggggaaagctggccaccttcaacagctggtacctcttcaacagtgtggcctttcaaaatgcagatgccaccaggagaacatgcccacagctcaccacctatggatgccatggctctgggcagctttcaaagcaggttcctgtggtctcctcagctgtttgagggggtaacagcaaatcagcctccattttaaaatgaaaacaccagcctccagatgtagggcctgctgggtgttgctagccgctggtccccaggcacggtgcactttctccacctcctgcagcctccctgttgtttctagactcttgcacctggtgagtgcaaggataggtgacccaggggcctgcagccttgtcctcagctcccatctcctggactgccagcctcaccctctgcagttagcatggttggcctgatgcagggatcccgagggattactttttagaccttctttcacattcagaaaagtagtatagattcaggagaggcaagaaaattatgctgtccatagaagtcacccatgaagactgatgccaccacctgaaggctcatgattgttaaaaatgtccacgggaacctctcgtccacaggaggtttgtctcaacacttcccatttttacggcattggcattgccaagcatggggaagtatctgctcttctcatgttaaaagtggcccagcttttcttaactcagtccaagctgacttgtttagctgcactggaatttcttaccaaccaaatatttgcatcgagcaaagggggctgtgtgcacctccctaatggcagcgatgatggctgctgtcattcaagcccatcttcagacgtcacagtctggaagtgaaatgtccacaaacatctgtggcagaaaaggctatacggaccacccagttgtgctgcagctttacagagcaaggaagggttgtggcaaataaatgattaacctgcctcgactgtgctgagggcaacaaaggccatctcaccaaaggattattcgatgccattaaatcatcccgtgaccttcctgcttccgagtccatggcctttgcccagggcatgtactcccctgagaggccttctgcctagaaagatctatgactgggttccaaagttgaggcctaggtttttgctgggatttagatattttcaggcaccattttgacagcattcaggaaaacggttattgaccccatagactagggtaagaataaaggcaataaatttggtctgactcagaatataggagatccatatatttctctggaaaccacagtgtacactaaaatgtgaaattgaaggttttgttaaaaagaaaaagataatgagcttcatgctttgtttaattacataatgatttccattacgctatttctgtgaaatgcagcaggttcttaaacgttatttcagtggcatgggctggaagcttatcacaaaaagccatgtgtgtggccttatcagaacagaaagagacaggctggtgcccaaggctgctgcctgctccaccttttgccagctctggacatctgaggacgtcccggcagatctggaatggggccctcaactgaccatttgcttctcagaatttcagtttgagacatgagaggtataatcagttacttttctccccccagagaaacccttttgtgaggggagaggagctatggtatgtggttcagctgaaacacatacaactgcatccttttggagtcctttgccaacaaaaacagaccaacagaccagatggtgtccatgttcaatatcatgtcttgatggacgcagctgatgacctcaaatacttgagtggtctcatggctgttagatggattatttgaaaaaaaaaaaaaaaaaagagagaaaaaataattgatttttacatcagagatagcaaactaagacctggggaggggggtcagcttttattttattttattttttttaagtttgctagttgggtcaaatgtgaggaggagggagtctacctgccacctcttctcttgcccctcttctgcccacacatccagcatccaaaatccattcatttaatgaattgataaagtgccgtgcaaactggtgcacaaacaggcccccagtccacgcagcctggctcctaggaaaagtggtgaccgggcgtgggggggcatgccgcagccctgggacacagtcgggcaccttccccggacccccaggccttggctgtgcctcaagtcagagagggtcagccttcaggccccggagacgagtgactggccgatcatttcacaataaaatcactcacttttggcaacttcactttttttaaggcacagtcagttccttttctcatgtacctcacaaaagatgaagaccatgtagtactctttttggtaaagttacagtgttcatgttaaatatcacttttttctacattgtgtggtaaaaagaactacgttaatagctatatcttaaatactgtgatttgactttttgaaaaatatcctaatacaaatattttactaacttacaatcactcatttaataagaaacatttggattcttttgaaatcagtgttaattgactcatattcttaaaagcctggctcttgaccctattggaaacacaaaggaagctgaaatcaaacatctaaaatacactgcgtacacgtgtgcgtgcacacacacacacacacacacacacacacagctcttcatttctcctgagccatgcagaatttactttcaatgtggaaatctgttccctttaccacactgtatatgcacagagcacaagagaggctatctctagtcacttccaccagcgaggccttagactccgtattagaggccaccgatttcatacaacagtgtttcgctaaagacccttcactattcttgtttagtaaatagctgtctgctcttcagggaactgttacctatgggttattaccaaagaacgctggcaattggaaatgtcctgatggaaattctttgcacgtgccggttctctggcatcctccaggtggcccaacccaaagcagaaagcagaaaccacagaccccgtgagtctccccataccttgtttccaataacttggcaaaacttcttggtgcatattggttacaccctctgggattcataatgccattaggctaaaaccctaagagagagggttgacagaaacacacgcgagaatgaggcagatcccagagcaaggactgggcccagactctccacatgtgctctactagtgagtgccttatactctcagtattttggggcttacagcttcttatttgtgctaaaaaggtgcagttccaaagtaggaactgccacacaggccccagcatcctctctccaacttcatacctctctcctggtggggggagcgggcatccaggacctccggaatcaaggatgtgcagagaagagcgaaagtaatttttctagtcacatgaactgattggttccaggcaattagaaaatggctataaaataaccttaattttaaaaaaaaatcttgggtcttcgttttcctattaggagactgaactgaccacatgtattgatttatatcctgaatatatgggaacttctgtgtttgggatgtcctactgtaagactgatgaatgtacagagttaatttcagggtacagttttgccttaatggttttaaaaaataaactattttttaaaatttt

SEQ ID NO: 323700 - DNA, 1558 bp, Artificial Sequence
  derived and/or modified sequence
cacagttctggaggctgggaagttcaagatcaaagtgccagcagattcagtgtcatgtgaggacgtgcttcctgcttcatagataagagcttggagctcggcggcacaaccagcaccatctggtcgcgatggtggacacggaaagcccactctgccccctctccccactcgaggccggcgatctagagagcccgttatctgaagagttcctgcaagaaatgggaaacatccaagagatttcgcaatccatcggcgaggatagttctggaagctttggctttacggaataccagtatttaggaagctgtcctggctcagatggctcggtcatcacggacacgctttcaccagcttcgagcccctcctcggtgacttatcctgtggtccccggcagcgtggacgagtctcccagtggagcattgaacatcgaatgtagaatctgcggggacaaggcctcaggctatcattacggagtccacgcgtgtgaaggctgcaagggcttctttcggcgaacgattcgactcaagctggtgtatgacaagtgcgaccgcagctgcaagatccagaaaaagaacagaaacaaatgccagtattgtcgatttcacaagtgcctttctgtcgggatgtcacacaacgcgattcgttttggacgaatgccaagatctgagaaagcaaaactgaaagcagaaattcttacctgtgaacatgacatagaagattctgaaactgcagatctcaaatctctggccaagagaatctacgaggcctacttgaagaacttcaacatgaacaaggtcaaagcccgggtcatcctctcaggaaaggccagtaacaatccaccttttgtcatacatgatatggagacactgtgtatggctgagaagacgctggtggccaagctggtggccaatggcatccagaacaaggaggcggaggtccgcatctttcactgctgccagtgcacgtcagtggagaccgtcacggagctcacggaattcgccaaggccatcccaggcttcgcaaacttggacctgaacgatcaagtgacattgctaaaatacggagtttatgaggccatattcgccatgctgtcttctgtgatgaacaaagacgggatgctggtagcgtatggaaatgggtttataactcgtgaattcctaaaaagcctaaggaaaccgttctgtgatatcatggaacccaagtttgattttgccatgaagttcaatgcactggaactggatgacagtgatatctccctttttgtggctgctatcatttgctgtggagatcgtcctggccttctaaacgtaggacacattgaaaaaatgcaggagggtattgtacatgtgctcagactccacctgcagagcaaccacccggacgatatctttctcttcccaaaacttcttcaaaaaatggcagacctccggcagctggtgacggagcatgcgcagctggtgcagatcatcaagaagacggagtcggatgctgcgctgcacccgctactgcaggagatctacagggacatgtactgagttccttcagatcagccacacct

SEQ ID NO: 323701 - DNA, 9995 bp, Artificial Sequence
  derived and/or modified sequence
ccaggctgaagctcagggccctgtctgctctgtggactcaacagtttgtggcaagacaagctcagaactgagaagctgtcaccacagttctggaggctgggaagttcaagatcaaagtgccagcagattcagtgtcatgtgaggacgtgcttcctgcttcatagataagagtagcttggagctcggcggcacaaccagcaccatctggtcgcgatggtggacacggaaagcccactctgccccctctccccactcgaggccggcgatctagagagcccgttatctgaagagttcctgcaagaaatgggaaacatccaagagatttcgcaatccatcggcgaggatagttctggaagctttggctttacggaataccagtatttaggaagctgtcctggctcagatggctcggtcatcacggacacgctttcaccagcttcgagcccctcctcggtgacttatcctgtggtccccggcagcgtggacgagtctcccagtggagcattgaacatcgaatgtagaatctgcggggacaaggcctcaggctatcattacggagtccacgcgtgtgaaggctgcaagggcttctttcggcgaacgattcgactcaagctggtgtatgacaagtgcgaccgcagctgcaagatccagaaaaagaacagaaacaaatgccagtattgtcgatttcacaagtgcctttctgtcgggatgtcacacaacgcgattcgttttggacgaatgccaagatctgagaaagcaaaactgaaagcagaaattcttacctgtgaacatgacatagaagattctgaaactgcagatctcaaatctctggccaagagaatctacgaggcctacttgaagaacttcaacatgaacaaggtcaaagcccgggtcatcctctcaggaaaggccagtaacaatccaccttttgtcatacatgatatggagacactgtgtatggctgagaagacgctggtggccaagctggtggccaatggcatccagaacaaggaggcggaggtccgcatctttcactgctgccagtgcacgtcagtggagaccgtcacggagctcacggaattcgccaaggccatcccaggcttcgcaaacttggacctgaacgatcaagtgacattgctaaaatacggagtttatgaggccatattcgccatgctgtcttctgtgatgaacaaagacgggatgctggtagcgtatggaaatgggtttataactcgtgaattcctaaaaagcctaaggaaaccgttctgtgatatcatggaacccaagtttgattttgccatgaagttcaatgcactggaactggatgacagtgatatctccctttttgtggctgctatcatttgctgtggagatcgtcctggccttctaaacgtaggacacattgaaaaaatgcaggagggtattgtacatgtgctcagactccacctgcagagcaaccacccggacgatatctttctcttcccaaaacttcttcaaaaaatggcagacctccggcagctggtgacggagcatgcgcagctggtgcagatcatcaagaagacggagtcggatgctgcgctgcacccgctactgcaggagatctacagggacatgtactgagttccttcagatcagccacaccttttccaggagttctgaagctgacagcactacaaaggagacgggggagcagcacgattttgcacaaatatccaccactttaaccttagagcttggacagtctgagctgtaggtaaccggcatattattccatatctttgttttaaccagtacttctaagagcatagaactcaaatgctgggggtaggtggctaatctcaggactgggaagattacggcgaattatgctcaatggtctgattttaactcacccgatgttaatcaatgcacattgctttagatcacattcgtgatttaccatttaattaactggtaacctcaaaattcgtggcctgtcttcccattcaccccgcttttgactattgtgctcctttataattctgaaaactaatcagcactttttaacaatgtttataatcctataagtctagatgtatccaaaggtgaagtatgtaaaaagcagcaaaatatttatttcaaagacttcacttctgtttcctgaatctaaagaaagacaacatgctgctttttaatcataggatggagaattttaaagaactgtttgggccaggcacagtcgctcatacttgtaatcccagcactttgggaggccgaggcgggtggatcacaaggtcagcagatcgagaccatcctggccaacatggtgaaaccctgtctctactaaaaatacaaaaattagccgggtgtggtggcacatgcctgtaatcccagctactcgggaagctgaggcaggagaattgcttgaaccagggagttggaggttgcagtgagctaagactgcaccactgcactccagcctggtgacagaacgagactctgtcttaaaaacaaacaaacaaaaaaaaaatctgttagataagctatcaaaatgcagctgttgttttgtttttggctcactgttttcgtggttgtaactaatatgtggaaaggcccatttccaggtttgcgtagaagagcccagaaaacagagtctcaagacccccgctctggactgtcataagctagcacccgtggtaagcgggacgagacaagctcccgaagcccgccagcttcctgctccactcagctccgtccagtcaacctgaacccacccagtccagctgtctgtgggaatggtggtgttcttagggacagactgacaccttacttgtcagtgttcctccgggccccatttggcagctcccgtatcttttgttatgttgcttttaaagatatgatgttttattgttttaactcttggtgacagtagatgctctctggagcgcagacgaggcacatgtgtcttcatagcctgggctgggtgggagccagtcaccctgcggatcgagagagggggtagagtcttcttcaaatggcagttttacttcaaatggcagatttcacaagagttggttattttttacaatggtttaggttgttaagtctcctttgtatgtaaggtagttttttcaacatctaaaatttttgttttagccttcaaaaccaacttaccaacctcagtccagctgggaaggcagcgttgattatggtagtttgtcaagaatatatggacctggaaacactttctctctctgtccacctggtagataaattgtcctgttgagaatttttagatctggactggaactgccaggaccaccgcctccagggagtcgctgggcacctggaggtatcgtcgatgcctctcccccatctttagaaaatttggctcttctgaggtcattattattttaagaatgattaggattgataagggtcccatgaccagcattatgaaaatgcgagagtgggaaggacacagtgtgagacttccactagaaaaaagtgaaagttagggttaggacatccttttttaaaaattacaaatttagtccgttttggtttttgtaatcaggctaggcacagtggctcacacatggaatcccagcactttgggaggccgaggtgggaggatcacttgagcccaggagttcgagaccagcctaggcaacatagcaagaccctgtctgtacacaaaatttaaaaattagttcatcggggtggcacacatcagtagtcccagctactctgcaggctgaggtgggaggattgcttgaacccaggaggtcgaggctgcagtgagctgtgatctcaccactgcattccagcctgggtgacagagttagattccaccctctcccaccccggcaaaaaaaaaaaaaaaagatgcaatcaaaggggctgttggccagcaatggcagcagcagcggcgggcagtctgcccaagtgtcttaggaaccaaaagcaaataaaagtgtttccatatatgccaccagccaagtggccatcctaattcagaaagaagctagcctttgagtgtctgtcatggtgcatccgtttcagtattatttcctaaaatgagaagcccctgtgtcaacaagatccaggggctggagcccaatgccaagcctgtgttgtccccagcgaccctgcagctgctcgctctgatgtaccctgtgccattcaaggagatgtggtccaggaaagtgagcctcatggttttcagagaagtcattgttctgtttacattttcataaaacctgtttaaaatagctccccgtctcaggctttcagcagtaacagtgagctgactggcaagttcgatgttagctcccgggacactcagcagcgatggtgagcattttggtttccttaaggcccagcaagacttccagggacatctctggtgaagccagaatggagacacccgtgacctcaggctgaaagtcactcgacattggtctcttgtgttgatagggaaggaaatcaggcattcctatttctttaaataacaaaaccactaattgccactcaatgctggaatattttgggtcacctaatcatagatttctcagggcatcaatactcaaatataggctgattatgccccagttcaaatgggaactattaacagagtgcatttcttgcttgctgggtttcaacagacatcagccaaaagaacaaaagagatgtcaggacagattccaggagtgtcggagcacatgtgtggcacccgctccctctggcagcgaatgtaggaagtcgccaaatttacccactcttcaacaagtcattgtttaaacacggtttttcattttctcaacttttaatagcaaaaagtgccaaagtcctcagagacctaacagccttggtctaccgtgctgaccagggtgaaggcacggcgagggactcctcccagacgtgcctcttgtgtgccagctggctgtggctcgggagcagacgcaggcctctccattgtccaggggagcctggcggcgcatccctcctctcccacctcctggcacttccagctgggtgtcccacatgttggattccgtccccaccacacttccagagaccggagaactgtgcagggcctaaggccgtttggatgaattgtcaaaacaagatgcttccagttacagcggcaggagcgggactgggagcacgggctgacggctgctggtgcctttcttcccacctcgcttgcctgtttccgcttgacccttcctccagctccgatgagaagagtataaagcatcttcctaacgggtgtgtttgctatacgaacataatggacgtgaagtggggcagaaacccagaactcagcattcaaggatgcccaggagagctgtccctgttttaaagagctgtgttttgttttgtttcgcatttagagagcagacaaggcacccttctgctgcgctgatacgtttcttacactgggccattttagacccccagggaaacagccttcctggagcgttgtctggaggttccagggacagggcagcctcccagagccgagcaagagctcaaggtacaaatgagagatttgctataccgtgagaagtcaacaacttagccaccacttccccgcaatggaccatgtaacaaatacctcagcaggccctgcaaaaggccatgctagagctgaggcgcacagcctgtggcctctgtagttagggcaggtgggatggagactccttgagtgcacacacctgagcctgcccacacacaggggagcagcatctcgtatgacgtctggaaggaacttcggttgtgtaaagggagccttgaagatacgtgcaaaaggtgctaccccaatttggtgaaactgacattgggcacgtcttgggcttaggagaagcggccgatggtcccggcctgcagtgacaaacccccctccccgcaccgcccccagcaccccctctcctcttcacctcttcctgctggccacgaggaagccacttcctcagagagaccctaccagatgcggatggaaacagatgcaccaaagcaagccctgatgaaaccgcgacttcctaaggtctgtctcctctgaacttgcacctgggcctctctgtgtttggttccaagcacttcccacctcaaactcccattttcaaaccactgtatctctgcgcacatctgctacttaccagccgcatacatgatggagggttttttggtcctgatccagtggccacacctgtctttgaaatgtctcactgaactccagttttaaaatagattcattgcttcaacacagcaagcccaatgcacccagctaagactggcttgaccgacagcctggcctttggtggggggcttcctggggcctggggaaagctggccaccttcaacagctggtacctcttcaacagtgtggcctttcaaaatgcagatgccaccaggagaacatgcccacagctcaccacctatggatgccatggctctgggcagctttcaaagcaggttcctgtggtctcctcagctgtttgagggggtaacagcaaatcagcctccattttaaaatgaaaacaccagcctccagatgtagggcctgctgggtgttgctagccgctggtccccaggcacggtgcactttctccacctcctgcagcctccctgttgtttctagactcttgcacctggtgagtgcaaggataggtgacccaggggcctgcagccttgtcctcagctcccatctcctggactgccagcctcaccctctgcagttagcatggttggcctgatgcagggatcccgagggattactttttagaccttctttcacattcagaaaagtagtatagattcaggagaggcaagaaaattatgctgtccatagaagtcacccatgaagactgatgccaccacctgaaggctcatgattgttaaaaatgtccacgggaacctctcgtccacaggaggtttgtctcaacacttcccatttttacggcattggcattgccaagcatggggaagtatctgctcttctcatgttaaaagtggcccagcttttcttaactcagtccaagctgacttgtttagctgcactggaatttcttaccaaccaaatatttgcatcgagcaaagggggctgtgtgcacctccctaatggcagcgatgatggctgctgtcattcaagcccatcttcagacgtcacagtctggaagtgaaatgtccacaaacatctgtggcagaaaaggctatacggaccacccagttgtgctgcagctttacagagcaaggaagggttgtggcaaataaatgattaacctgcctcgactgtgctgagggcaacaaaggccatctcaccaaaggattattcgatgccattaaatcatcccgtgaccttcctgcttccgagtccatggcctttgcccagggcatgtactcccctgagaggccttctgcctagaaagatctatgactgggttccaaagttgaggcctaggtttttgctgggatttagatattttcaggcaccattttgacagcattcaggaaaacggttattgaccccatagactagggtaagaataaaggcaataaatttggtctgactcagaatataggagatccatatatttctctggaaaccacagtgtacactaaaatgtgaaattgaaggttttgttaaaaagaaaaagataatgagcttcatgctttgtttaattacataatgatttccattacgctatttctgtgaaatgcagcaggttcttaaacgttatttcagtggcatgggctggaagcttatcacaaaaagccatgtgtgtggccttatcagaacagaaagagacaggctggtgcccaaggctgctgcctgctccaccttttgccagctctggacatctgaggacgtcccggcagatctggaatggggccctcaactgaccatttgcttctcagaatttcagtttgagacatgagaggtataatcagttacttttctccccccagagaaacccttttgtgaggggagaggagctatggtatgtggttcagctgaaacacatacaactgcatccttttggagtcctttgccaacaaaaacagaccaacagaccagatggtgtccatgttcaatatcatgtcttgatggacgcagctgatgacctcaaatacttgagtggtctcatggctgttagatggattatttgaaaaaaaaaaaaaaaaaagagagaaaaaataattgatttttacatcagagatagcaaactaagacctggggaggggggtcagcttttattttattttattttttttaagtttgctagttgggtcaaatgtgaggaggagggagtctacctgccacctcttctcttgcccctcttctgcccacacatccagcatccaaaatccattcatttaatgaattgataaagtgccgtgcaaactggtgcacaaacaggcccccagtccacgcagcctggctcctaggaaaagtggtgaccgggcgtgggggggcatgccgcagccctgggacacagtcgggcaccttccccggacccccaggccttggctgtgcctcaagtcagagagggtcagccttcaggccccggagacgagtgactggccgatcatttcacaataaaatcactcacttttggcaacttcactttttttaaggcacagtcagttccttttctcatgtacctcacaaaagatgaagaccatgtagtactctttttggtaaagttacagtgttcatgttaaatatcacttttttctacattgtgtggtaaaaagaactacgttaatagctatatcttaaatactgtgatttgactttttgaaaaatatcctaatacaaatattttactaacttacaatcactcatttaataagaaacatttggattcttttgaaatcagtgttaattgactcatattcttaaaagcctggctcttgaccctattggaaacacaaaggaagctgaaatcaaacatctaaaatacactgcgtacacgtgtgcgtgcacacacacacacacacacacacacacacagctcttcatttctcctgagccatgcagaatttactttcaatgtggaaatctgttccctttaccacactgtatatgcacagagcacaagagaggctatctctagtcacttccaccagcgaggccttagactccgtattagaggccaccgatttcatacaacagtgtttcgctaaagacccttcactattcttgtttagtaaatagctgtctgctcttcagggaactgttacctatgggttattaccaaagaacgctggcaattggaaatgtcctgatggaaattctttgcacgtgccggttctctggcatcctccaggtggcccaacccaaagcagaaagcagaaaccacagaccccgtgagtctccccataccttgtttccaataacttggcaaaacttcttggtgcatattggttacaccctctgggattcataatgccattaggctaaaaccctaagagagagggttgacagaaacacacgcgagaatgaggcagatcccagagcaaggactgggcccagactctccacatgtgctctactagtgagtgccttatactctcagtattttggggcttacagcttcttatttgtgctaaaaaggtgcagttccaaagtaggaactgccacacaggccccagcatcctctctccaacttcatacctctctcctggtggggggagcgggcatccaggacctccggaatcaaggatgtgcagagaagagcgaaagtaatttttctagtcacatgaactgattggttccaggcaattagaaaatggctataaaataaccttaattttaaaaaaaaatcttgggtcttcgttttcctattaggagactgaactgaccacatgtattgatttatatcctgaatatatgggaacttctgtgtttgggatgtcctactgtaagactgatgaatgtacagagttaatttcagggtacagttttgccttaatggttttaaaaaataaactattttttaaaattt

SEQ ID NO: 323702 - DNA, 531 bp, Artificial Sequence
  derived and/or modified sequence
gcagcgggcggcgggggcggaggcggccgctagcgccctgcccggcgccgcctccttcggcgttcgccccacggaccggcaggcggcggaccgcggcccaggctgaagctcagggccctgtctgctctgtggactcaacagtttgtggcaagacaagctcagaactgagaagctgtcaccacagtgccacacccccctgtcccagtgcactggggctgtggatcccttcaaagctgagattgcctgtctgtggtctccagcgttaagcacagtcattagctcagcttggagctcggcggcacaaccagcaccatctggtcgcgatggtggacacggaaagcccactctgccccctctccccactcgaggccggcgatctagagagcccgttatctgaagagttcctgcaagaaatgggaaacatccaagagatttcgcaatccatcggcgaggatagttctggaagctttggctttacggaataccagtatttaggaagctgtcctggctcagatggctcggtcatcacgg

SEQ ID NO: 323703 - DNA, 572 bp, Artificial Sequence
  derived and/or modified sequence
cttcggcgttcgccccacggaccggcaggcggcggaccgcggcccaggctgaagctcagggccctgtctgctctgtggactcaacagtttgtggcaagacaagctcagaactgagaagctgtcaccacagtagcttggagctcggcggcacaaccagcaccatctggtcgcgatggtggacacggaaagcccactctgccccctctccccactcgaggccggcgatctagagagcccgttatctgaagagttcctgcaagaaatgggaaacatccaagagatttcgcaatccatcggcgaggatagttctggaagctttggctttacggaataccagtatttaggaagctgtcctggctcagatggctcggtcatcacggacacgctttcaccagcttcgagcccctcctcggtgacttatcctgtggtccccggcagcgtggacgagtctcccagtggagcattgaacatcgaatgtagaatctgcggggacaaggcctcaggctatcattacggagtccacgcgtgtgaaggctgcaaggtagaggggagctggaacagggcctggtggc

SEQ ID NO: 323704 - DNA, 2327 bp, Artificial Sequence
  derived and/or modified sequence
gtgcgcggctggggacctgagggcgaggagcgaggacacacaccgaggactcttgcgagggatctcggggcccagctcggcctccctcctagcgctgggggcctgcccggaacccgagtccgcggctgtccctggggtttggcgctgcgcggaggtcgggtctggggaccgcagcgactctgggtcttcgggttgtcccctcggagggagggcccacgggcggggacatcgggacttgccctttcctcggcgcagcggagctggggcgtcgccgactcagaaggtgctttccgagacctccagggatctccgaggcgaggaaacccgggccccggacagaccgaccctgggctgaagctcagggccctgtctgctctgtggactcaacagtttgtggcaagacaagctcagaactgagaagctgtcaccacagttctggaggctgggaagttcaagatcaaagtgccagcagattcagtgtcatgtgaggacgtgcttcctgcttcatagataagagtagcttggagctcggcggcacaaccagcaccatctggtcgcgatggtggacacggaaagcccactctgccccctctccccactcgaggccggcgatctagagagcccgttatctgaagagttcctgcaagaaatgggaaacatccaagagatttcgcaatccatcggcgaggatagttctggaagctttggctttacggaataccagtatttaggaagctgtcctggctcagatggctcggtcatcacggacacgctttcaccagcttcgagcccctcctcggtgacttatcctgtggtccccggcagcgtggacgagtctcccagtggagcattgaacatcgaatgtagaatctgcggggacaaggcctcaggctatcattacggagtccacgcgtgtgaaggctgcaagggcttctttcggcgaacgattcgactcaagctggtgtatgacaagtgcgaccgcagctgcaagatccagaaaaagaacagaaacaaatgccagtattgtcgatttcacaagtgcctttctgtcgggatgtcacacaacgcgattcgttttggacgaatgccaagatctgagaaagcaaaactgaaagcagaaattcttacctgtgaacatgacatagaagattctgaaactgcagatctcaaatctctggccaagagaatctacgaggcctacttgaagaacttcaacatgaacaaggtcaaagcccgggtcatcctctcaggaaaggccagtaacaatccaccttttgtcatacatgatatggagacactgtgtatggctgagaagacgctggtggccaagctggtggccaatggcatccagaacaaggaggcggaggtccgcatctttcactgctgccagtgcacgtcagtggagaccgtcacggagctcacggaattcgccaaggccatcccaggcttcgcaaacttggacctgaacgatcaagtgacattgctaaaatacggagtttatgaggccatattcgccatgctgtcttctgtgatgaacaaagacgggatgctggtagcgtatggaaatgggtttataactcgtgaattcctaaaaagcctaaggaaaccgttctgtgatatcatggaacccaagtttgattttgccatgaagttcaatgcactggaactggatgacagtgatatctccctttttgtggctgctatcatttgctgtggagatcgtcctggccttctaaacgtaggacacattgaaaaaatgcaggagggtattgtacatgtgctcagactccacctgcagagcaaccacccggacgatatctttctcttcccaaaacttcttcaaaaaatggcagacctccggcagctggtgacggagcatgcgcagctggtgcagatcatcaagaagacggagtcggatgctgcgctgcacccgctactgcaggagatctacagggacatgtactgagttccttcagatcagccacaccttttccaggagttctgaagctgacagcactacaaaggagacgggggagcagcacgattttgcacaaatatccaccactttaaccttagagcttggacagtctgagctgtaggtaaccggcatattattccatatctttgttttaaccagtacttctaagagcatagaactcaaatgctgggggtaggtggctaatctcaggactgggaagattacggcgaattatgctcaatggtctgattttaactcacccgatgttaatcaatgcacattgctttagatcacattcgtgatttaccatttaattaactggtaacctcaaaattcgtggcctgtcttc

SEQ ID NO: 323705 - DNA, 1407 bp, Artificial Sequence
  derived and/or modified sequence
atggtggacacagagagcccactctgtcctctgtctccactcgaggctggggacctcgagtcgccactgtcggaggaattcctccaggaaatgggcaatattcaggaaatatcacagtccataggcgaggattcctccgggtcctttggattcaccgagtatcaatacctgggtagttgcccgggttccgatgggtccgtgatcaccgatacattgagcccggcaagctctccgagctccgttacatatccagtagtgcccggaagcgtggatgagagtccatcaggtgctctaaatatcgaatgcagaatatgcggcgacaaggccagtgggtaccattacggggtgcatgcgtgtgagggttgcaaggggttcttcagaagaacaataagactgaaactggtctacgataagtgtgatcggtcctgcaaaattcagaagaaaaacaggaacaaatgccagtactgtagatttcacaagtgtctctctgtcgggatgtcacacaacgcgattcgattcggaagaatgcctagaagtgagaaggcaaagctgaaagctgaaattctcacctgcgagcatgatatcgaggactccgagactgctgatttaaaatctctggctaaacgtatctatgaagcttacctaaagaacttcaatatgaataaggtgaaagctagggttattctctctggaaaagcatccaacaatccgccatttgtgatccacgatatggagaccttatgtatggccgaaaaaaccctggtggccaaactggttgccaacggcatccaaaataaagaagctgaggttagaatctttcactgctgtcagtgtacaagtgttgagaccgttaccgagctgacagagttcgcaaaggccataccaggattcgccaacctcgatttgaacgaccaagtgactctcttgaagtatggggtatacgaggccatcttcgcaatgctaagttccgtaatgaacaaagacggaatgctggtcgcgtacggaaacgggttcataacccgggagtttctcaagtcgttacggaaacctttttgcgacatcatggaaccgaagttcgactttgctatgaaatttaacgcgctggaactggatgatagtgacatttcactctttgtggctgccatcatttgctgtggcgataggccaggtctgctaaacgttggtcacatcgagaagatgcaagaaggtatcgtgcatgtgctgcggctccatcttcagtccaatcaccccgacgacattttcctttttcctaagctgctgcagaaaatggctgaccttcggcagctggtcactgagcatgctcagctggtgcaaatcatcaaaaaaaccgagagcgatgcggcattacaccctctactgcaggaaatctacagagacatgtattag

SEQ ID NO: 323706 - DNA, 1407 bp, Artificial Sequence
  derived and/or modified sequence
atggtggacaccgaatcccctctgtgtcctttatcgcccttggaggcaggcgatctggagtctcccctgtccgaagaatttctgcaagaaatgggtaatatacaagagatatcacagagcataggggaagactccagtggttcctttggcttcaccgaatatcagtacctcggctcatgtcccggtagtgacggctccgtaataactgacacactatcccccgcttcaagtccgtctagcgttacttatcccgttgtgcccggatccgtcgacgaatcgcccagcggtgcactgaacatagaatgccgcatctgcggtgacaaggctagcggctaccattatggagtgcacgcctgcgagggttgtaaaggcttttttcggcgaaccattcgcctgaagctggtgtacgacaagtgcgaccgcagctgtaagattcagaaaaagaaccggaacaagtgtcagtactgcaggtttcataagtgcctcagcgtaggaatgtctcataatgctatacgctttggcaggatgcccaggagcgaaaaagccaaactgaaagctgagatcctgacatgcgaacacgacatagaagatagcgaaaccgcggacttgaagagcttagccaagcgcatttacgaggcttatctcaaaaacttcaacatgaataaggtcaaagctcgagtaattctgtccggtaaagcaagtaataatccaccctttgtgatacacgatatggagaccctgtgtatggccgagaagactcttgttgccaagcttgtggccaacgggatccagaacaaagaggccgaagtccggattttccactgctgtcagtgtacctctgtggagactgtcactgaactcaccgaattcgccaaagccatccctggattcgccaacctcgacctgaacgaccaagtgacgctactcaagtatggcgtgtacgaagctatcttcgctatgctctccagcgtgatgaacaaagatgggatgctcgtggcatatggcaatggattcattacacgggagttcctgaagtccctgcgcaagcctttttgtgacattatggagccaaagttcgactttgccatgaaattcaatgctctggaattggacgacagtgatatctcactcttcgtggctgctattatctgctgtggtgaccgacccggtctgctcaatgtgggtcatatcgaaaagatgcaggaagggatcgttcacgttctccggcttcacctccaatcgaatcaccccgacgatatctttcttttcccaaaactgctgcagaaaatggccgacctgcgtcagcttgtcaccgaacatgcccagcttgtacaaatcataaagaagactgaatcagatgcagctctgcatcccctgctccaagaaatttaccgtgatatgtattag

SEQ ID NO: 323707 - DNA, 1407 bp, Artificial Sequence
  derived and/or modified sequence
atggttgataccgagagtccactctgccctctctcaccacttgaggcaggagacttggaatcaccactgtctgaggaattcctgcaggagatgggaaacattcaggaaatcagtcagtcaatcggcgaggatagttctgggtcattcgggttcacggagtaccaatatctcggaagctgtcccggttccgatggaagtgtcatcacagacaccttgagtccggctagcagcccttctagcgtcacttatccagttgtgcccggaagcgtggacgagtctccatccggggcactgaatatcgagtgtcgaatatgtggagacaaagcctccggctaccattatggcgtgcatgcatgcgaagggtgtaaggggttttttcgtcggacaatcagactgaagctcgtttatgacaagtgcgacagatcatgcaagatccaaaagaaaaaccgcaacaaatgccaatactgtcggttccataaatgcctgtcagtcgggatgtcacacaatgcgataaggttcggacgcatgcctcggagtgagaaggccaaattaaaggccgagatcctgacttgtgagcacgatattgaggactcagaaaccgccgacttgaaatccttggctaagcggatatacgaggcctatctgaagaactttaacatgaacaaagtgaaagccagggtcatcctgagcggcaaagccagcaataaccccccttttgtgattcacgatatggaaacactgtgtatggccgagaaaaccttagtggccaagctggtagcaaacgggattcaaaacaaggaggcagaggtccggatatttcattgctgccaatgtacttccgttgagaccgtcacagagctcaccgagtttgccaaggccattcctggctttgcgaacctggatctgaatgaccaggtcacactgctcaagtacggggtgtacgaggcaatattcgccatgttgagtagtgtgatgaataaggacgggatgctggtcgcttacgggaatgggttcattacaagagaatttctgaagtctctgcgaaaacccttctgtgatattatggagcctaagttcgactttgccatgaagtttaacgcattagagctggatgatagtgacatcagtctgttcgtagccgcaattatctgctgcggggaccggccaggactattaaacgtcgggcacatcgagaaaatgcaggagggaatagtccatgttttaagactgcacttgcaatctaatcacccagatgacattttcctgtttcctaaactgctgcagaaaatggccgacctgagacagcttgtgacagaacacgctcagctggtccagataatcaagaagactgagtctgatgctgcactccacccgctcttacaagaaatctacagagatatgtactag

SEQ ID NO: 323708 - DNA, 1407 bp, Artificial Sequence
  derived and/or modified sequence
atggtggacacagagtcccccctgtgcccactgtcacctcttgaggcaggagatctggagagccctctgtctgaagagtttcttcaagagatgggtaacattcaggaaatcagccagtctatcggggaggactcctcaggctcctttgggtttaccgagtatcaatacctcgggtcatgtccaggtagtgatggctcagtcatcacagatacactaagcccagcctcctccccatcctccgttacttatcccgtcgtgcccggatccgtggatgaatccccctccggcgcactgaatattgagtgtagaatctgcggtgacaaggcctctggatatcactacggagttcatgcctgcgaaggttgtaagggcttcttcagaaggactatccgcctgaaactggtttacgacaaatgcgatagaagctgtaaaatccagaaaaagaacagaaacaagtgccagtactgtcgattccacaagtgtctgagcgtggggatgagccataatgctatccgctttggaaggatgcccaggtctgagaaggccaaacttaaggccgagatcctgacctgcgagcatgacatcgaggacagcgaaacagctgatctcaagagcctggccaagcgcatctacgaagcttacctcaaaaatttcaatatgaacaaggtgaaagcccgagtgattctgagtggaaaagcaagcaataatccgcctttcgtaattcacgatatggagaccttgtgcatggccgaaaaaactctcgttgcaaagcttgttgccaatggaattcagaacaaagaagcagaagtgaggatctttcactgctgtcagtgtacctcagttgaaacagtgaccgagctgacggagtttgctaaggccatacccggatttgcaaatctggacctgaatgaccaagtaacactcctcaagtatggggtctatgaggccatcttcgctatgctctcttctgtgatgaataaggatggcatgctcgttgcctatggcaacggttttatcactagggaattcttgaaatcactccgcaagcctttctgtgacatcatggagcccaaatttgattttgctatgaaattcaatgctcttgagctcgacgacagtgatataagtctctttgtggccgctatcatctgctgtggtgataggcctggcttattaaatgtaggccatatcgaaaagatgcaggagggaatagttcacgtgctgaggctgcaccttcaaagcaaccaccccgacgacatatttcttttccctaagctcctccagaagatggctgatctgaggcagctggtgaccgaacacgcccagctcgtacaaatcatcaagaaaactgaaagcgacgccgctctgcacccactcctccaggagatttatcgcgatatgtactag

SEQ ID NO: 323709 - DNA, 210 bp, Artificial Sequence
  derived and/or modified sequence
atggtagatacagagtctcctctgtgtccactctcaccactggaagccggtgacttggaatctcccctgtccgaagagttcttacaagagatgggaaatatacaggaaatatcacaatctataggagaggactcttccgggtcatttggcttcactgaataccaatacctgggctcctgtcctgggtctgacggcagcgtcataacttag

SEQ ID NO: 323710 - DNA, 402 bp, Artificial Sequence
  derived and/or modified sequence
atggtcgacaccgagtctccactctgtccactgtcacctctggaagccggagacctggagtctcccctgagtgaggagtttctgcaggaaatgggcaacatccaggagatcagtcagagcatcggtgaggattcttctggttccttcggctttaccgagtatcagtaccttggttcatgccctgggagcgatggcagcgtgattactgatacattatcacctgcttcatcaccgagctctgtgacatacccggtggtacctggttccgtagacgaatctcctagcggcgcactgaacatcgagtgcagaatttgcggagataaggccagcggataccattatggagtccatgcctgtgaaggttgcaaagtcgagggctcctggaatcgtgcatggtggtag

SEQ ID NO: 323711 - DNA, 525 bp, Artificial Sequence
  derived and/or modified sequence
atggtagacacagaatcgcccttgtgcccactttccccattagaagcaggcgacctggaatcccccctcagcgaagaatttctccaagagatgggaaatattcaagagatttcacagtctataggcgaggactcttctggtagctttgggtttacagagtaccagtatcttggaagttgtccgggaagtgatggaagcgtaataactgatactctctcccctgcaagtagtccatcctcagtgacatatcctgtagtgcctggttcagtcgatgagtctccgtccggagctctgaacattgagtgtaggatttgcggagataaggcgagtggctatcattatggcgttcacgcatgcgagggctgtaagggcttcttccgtcgcaccattagactgaagctcgtgtatgacaagtgcgatcggtcatgtaaaatccaaaaaaaaaaccggaataagtgccagtactgcagatttcataagtgcctgtctgtgggaatgtcgcacaatgccttctgtcacacctag

SEQ ID NO: 323712 - DNA, 30 bp, Artificial Sequence
  derived and/or modified sequence
atggtggataccgaatcacccctctgctag

SEQ ID NO: 323713 - DNA, 1407 bp, Artificial Sequence
  derived and/or modified sequence
atggtggacaccgagagccccctgtgccccctgagccccctggaggccggcgacctggagagccccctgagcgaggagttcctgcaggagatgggcaacatccaggagatcagccagagcatcggcgaggacagcagcggcagcttcggcttcaccgagtaccagtacctgggcagctgccccggcagcgacggcagcgtgatcaccgacaccctgagccccgccagcagccccagcagcgtgacctaccccgtggtgcccggcagcgtggacgagagccccagcggcgccctgaacatcgagtgcagaatctgcggcgacaaggccagcggctaccactacggcgtgcacgcctgcgagggctgcaagggcttcttcagaagaaccatcagactgaagctggtgtacgacaagtgcgacagaagctgcaagatccagaagaagaacagaaacaagtgccagtactgcagattccacaagtgcctgagcgtgggcatgagccacaacgccatcagattcggcagaatgcccagaagcgagaaggccaagctgaaggccgagatcctgacctgcgagcacgacatcgaggacagcgagaccgccgacctgaagagcctggccaagagaatctacgaggcctacctgaagaacttcaacatgaacaaggtgaaggccagagtgatcctgagcggcaaggccagcaacaacccccccttcgtgatccacgacatggagaccctgtgcatggccgagaagaccctggtggccaagctggtggccaacggcatccagaacaaggaggccgaggtgagaatcttccactgctgccagtgcaccagcgtggagaccgtgaccgagctgaccgagttcgccaaggccatccccggcttcgccaacctggacctgaacgaccaggtgaccctgctgaagtacggcgtgtacgaggccatcttcgccatgctgagcagcgtgatgaacaaggacggcatgctggtggcctacggcaacggcttcatcaccagagagttcctgaagagcctgagaaagcccttctgcgacatcatggagcccaagttcgacttcgccatgaagttcaacgccctggagctggacgacagcgacatcagcctgttcgtggccgccatcatctgctgcggcgacagacccggcctgctgaacgtgggccacatcgagaagatgcaggagggcatcgtgcacgtgctgagactgcacctgcagagcaaccaccccgacgacatcttcctgttccccaagctgctgcagaagatggccgacctgagacagctggtgaccgagcacgcccagctggtgcagatcatcaagaagaccgagagcgacgccgccctgcaccccctgctgcaggagatctacagagacatgtactag

SEQ ID NO: 323714 - DNA, 210 bp, Artificial Sequence
  derived and/or modified sequence
atggtggacaccgagagccccctgtgccccctgagccccctggaggccggcgacctggagagccccctgagcgaggagttcctgcaggagatgggcaacatccaggagatcagccagagcatcggcgaggacagcagcggcagcttcggcttcaccgagtaccagtacctgggcagctgccccggcagcgacggcagcgtgatcacctag

SEQ ID NO: 323715 - DNA, 402 bp, Artificial Sequence
  derived and/or modified sequence
atggtggacaccgagagccccctgtgccccctgagccccctggaggccggcgacctggagagccccctgagcgaggagttcctgcaggagatgggcaacatccaggagatcagccagagcatcggcgaggacagcagcggcagcttcggcttcaccgagtaccagtacctgggcagctgccccggcagcgacggcagcgtgatcaccgacaccctgagccccgccagcagccccagcagcgtgacctaccccgtggtgcccggcagcgtggacgagagccccagcggcgccctgaacatcgagtgcagaatctgcggcgacaaggccagcggctaccactacggcgtgcacgcctgcgagggctgcaaggtggagggcagctggaacagagcctggtggtag

SEQ ID NO: 323716 - DNA, 525 bp, Artificial Sequence
  derived and/or modified sequence
atggtggacaccgagagccccctgtgccccctgagccccctggaggccggcgacctggagagccccctgagcgaggagttcctgcaggagatgggcaacatccaggagatcagccagagcatcggcgaggacagcagcggcagcttcggcttcaccgagtaccagtacctgggcagctgccccggcagcgacggcagcgtgatcaccgacaccctgagccccgccagcagccccagcagcgtgacctaccccgtggtgcccggcagcgtggacgagagccccagcggcgccctgaacatcgagtgcagaatctgcggcgacaaggccagcggctaccactacggcgtgcacgcctgcgagggctgcaagggcttcttcagaagaaccatcagactgaagctggtgtacgacaagtgcgacagaagctgcaagatccagaagaagaacagaaacaagtgccagtactgcagattccacaagtgcctgagcgtgggcatgagccacaacgccttctgccacacctag

SEQ ID NO: 323717 - DNA, 30 bp, Artificial Sequence
  derived and/or modified sequence
atggtggacaccgagagccccctgtgctag

SEQ ID NO: 323718 - protein, 162 aa, Artificial Sequence
  derived and/or modified sequence
MNKVKARVILSGKASNNPPFVIHDMETLCMAEKTLVAKLVANGIQNKEAEVRIFHCCQCTSVETVTELTEFAKAIPGFANLDLNDQVTLLKYGVYEAIFAMLSSVMNKDGMLVAYGNGFITREFLKSLRKPFCDIMEPKFDFAMKFNALELDDSDISLFVAA

SEQ ID NO: 323719 - DNA, 489 bp, Artificial Sequence
  derived and/or modified sequence
atgaacaaggttaaggcacgagtcatattatctggcaaagcttctaataaccctccatttgtcatccacgacatggagaccctctgtatggctgaaaaaacactggttgcgaagctcgtcgcgaatggcattcagaataaggaggcagaggtgcgaatctttcattgttgtcaatgcacctcagtggaaactgtcacagagctgacagagtttgccaaggcgattcctggattcgcgaatttggacctgaacgatcaggtaactttgctgaaatacggcgtatatgaggctattttcgcaatgttgtccagcgttatgaacaaagacggaatgcttgtcgcttatggtaatggattcatcacaagagaatttctgaaaagcttgcggaagcccttctgcgatattatggagccgaaattcgactttgctatgaagttcaatgcgctggaactggatgacagcgacatttccctgttcgttgcagcctag

SEQ ID NO: 323720 - DNA, 489 bp, Artificial Sequence
  derived and/or modified sequence
atgaacaaggtgaaggcccgggtcatcctgagcggcaaggccagcaacaacccccccttcgtcatccatgacatggagaccctgtgcatggccgagaagaccctggtggccaagctggtggccaacggcatccagaacaaggaggccgaggtgcgcatcttccactgctgccagtgcacctctgtggagaccgtgacagagctgacagaatttgccaaggccatccctggctttgccaacctggacctgaatgaccaggtgaccctgctgaagtatggagtgtatgaggccatctttgccatgctgagctctgtgatgaacaaggatggcatgctggtggcctatggaaatggcttcatcacccgggagttcctgaagagcctgaggaagcccttctgtgacatcatggagcccaagtttgattttgccatgaagttcaatgccctggagctggatgacagcgacatcagcctgtttgtggccgcctag

SEQ ID NO: 323721 - DNA, 489 bp, Artificial Sequence
  derived and/or modified sequence
atgaacaaggtgaaggcccgggtgatcctgagcggcaaggccagcaacaatccaccattcgtgatccacgatatggagacattgtgcatggcagaaaaaactctggttgccaagctcgttgccaacggcatccagaataaggaagcagaggtgaggattttccactgttgccagtgcaccagcgttgaaactgttacagagctgaccgaatttgccaaggcaataccagggtttgccaacctcgacctgaacgaccaggttacgcttctcaaatacggagtgtacgaggcgatcttcgccatgctgagctcagtgatgaacaaggatggcatgctggtggcctatggcaacggcttcataacccgtgagttcctgaagagcttaagaaagccattctgcgacataatggagcccaaattcgactttgcaatgaaatttaatgccttggaactggacgacagcgatattagcctctttgttgcagcctag

SEQ ID NO: 323722 - DNA, 1204 bp, Artificial Sequence
  derived and/or modified sequence
atggtggacacggaaagcccactctgccccctctccccactcgaggccggcgatctagagagcccgttatctgaagagttcctgcaagaaatgggaaacatccaagagatttcgcaatccatcggcgaggatagttctggaagctttggctttacggaataccagtatttaggaagctgtcctggctcagatggctcggtcatcacggacacgctttcaccagcttcgagcccctcctcggtgacttatcctgtggtccccggcagcgtggacgagtctcccagtggagcattgaacatcgaatgtagaatctgcggggacaaggcctcaggctatcattacggagtccacgcgtgtgaaggctgcaagggcttctttcggcgaacgattcgactcaagctggtgtatgacaagtgcgaccgcagctgcaagatccagaaaaagaacagaaacaaatgccagtattgtcgatttcacaagtgcctttctgtcgggatgtcacacaacgccttttgtcatacatgatatggagacactgtgtatggctgagaagacgctggtggccaagctggtggccaatggcatccagaacaaggaggcggaggtccgcatctttcactgctgccagtgcacgtcagtggagaccgtcacggagctcacggaattcgccaaggccatcccaggcttcgcaaacttggacctgaacgatcaagtgacattgctaaaatacggagtttatgaggccatattcgccatgctgtcttctgtgatgaacaaagacgggatgctggtagcgtatggaaatgggtttataactcgtgaattcctaaaaagcctaaggaaaccgttctgtgatatcatggaacccaagtttgattttgccatgaagttcaatgcactggaactggatgacagtgatatctccctttttgtggctgctatcatttgctgtggagatcgtcctggccttctaaacgtaggacacattgaaaaaatgcaggagggtattgtacatgtgctcagactccacctgcagagcaaccacccggacgatatctttctcttcccaaaacttcttcaaaaaatggcagacctccggcagctggtgacggagcatgcgcagctggtgcagatcatcaagaagacggagtcggatgctgcgctgcacccgctactgcaggagatctacagggacatgtactga

SEQ ID NO: 323723 - DNA, 489 bp, Artificial Sequence
  derived and/or modified sequence
atgaataaagtcaaggcacgcgtgattttgtcaggcaaagctagcaataaccccccttttgtaatccacgatatggagactttatgcatggcagaaaaaacactagtggcaaaactggtggctaacgggatccagaacaaagaggctgaagtacgcatctttcactgttgccagtgtaccagcgtagagactgtcacagaacttacggagttcgctaaggctattccaggcttcgccaacctcgatctcaacgaccaagtgacccttctcaagtatggagtgtatgaggcaatttttgccatgttgagttctgtgatgaataaagacggtatgttggtagcctatggcaacggattcattacccgcgaatttctaaagagtctgcggaaacctttctgtgacataatggagcccaaattcgattttgccatgaaattcaacgccttagaattggatgattcagacatctctcttttcgtcgcggcttag

SEQ ID NO: 323724 - DNA, 489 bp, Artificial Sequence
  derived and/or modified sequence
atgaacaaggtgaaggccagagtgatcctgagcggcaaggccagcaacaacccccccttcgtgatccacgacatggagaccctgtgcatggccgagaagaccctggtggccaagctggtggccaacggcatccagaacaaggaggccgaggtgagaatcttccactgctgccagtgcaccagcgtggagaccgtgaccgagctgaccgagttcgccaaggccatccccggcttcgccaacctggacctgaacgaccaggtgaccctgctgaagtacggcgtgtacgaggccatcttcgccatgctgagcagcgtgatgaacaaggacggcatgctggtggcctacggcaacggcttcatcaccagagagttcctgaagagcctgagaaagcccttctgcgacatcatggagcccaagttcgacttcgccatgaagttcaacgccctggagctggacgacagcgacatcagcctgttcgtggccgcctag

SEQ ID NO: 323725 - protein, 99 aa, Artificial Sequence
  derived and/or modified sequence
MQALRHVVCALSGGVDSAVAALLLRRRGYQVTGVFMKNWDSLDEHGVCTADKDCEDAYRVCQILDIPFHQVSYVKEYWNDVFRGRCHCHRSLCKNFPGR

SEQ ID NO: 323726 - protein, 166 aa, Artificial Sequence
  derived and/or modified sequence
MQALRHVVCALSGGVDSAVAALLLRRRGYQVTGVFMKNWDSLDEHGVCTADKDCEDAYRVCQILDIPFHQVSYVKEYWNDVFSDFLNEYEKGRTPNPDIVCNKHIKFSCFFHYAVDNLGADAIATGHYARTSLEDEEVFEQKHVKKPEGLFRNRFEVRNARFPRMP

SEQ ID NO: 323727 - DNA, 300 bp, Artificial Sequence
  derived and/or modified sequence
atgcaggccctgagacacgtggtgtgcgccctgagcggcggcgtggacagcgccgtggccgccctgctgctgagaagaagaggctaccaggtgaccggcgtgttcatgaagaactgggacagcctggacgagcacggcgtgtgcaccgccgacaaggactgcgaggacgcctacagagtgtgccagatcctggacatccccttccaccaggtgagctacgtgaaggagtactggaacgacgtgttcagaggcagatgccactgccacagaagcctgtgcaagaacttccccggcagatag

SEQ ID NO: 323728 - DNA, 396 bp, Artificial Sequence
  derived and/or modified sequence
atgaagaactgggacagcctggacgagcacggcgtgtgcaccgccgacaaggactgcgaggacgcctacagagtgtgccagatcctggacatccccttccaccaggtgagctacgtgaaggagtactggaacgacgtgttcagcgacttcctgaacgagtacgagaagggcagaacccccaaccccgacatcgtgtgcaacaagcacatcaagttcagctgcttcttccactacgccgtggacaacctgggcgccgacgccatcgccaccggccactacgccagaaccagcctggaggacgaggaggtgttcgagcagaagcacgtgaagaagcccgagggcctgttcagaaacagattcgaggtgagaaacgccagattccccagaatgccctag

SEQ ID NO: 323729 - DNA, 501 bp, Artificial Sequence
  derived and/or modified sequence
atgcaggccctgagacacgtggtgtgcgccctgagcggcggcgtggacagcgccgtggccgccctgctgctgagaagaagaggctaccaggtgaccggcgtgttcatgaagaactgggacagcctggacgagcacggcgtgtgcaccgccgacaaggactgcgaggacgcctacagagtgtgccagatcctggacatccccttccaccaggtgagctacgtgaaggagtactggaacgacgtgttcagcgacttcctgaacgagtacgagaagggcagaacccccaaccccgacatcgtgtgcaacaagcacatcaagttcagctgcttcttccactacgccgtggacaacctgggcgccgacgccatcgccaccggccactacgccagaaccagcctggaggacgaggaggtgttcgagcagaagcacgtgaagaagcccgagggcctgttcagaaacagattcgaggtgagaaacgccagattccccagaatgccctag

SEQ ID NO: 323730 - DNA, 300 bp, Artificial Sequence
  derived and/or modified sequence
atgcaggcgctcaggcacgtggtgtgcgcactttccggcggtgtggatagcgctgttgccgccctgcttctgagaaggaggggctaccaggttacaggcgtcttcatgaagaattgggatagcttagacgagcacggagtgtgcaccgccgacaaagactgcgaggatgcttatagggtgtgccaaatactggacatccccttccaccaggtttcctacgtgaaggagtactggaacgacgtgttccggggacggtgtcattgtcatcgatccctgtgcaagaattttcccggccggtag

SEQ ID NO: 323731 - DNA, 396 bp, Artificial Sequence
  derived and/or modified sequence
atgaagaattgggattcgttggatgaacatggtgtatgcacggccgataaggattgtgaagacgcttaccgtgtgtgccaaatcctggatattccattccatcaggtaagctatgtcaaagagtactggaacgacgttttttcagacttcctgaacgagtatgaaaagggtcggacgccaaatcccgacatcgtgtgcaacaagcatatcaaattttcctgcttttttcactatgctgtggataatttgggcgccgatgccatcgctactggccactacgcaaggacgtccctagaggacgaggaggtgttcgaacagaaacacgtgaagaaacctgagggcctgttccgcaatcggtttgaggttcgcaatgccaggttccctcgcatgccctag

SEQ ID NO: 323732 - DNA, 300 bp, Artificial Sequence
  derived and/or modified sequence
atgcaggcgctgaggcacgtggtttgtgcactgtctggcggcgtcgattccgcagtcgccgctctgctcctccggcgacggggctaccaagtcaccggcgtgttcatgaagaattgggattccttggatgaacacggcgtgtgcaccgccgataaggattgcgaggacgcatatagagtgtgtcaaatcttggacatcccattccaccaggtgtcctacgtcaaggagtattggaacgatgtatttcgcgggcggtgccactgccaccggagcctctgtaagaactttcctggcaggtag

SEQ ID NO: 323733 - DNA, 300 bp, Artificial Sequence
  derived and/or modified sequence
atgcaggcattaaggcacgtggtgtgtgctctgtcagggggcgtggacagcgctgtggctgctctgctgcttcggcgtagaggctaccaagtaacgggcgtctttatgaagaactgggatagcctggatgagcacggtgtttgcacggccgacaaggattgtgaagacgcgtacagagtgtgtcagatcctcgacatacccttccatcaggtctcttatgtgaaggagtactggaatgacgttttccggggccggtgccactgtcaccgtagcctctgcaaaaattttccagggagatag

SEQ ID NO: 323734 - DNA, 300 bp, Artificial Sequence
  derived and/or modified sequence
atgcaggccttgcgccacgtggtttgcgcgctctctggaggagttgattctgccgtggctgcgctcttgcttcggagaagaggatatcaagtgactggcgtctttatgaagaattgggacagtttagacgaacacggcgtgtgtactgccgacaaggactgcgaagacgcataccgtgtgtgtcagattctggacattccgttccatcaggtgagttacgttaaggagtattggaacgacgtgttccggggacggtgtcactgccatagatccctgtgcaagaatttccccggtcgctag

SEQ ID NO: 323735 - DNA, 501 bp, Artificial Sequence
  derived and/or modified sequence
atgcaggccctgaggcatgtcgtctgtgctctcagtggcggcgtggattcagccgtcgcagccctgctactcagaaggcgaggctaccaggtgaccggagtctttatgaagaattgggatagcctggatgaacacggggtgtgcactgcggacaaagactgcgaggatgcctaccgcgtgtgtcaaattctggacatcccttttcatcaggtgagctatgttaaagagtactggaatgacgtcttctcggactttctgaatgaatacgagaagggcagaacccctaaccccgatattgtgtgtaataaacacattaaattctcttgcttcttccactatgcggtcgacaacctgggagccgacgcaattgctactggccactatgcaaggacgtcgctagaggatgaagaggtctttgaacagaagcatgtcaagaaaccagaggggttgttcagaaatcggttcgaagttaggaatgccagatttccacgcatgccttag

SEQ ID NO: 323736 - DNA, 300 bp, Artificial Sequence
  derived and/or modified sequence
atgcaggccctgcggcacgtggtgtgtgccctgagcggcggcgtggacagcgctgtggccgccctgctgctgcggcggcggggctaccaggtgactggagtcttcatgaagaactgggacagcctggatgaacatggagtgtgcacagctgacaaggactgtgaagatgcctacagagtgtgccagatcctggacatccccttccaccaggtgtcctatgtgaaggagtactggaatgatgtgttccggggccgctgccactgccacaggagcctgtgcaagaacttccctggaagatag

SEQ ID NO: 323737 - DNA, 396 bp, Artificial Sequence
  derived and/or modified sequence
atgaagaactgggacagcctggatgagcacggcgtgtgcacagctgacaaggactgtgaagatgcctacagagtgtgccagatcctggacatccccttccaccaggtgtcctatgtgaaggagtactggaatgatgtgttcagtgacttcctgaatgaatatgagaagggccgcacccccaacccagacatcgtgtgcaacaagcacatcaagttcagctgcttcttccactatgctgtggacaacctgggcgcagatgccatcgccaccggccactacgcccggaccagcctggaggatgaggaggtgtttgagcagaagcacgtgaagaagccagagggcctcttcaggaacagatttgaggtgagaaatgcccgcttccccaggatgccctag

SEQ ID NO: 323738 - DNA, 501 bp, Artificial Sequence
  derived and/or modified sequence
atgcaggccctgcggcacgtggtgtgtgccctgagcggcggcgtggacagcgctgtggccgccctgctgctgcggcggcggggctaccaggtgactggagtcttcatgaagaactgggacagcctggatgaacatggagtgtgcacagctgacaaggactgtgaagatgcctacagagtgtgccagatcctggacatccccttccaccaggtgtcctatgtgaaggagtactggaatgatgtgttcagtgacttcctgaatgaatatgaaaaaggaagaacacccaacccagacatcgtgtgcaacaagcacatcaagttcagctgcttcttccactatgctgtggacaacctgggcgcagatgccatcgccaccggccactacgcccggaccagcctggaggatgaggaggtgtttgagcagaagcacgtgaagaagccagagggcctcttcaggaacagatttgaggtgagaaatgcccgcttccccaggatgccctag

SEQ ID NO: 323739 - DNA, 300 bp, Artificial Sequence
  derived and/or modified sequence
atgcaggccctgcggcacgtggtgtgcgccctgagcggcggcgtggatagcgctgtcgccgccttgctcctgcggaggcgtgggtaccaagtgaccggcgttttcatgaaaaattgggacagcctggacgagcacggcgtgtgcacagcagataaagactgcgaggacgcttatcgagtgtgtcagattctggacatcccatttcatcaagtgtcctatgtcaaggagtattggaacgatgtcttccggggccgttgtcactgccataggagcctctgcaaaaacttccctggcaggtag

SEQ ID NO: 323740 - DNA, 396 bp, Artificial Sequence
  derived and/or modified sequence
atgaagaactgggacagcctggacgagcacggcgtgtgcaccgccgataaggactgtgaggatgcatatcgcgtttgccaaattctggatatcccatttcaccaggtgtcctatgtcaaggaatattggaacgacgttttctcagactttctgaacgaatatgaaaagggtcgaaccccaaacccagacatcgtctgcaataaacacataaagttttcttgtttctttcactacgctgtcgataacctaggagctgacgccatagctactggacattacgccaggacttctctggaagatgaagaagtgttcgaacagaagcacgttaagaaacctgaggggctgttcagaaatagatttgaagtgaggaacgctcggtttccccgaatgccatag

SEQ ID NO: 323741 - DNA, 300 bp, Artificial Sequence
  derived and/or modified sequence
atgcaggccctgcggcacgtggtgtgcgccctgagcggcggcgtggacagcgcagtggctgctctcctgctaaggaggagagggtaccaggtgactggcgtatttatgaaaaattgggattccttagatgaacatggtgtgtgcaccgccgataaggattgtgaggacgcctatagagtctgtcagatcttagacattccgtttcaccaggtttcctatgttaaggaatattggaacgacgtatttcgaggcagatgccattgtcaccgctctctgtgtaaaaatttccccgggcgctag

SEQ ID NO: 323742 - DNA, 300 bp, Artificial Sequence
  derived and/or modified sequence
atgcaggccctgcggcacgtggtgtgcgccctgagcggcggcgtggatagtgcggtcgctgctctgctgctgaggcgtcgcggctaccaagtgaccggtgttttcatgaagaactgggatagcctcgacgaacacggcgtgtgcacagccgacaaagactgcgaggacgcttatagagtctgtcaaatcctggatataccattccaccaggtaagttacgtgaaggagtactggaatgacgtttttcgcggaaggtgtcattgtcacaggagtctgtgtaaaaatttccccgggcgctag

SEQ ID NO: 323743 - DNA, 300 bp, Artificial Sequence
  derived and/or modified sequence
atgcaggccctgcggcacgtggtgtgcgccctgagcggcggcgtggactctgcggtcgccgccctcttgctgcggaggcgaggttaccaggtgacaggggtctttatgaaaaattgggacagccttgatgaacatggggtgtgtaccgccgacaaggattgtgaggatgcctatcgagtttgtcagatcctcgatattccatttcaccaagtgagctacgtgaaggaatattggaatgatgtgttccgtgggcggtgtcattgtcaccgcagcctatgtaaaaacttccctgggcgctag

SEQ ID NO: 323744 - DNA, 501 bp, Artificial Sequence
  derived and/or modified sequence
atgcaggccctgcggcacgtggtgtgcgccctgagcggcggcgtggattcagcagtggccgcacttctgctccggaggcgaggataccaggttaccggagtcttcatgaaaaattgggattccctggacgagcatggtgtttgtactgctgacaaggattgtgaggacgcttatcgagtctgccagattctagacatcccctttcaccaagtgagctatgtcaaggagtactggaacgacgtgttcagcgatttccttaacgagtatgaaaaggggcggaccccaaaccctgacatagtctgtaataaacacattaagttcagttgcttcttccattatgccgtggataatctcggcgccgacgcgattgccaccggtcattatgcaaggacatcactggaagatgaggaagtgtttgaacagaaacatgtgaaaaaacccgaggggttatttagaaaccgctttgaggtgaggaacgcccggtttcctagaatgccatag

SEQ ID NO: 323745 - DNA, 300 bp, Artificial Sequence
  derived and/or modified sequence
atgcaggccctccgccacgtggtttgtgcactgtccgggggagtagactctgccgttgccgctcttcttctgcggaggcggggataccaggtgactggtgtatttatgaagaactgggactcactcgatgagcacggcgtatgcaccgcggataaagattgtgaggacgcttaccgggtttgtcagatcttggacattccctttcaccaggtgtcttacgtgaaggagtactggaacgatgtatttaggggccgttgccattgccaccgaagcctctgtaaaaatttcccgggtcgctag

SEQ ID NO: 323746 - DNA, 396 bp, Artificial Sequence
  derived and/or modified sequence
atgaagaattgggattccctggacgagcacggcgtctgcacagcagacaaggactgcgaggacgcctaccgcgtctgtcagattttggacatcccattccatcaagtgtcatacgtaaaagaatattggaatgatgtgttctccgactttttaaatgaatatgaaaaaggtagaacccccaatcctgacattgtatgtaacaaacatataaagttcagctgctttttccattacgctgtagacaatctgggcgctgacgctatcgctactggtcattatgctcggacatcactggaagacgaggaagtctttgagcaaaagcatgtaaaaaagcctgagggcctattcagaaatcgcttcgaagtccgcaatgcacggttccctagaatgccttag

SEQ ID NO: 323747 - DNA, 300 bp, Artificial Sequence
  derived and/or modified sequence
atgcaggccctgaggcacgtagtctgcgccctaagtggcggagtggattctgctgtagcagcattactgctcaggcggcgtggatatcaggtgactggagtgtttatgaaaaactgggattcgctggacgagcatggagtgtgcacagccgacaaagactgtgaagacgcttaccgcgtttgccagatattggacatcccattccaccaagtaagttacgttaaggagtattggaatgatgttttcagaggaaggtgtcattgtcacaggagcctctgcaaaaactttccaggacgctag

SEQ ID NO: 323748 - DNA, 300 bp, Artificial Sequence
  derived and/or modified sequence
atgcaggccctcagacacgtcgtctgtgctctgagcggcggtgttgactctgccgttgctgccctcctgttgcggcgtcggggatatcaggtaacgggagtcttcatgaagaactgggactcactggatgagcacggggtttgcacggctgacaaagattgcgaagatgcttatcgcgtgtgtcagatcttggacattcctttccatcaggtctcatatgtgaaggagtactggaatgacgtcttcagaggcaggtgccactgccatcggagcttatgcaaaaacttccctgggaggtag

SEQ ID NO: 323749 - DNA, 300 bp, Artificial Sequence
  derived and/or modified sequence
atgcaggctctaagacacgttgtctgtgcgttatctgggggtgtagactctgctgtcgccgcactgctgttgagaaggagggggtaccaggtgaccggcgtgtttatgaaaaactgggacagcctggatgaacacggggtgtgcaccgctgataaggactgcgaggacgcctatcgggtgtgccaaattctcgatatccctttccatcaagtcagttatgtgaaagagtattggaacgacgtgttcaggggccgatgtcactgccacaggtcactgtgtaagaactttcctggccgttag

SEQ ID NO: 323750 - DNA, 501 bp, Artificial Sequence
  derived and/or modified sequence
atgcaagcattgaggcatgtggtatgtgctctttctgggggagtagatagtgctgtagccgctttgctgttgcggagacgcggataccaggttacaggcgtgttcatgaagaattgggatagtttggatgaacacggagtttgtaccgccgataaggattgcgaagatgcgtacagggtgtgccagattctggacattccattccatcaggtgagttacgtgaaggaatactggaatgatgttttctccgactttttgaacgagtatgaaaaagggagaaccccaaaccctgatatcgtttgcaacaagcacattaagttcagttgtttcttccattacgccgttgacaatctaggagctgacgcaatcgccaccgggcattatgctaggaccagcctcgaagacgaggaggtcttcgagcagaaacacgtgaaaaaacccgagggactgttccgcaatcgctttgaggttcgtaatgcccgattccccaggatgccttag

SEQ ID NO: 323751 - DNA, 1793 bp, Artificial Sequence
  derived and/or modified sequence
gccgagaggaggcctccaatggctggctggggggcttagaattttatttttggtttacagcgcagaagaagagcagtgaggccggggcgcgggtggggagggcaaggcggcggctcaaaaaaaaagccagcccctcgcggcccgacagagtctcggcgccccgcgggtcggtggagcctcaggggtgagcgcaggccggagacaggggaacccgccgcgggacaggggaaggccggacggaacgcgggtaagctgccgcagcttccggccgggccactagcgcggaccctacggccggggcgggacttccggcaaggcgcggaagcggcggtagctgcagctggcgaagttgggcgactggcggatgcaggccttgcggcacgtcgtgtgcgccctgtccggcggcgtggacagcgccgtggccgcgctgctgctgaggcggagaggttaccaggtgacaggggtgtttatgaagaactgggactcactggatgaacatggggtctgtactgccgacaaagactgtgaagatgcttacagagtttgccagatcttagacatccctttccatcaagtgtcctacgtaaaggagtattggaatgatgtgttcaggggcagatgccattgccacaggtcactatgcaagaacttccctggaagatgaagaagtctttgagcagaagcacgttaagaagcccgaagggcttttcagaaatcggtttgaagttagaaatggtttcccaggatgccctgaggagaaccatcttccctctggggggattaacgaaagagtttgtaaagaaaatcgctgctgagaatagacttcatcatgtgcttcagaagaaagagagcatgggcatgtgtttcatcgggaagaggaattttgaacatttccttcttcagtatctgcagcctcgacctggtcactttatttccatagaagacaataaggttctgggaacacataaaggttggttcctgtataccttgggccagagagcaaacataggtggcctgagagagccctggtacgtggtggagaaggacagcgtcaagggtgacgtgtttgtggccccccggacagaccacccagccctgtacagggacctgctgaggaccagccgcgtgcactggattgcggaggagcctcccgcagcactggtccgggacaagatgatggagtgccacttccgattccgccaccagatggcactagtgccctgtgtgctgaccctcaatcaagatggcaccgtgtgggtgacagctgtgcaggctgtgcgtgcccttgccacaggacagtttgctgtgttctacaagggggacgagtgcctgggcagcgggaagatcctgcggctggggccgtctgcctacacgctccagaagggccagcgcagagctgggatggccactgagagccccagtgacagcccagaagatggtccaggcctgagtcccttgctctgacagagatggatctgctagaaggaacctggagagcaggacccatggctgggcggctggtgagcagtccaggtgcccaagggccagcttgctgctgcccaaagcagaggaagccgggctggctgagggtccgaaaagcctgcaggggcccggcgagccccaggaagagcctcagctccaggctggggctctggctgctggagcatctgctggctggtggggtggcccgagttccccttcaccgcccccagggagggtttcccacctcagagtacaccgaggggacctgcagagggggctgtcgggacagcgtggaataaacattatttcaa

SEQ ID NO: 323752 - protein, 245 aa, Artificial Sequence [sequence omitted]

SEQ ID NO: 323753 - DNA, 738 bp, Artificial Sequence
  derived and/or modified sequence
atgacaagaatgttacaaaggatggacgtgctggctaagaaggccaccgaaatgggcgtgcgcttgatggtagatgcagaacagacgtatttccaaccagccatctcacgcttgacattggagatgcagcgcaagttcaacgtggagaaacccctgatatttaacacctaccagtgctacctgaaggacgcctatgacaacgttacgctggacgtagagctggctcggcgagaaggttggtgtttcggagccaaactcgtgcggggcgcttaccttgctcaagagcgagccagagctgccgagatcggctacgaagacccgatcaatccgacatatgaagctactaacgccatgtatcatcgttgcctagattatgtgctcgaagagctcaagcataatgccaaggcaaaagttatggttgcgtctcataacgaagacactgtaagatttgccttaaggcgcatggaggaactgggcttacaccccgctgatcaccgagtgtattttggccagctcctaggcatgtgcgatcagatcagcttccctctgggccaggccgggtatcctgtgtataagtacgttccttacggtcctgtgatggaggtattgccctatctgagcagacgagccttggagaactcttcactgatgaagggcacacacagggagaggcagctcctgtggctggagctgctgaggcggctgcgcaccggaaatcttttccatcggccagcatag

SEQ ID NO: 323754 - DNA, 738 bp, Artificial Sequence
  derived and/or modified sequence
atgaccaggatgctgcagaggatggatgtgctggccaagaaggccacagagatgggcgtgcggctgatggtggatgctgagcagacctacttccagcctgccatcagccggctgaccctggagatgcagaggaagttcaacgtggagaagcccctcatcttcaacacctaccagtgctacctgaaggatgcctatgacaacgtgaccctggatgtggagctggcccggcgggagggctggtgcttcggggccaagctggtgcggggggcctacctggcccaggagcgggcccgggctgctgagatcggctatgaggaccccatcaaccccacctatgaggccaccaatgccatgtaccaccgctgcctggactatgtgctggaggagctgaagcacaatgccaaggccaaggtgatggtggccagccacaatgaagatactgtgcgctttgccctgcggaggatggaggagctgggcctgcaccctgctgaccaccgggtgtacttcggccagctgctgggcatgtgtgaccagatctccttccccctgggccaggccggctaccctgtgtacaagtatgtgccctacggccctgtgatggaggtgctgccctacctgagccggcgggccctggagaacagcagcctgatgaagggcacccaccgggagcggcagctgctgtggctggagctgctgcggcggctgaggactggaaacctcttccacaggcctgcctag

SEQ ID NO: 323755 - DNA, 738 bp, Artificial Sequence
  derived and/or modified sequence
atgacccggatgctgcagcggatggacgtgctggccaagaaggccacagagatgggagttaggttaatggtcgacgctgagcagacttattttcagccagctataagccgcctgacgctagagatgcagcgtaagtttaatgtggaaaaaccactgatctttaatacttatcagtgctatctcaaggacgcgtatgacaatgtgacccttgacgtggagcttgcccgcagggaaggctggtgcttcggagccaaactcgtccgaggcgcatatctagctcaagagagagcccgtgctgccgaaatcggctatgaggatcccatcaacccgacatatgaagcaaccaacgccatgtatcacagatgtctggactacgtgttggaagagctcaaacacaatgcgaaggccaaagtcatggtcgccagccacaatgaagacacagtgcgctttgccctcagaagaatggaggagctgggtttgcacccagctgaccaccgcgtctatttcgggcaactgctgggtatgtgcgaccaaatcagcttcccactgggacaggctggatatccggtgtacaaatacgtgccttacggaccagttatggaggttcttccatacttatcgaggagggccttggaaaatagcagtttaatgaagggaacccatagagagagacagttgctgtggctcgagctgctgcgcagactgcgtacaggaaatcttttccacaggcccgcgtag

SEQ ID NO: 323756 - DNA, 738 bp, Artificial Sequence
  derived and/or modified sequence
atgacgcgcatgctgcaacgtatggatgtcctggctaagaaggcaaccgagatgggcgtgcgactgatggtagatgcggaacaaacttattttcagcctgccatatctcggcttactcttgagatgcaaaggaagtttaatgtggagaagccactgatttttaatacctaccagtgctacctgaaagatgcctatgacaatgtgactctggacgttgagctggcccgacgggagggctggtgtttcggggcaaagctggtcagaggggcttacctagcccaggagcgcgctagagcagccgagatcggttacgaggatcccattaaccctacttatgaggctacgaatgccatgtaccacagatgcctagattacgttcttgaagagttgaaacataacgcaaaggcaaaagtaatggtagcctcccataacgaagacaccgtgaggttcgccctgcggcgaatggaggaactcggcttgcatcccgcagatcatagggtgtattttgggcaattgctgggcatgtgcgatcaaatttcttttcctctgggtcaggcagggtacccagtctacaagtacgtaccctatggaccagttatggaggtgctcccttacctaagtcgcagggcattggagaatagcagtctcatgaaagggactcatagggaaaggcagctactgtggctcgagctcctgcggagacttaggacaggaaatttgttccatagacctgcgtag

SEQ ID NO: 323757 - DNA, 2961 bp, Artificial Sequence
  derived and/or modified sequence
aatatttatatttcctctgtcttttaaaactgaacaccgaggtgggttttgtggtgggtggtgaacggacaggtttgggcctcgatcccccacccgaccctagcacccacaggtgggggtgccccctctgctgatgcgcctcctccctcagcaccatggacctgctggactggagcagcctcatcgacagcaggaccaagctgtccaagcacttggtagtccccaacgcacaggtaacacctccgctcctcagtgaggcccagctcagcagggcgctgcgctaagaagggaattcagcctgccacgtgtgtctcttgttgcctaccctgggaacttaacatgaccaaaatcactgcacactatggccccacagaccccctgtggtccagggggaagaagacaagcccactagtgtccacagagtgcttggcgggacagagacccacgcggagccttaagacaccacaaggagagggggtctgggggccttccccaagtcatctgtcttgtgcatcaggtcaccccaaacttcagaggcctgaaacggcagcagccactctgcttctgcctcatggttctggggttgacagggctcagctgggcagtcctcccctggggtctcctgggtagctgtactcacagagtggtggcgctgggacctgggggaggcacccattcacatgtctgggagttggtgctggctgtggcttgggctttttcccaacatggcagctgggctctaagggccagtgtcacctgagacgtgagagccaggcagaagctgggtgaccttttcctgcctcgcctcagaagtcacacggtgtcttttctggcaagttctgtttgttagaagcatgtcaccaggccagcctgtatacagcggggagaggaatgagactcatctgcctgtgggaggggggcccaggacctggcagactgcttgaaaccacagcttaaactgggattcaaagaaagaacagaagcaccttcagaaaacatcctgcagaggcagctttccatgacacatctagccccagtccactaagggcccagcctcaaacttagagcccccgacccagagcctcggggcgcagtgcgtacagtgtggctgtgcaccaaggccaccagctgttggagactttagcatggtgtagcaagggatagagtggtactgtttgtgcccagtgaggcaaggctgctggggccagcaaaggggtgagcgggaggccctgcgggatgggtccccacggcctctgagcaccagcaacttgaaggcctcatcctggtggttgccctggtccctggctacgtgtcagcacgtgctgcacaactgccctgtctgcctgtagccaggggtcttcctcctgggccctctgcctgctccgggtggagcccttctgtttgacgattgggtgatcagtgttcacttgttcaatgtcacatgggagttgcagggggctctcccacaacggtggggcctctgtgggaactggggagtacacacttcggagtgcaggcctggactgagcctggggcccactgacatgggcactgagctccctcgtggtacccctaggccccgcatagggcagtgcactggctgcgttggaggttcaggggcactgtgctgcttgtccaggtggccctccctcccagccctgcacagacgggtgagagggttcctgtgggctgggaatactgagagaggtttagcctgggcctcagggtggcactttcccgcccttgctgtggcctgaccgcgtgttgcacccccagacaggacagctggagcccctgctgtcccggttcactgaggaggaggagctacagatgaccaggatgctacagcggatggatgtcctggccaagaaagccacagagatgggcgtgcggctgatggtggatgccgagcagacctacttccagccggccatcagccgcctgacgctggagatgcagcggaagttcaatgtggagaagccgctcatcttcaacacataccagtgctacctcaaggatgcctatgacaatgtgaccctggacgtggagctggctcgccgtgagggctggtgttttggggccaagctggtgcggggcgcatacctggcccaggagcgagcccgtgcggcagagatcggctatgaggaccccatcaaccccacgtacgaggccaccaacgccatgtaccacaggtgcctggactacgtgttggaggagctgaagcacaacgccaaggccaaggtgatggtggcctcccacaatgaggacacagtgcgctttgcactgcgcaggatggaggagctgggcctgcatcctgctgaccaccgggtgtactttggacagctgctaggcatgtgtgaccagatcagcttcccgctgggccaggccggctaccccgtgtacaagtacgtgccctatggccccgtgatggaggtgctgccctacttgtcccgccgtgccctggagaacagcagcctcatgaagggcacccatcgggagcggcagctgctgtggctggagctcttgaggcggctccgaactggcaacctcttccatcgccctgcctagcacccgccagcacacccttagcctccagcaccccccgcccccgcccaggccatcaccacagctgcagccaaccccatcctcacacagattcaccttttttcaccccacacttgcagagctgctggaggtgaggtcaggtgcctcccagccctgcccagagtatgggcactcaggtgtgggccgaacctgatacctgcctgggacagccactggaaacttttgggaactctcctcgaatgtgtgggcccaaggcccccacctctgtgacccccatgtccttggacctagaggattgtccaccttctgccaaggccagcccacacagcccgagccccttggggagcagtggccgggctggggaggcctgcctggtcaataaaccactgttcctgc

SEQ ID NO: 323758 - DNA, 738 bp, Artificial Sequence
  derived and/or modified sequence
atgaccagaatgctgcagagaatggacgtgctggccaagaaggccaccgagatgggcgtgagactgatggtggacgccgagcagacctacttccagcccgccatcagcagactgaccctggagatgcagagaaagttcaacgtggagaagcccctgatcttcaacacctaccagtgctacctgaaggacgcctacgacaacgtgaccctggacgtggagctggccagaagagagggctggtgcttcggcgccaagctggtgagaggcgcctacctggcccaggagagagccagagccgccgagatcggctacgaggaccccatcaaccccacctacgaggccaccaacgccatgtaccacagatgcctggactacgtgctggaggagctgaagcacaacgccaaggccaaggtgatggtggccagccacaacgaggacaccgtgagattcgccctgagaagaatggaggagctgggcctgcaccccgccgaccacagagtgtacttcggccagctgctgggcatgtgcgaccagatcagcttccccctgggccaggccggctaccccgtgtacaagtacgtgccctacggccccgtgatggaggtgctgccctacctgagcagaagagccctggagaacagcagcctgatgaagggcacccacagagagagacagctgctgtggctggagctgctgagaagactgagaaccggcaacctgttccacagacccgcctag

SEQ ID NO: 323759 - protein, 985 aa, Artificial Sequence
  derived and/or modified sequence
MDRRSMGETESGDAFLDLKKPPASKCPHRYTKEELLDIKELPHSKQRPSCLSEKYDSDGVWDPEKWHASLYPASGRSSPVESLKKELDTDRPSLVRRIVDPRERVKEDDLDVVLSPQRRSFGGGCHVTAAVSSRRSGSPLEKDSDGLRLLGGRRIGSGRIISARTFEKDHRLSDKDLRDLRDRDRERDFKDKRFRREFGDSKRVFGERRRNDSYTEEEPEWFSAGPTSQSETIELTGFDDKILEEDHKGRKRTRRRTASVKEGIVECNGGVAEEDEVEVILAQEPAADQEVPRDAVLPEQSPGDFDFNEFFNLDKVPCLASMIEDVLGEGSVSASRFSRWFSNPSRSGSRSSSLGSTPHEELERLAGLEQAILSPGQNSGNYFAPIPLEDHAENKVDILEMLQKAKVDLKPLLSSLSANKEKLKESSHSGVVLSVEEVEAGLKGLKVDQQVKNSTPFMAEHLEETLSAVTNNRQLKKDGDMTAFNKLVSTMKASGTLPSQPKVSRNLESHLMSPAEIPGQPVPKNILQELLGQPVQRPASSNLLSGLMGSLEPTTSLLGQRAPSPPLSQVFQTRAASADYLRPRIPSPIGFTPGPQQLLGDPFQGMRKPMSPITAQMSQLELQQAALEGLALPHDLAVQAANFYQPGFGKPQVDRTRDGFRNRQQRVTKSPAPVHRGNSSSPAPAASITSMLSPSFTPTSVIRKMYESKEKSKEEPASGKAALGDSKEDTQKASEENLLSSSSVPSADRDSSPTTNSKLSALQRSSCSTPLSQANRYTKEQDYRPKATGRKTPTLASPVPTTPFLRPVHQVPLVPHVPMVRPAHQLHPGLVQRMLAQGVHPQHLPSLLQTGVLPPGMDLSHLQGISGPILGQPFYPLPAASHPLLNPRPGTPLHLAMVQQQLQRSVLHPPGSGSHAAAVSVQTTPQNVPSRSGLPHMHSQLEHRPSQRSSSPVGLAKWFGSDVLQQPLPSMPAKVISVDELEYRQ

SEQ ID NO: 323760 - protein, 640 aa, Artificial Sequence
  derived and/or modified sequence
MIEDVLGEGSVSASRFSRWFSNPSRSGSRSSSLGSTPHEELERLAGLEQAILSPGQNSGNYFAPIPLEDHAENKVDILEMLQKAKVDLKPLLSSLSANKEKLKESSHSGVVLSVEEVEAGLKGLKVDQQVKNSTPFMAEHLEETLSAVTNNRQLKKDGDMTAFNKLVSTMKASGTLPSQPKVSELLGQPVQRPASSNLLSGLMGSLEPTTSLLGQRAPSPPLSQVFQTRAASADYLRPRIPSPIGFTPGPQQLLGDPFQGMRKPMSPITAQMSQLELQQAALEGLALPHDLAVQAANFYQPGFGKPQVDRTRDGFRNRQQRVTKSPAPVHRGNSSSPAPAASITSMLSPSFTPTSVIRKMYESKEKSKEEPASGKAALGDSKEDTQKASEENLLSSSSVPSADRDSSPTTNSKLSALQRSSCSTPLSQANRYTKEQDYRPKATGRKTPTLASPVPTTPFLRPVHQVPLVPHVPMVRPAHQLHPGLVQRMLAQGVHPQHLPSLLQTGVLPPGMDLSHLQGISGPILGQPFYPLPAASHPLLNPRPGTPLHLAMVQQQLQRSVLHPPGSGSHAAAVSVQTTPQNVPSRSGLPHMHSQLEHRPSQRSSSPVGLAKWFGSDVLQQPLPSMPAKVISVDELEYRQ

SEQ ID NO: 323761 - protein, 961 aa, Artificial Sequence
  derived and/or modified sequence
MDRRSMGETESGDAFLDLKKPPASKCPHRYTKEELLDIKELPHSKQRPSCLSEKYDSDGVWDPEKWHASLYPASGRSSPVESLKKELDTDRPSLVRRIVDPRERVKEDDLDVVLSPQRRSFGGGCHVTAAVSSRRSGSPLEKDSDGLRLLGGRRIGSGRIISARTFEKDHRLSDKDLRDLRDRDRERDFKDKRFRREFGDSKRVFGERRRNDSYTEEEPEWFSAGPTSQSETIELTGFDDKILEEDHKGRKRTRRRTASVKEGIVECNGGVAEEDEVEVILAQEPAADQEVPRDAVLPEQSPGDFDFNEFFNLDKVPCLASMIEDVLGEGSVSASRFSRWFSNPSRSGSRSSSLGSTPHEELERLAGLEQAILSPGQNSGNYFAPIPLEDHAENKVDILEMLQKAKVDLKPLLSSLSANKEKLKESSHSGVVLSVEEVEAGLKGLKVDQQVKNSTPFMAEHLEETLSAVTNNRQLKKDGDMTAFNKLVSTMKASGTLPSQPKVSELLGQPVQRPASSNLLSGLMGSLEPTTSLLGQRAPSPPLSQVFQTRAASADYLRPRIPSPIGFTPGPQQLLGDPFQGMRKPMSPITAQMSQLELQQAALEGLALPHDLAVQAANFYQPGFGKPQVDRTRDGFRNRQQRVTKSPAPVHRGNSSSPAPAASITSMLSPSFTPTSVIRKMYESKEKSKEEPASGKAALGDSKEDTQKASEENLLSSSSVPSADRDSSPTTNSKLSALQRSSCSTPLSQANRYTKEQDYRPKATGRKTPTLASPVPTTPFLRPVHQVPLVPHVPMVRPAHQLHPGLVQRMLAQGVHPQHLPSLLQTGVLPPGMDLSHLQGISGPILGQPFYPLPAASHPLLNPRPGTPLHLAMVQQQLQRSVLHPPGSGSHAAAVSVQTTPQNVPSRSGLPHMHSQLEHRPSQRSSSPVGLAKWFGSDVLQQPLPSMPAKVISVDELEYRQ

SEQ ID NO: 323762 - DNA, 3544 bp, Artificial Sequence
  derived and/or modified sequence
ggggagcggcggccgaggcaaagggccgccgagcggcggaggcaccgagtgcagagcattgtagaccaaggagccatggataggagaagtatgggtgaaacagaaagtggagatgctttccttgacctgaagaagcctcctgcctccaaatgcccccatcgctatacaaaagaagaactcttggatataaaagaactcccccattccaaacagaggccttcatgcctttctgaaaaatatgacagtgatggtgtctgggaccctgagaagtggcatgcctctctctacccagcttcagggcggagctcaccagtggaaagtctgaagaaagagttggatacagaccggccttccctggtgcgcaggatagtagatccacgagagcgtgtgaaagaagatgacttagatgttgttctcagccctcagagacggagctttggagggggctgccacgtgacagccgctgttagctcccggcgctcaggaagtccattagagaaagatagtgatgggcttcgtctgcttggtggacgtaggattggcagtgggaggataatctctgcccggacctttgagaaggatcaccgtcttagcgataaggacctgcgggacttgagagacagagaccgagagagggacttcaaggacaagcgtttcaggagagagtttggagatagtaagcgtgtctttggtgagcgtagaagaaatgattcttacacagaagaagaaccagagtggttctctgctggacccacaagtcagtctgaaaccatcgaactgactggctttgatgataagatactagaagaagatcacaaagggagaaaaagaacaaggcgacggacagcctctgtgaaggaaggtatagtagagtgcaatggaggagtggccgaagaggatgaagtggaggtcatccttgcacaggagcctgcggctgatcaggaagtgccaagggatgctgtcttgcctgagcagtccccaggagactttgactttaatgagttctttaaccttgataaggtgccatgcttggcttcgatgatagaagatgttttgggagaagggtcagtctctgccagtcggttcagtaggtggttctctaacccgagcagatcaggaagccgatccagcagtcttgggtcaacaccacatgaagagctagagagacttgcaggtctggagcaagccatcctctctcctggacagaactcggggaattactttgctcctataccattggaagaccatgctgaaaataaagtggatattttagaaatgctacagaaagccaaagtggatttgaaacctcttctttccagcctttctgcaaataaagaaaaacttaaagaaagctcacattcaggggttgtgctttcagtggaggaggtagaagcaggtctgaagggcttgaaggttgaccagcaagtgaagaattcaactcccttcatggcagaacacctagaagagaccttgagtgccgtaaccaacaatcgacaactgaagaaagacggagacatgactgcgttcaacaagctagtgagcacaatgaaggcaagtgggactttgccttctcagcccaaagtcagccgaaaccttgaaagccatttgatgtcccctgctgagattccaggccagcctgtccctaagaacatcctgcaggaacttctgggtcaaccagttcagagacctgcttcttccaatcttctgagtggccttatggggagcttggagcctacaacatctttactgggccaaagagcaccctctcctcccttgtcacaggtgtttcaaactcgagcagcctcagctgactaccttcgcccaagaataccatcaccaattggtttcacaccaggaccacagcagctactcggagatccattccaaggcatgcgcaaacccatgagccccatcacagcccagatgagccagctggagttgcaacaggcagctttagaagggctggccttgccacatgaccttgctgtacaggcagcaaacttctaccagcctggttttggcaaaccacaggtggacagaaccagagatggattcagaaacaggcaacagcgagtgaccaagtcaccagcacccgtgcatcgagggaattcctcttcccctgcccctgctgcctccatcacaagcatgctttctccttcctttacccctacctcagtgattcgtaagatgtacgagagcaaagagaaaagcaaggaggagccagcatctggaaaagcagctcttggtgacagtaaagaggatactcagaaggccagtgaagaaaacctcctgtcatccagctctgtacccagtgccgatcgagactcttctcccactacaaattccaaactgtcagcattacagaggtcttcgtgttccaccccactgtcccaggccaaccgttacaccaaagaacaagattatcgacctaaagcaactgggagaaaaacacccaccttggcatccccagttcctacaacaccttttctccgccctgtccaccaagttccccttgtcccccatgtccctatggttaggcctgctcaccagcttcacccagggttggtacagaggatgctggcccagggagtacatccacagcatcttccaagtttgctccaaactggtgtgcttcctcctgggatggacttgagtcatttacagggaatatctggccccatcctgggtcagcccttttaccctttacctgctgctagtcaccctctcttaaaccctcgtcctggaacacctctgcatctggcaatggtgcaacagcagctacagcgctcagttctgcatcctccaggctctggttcccatgcagcagctgtcagcgttcagacaacccctcagaacgtgcccagccggtcaggcctgccccacatgcactcccagctggagcatcgccccagccagaggagcagctcccctgtgggccttgccaaatggtttggctcagatgtgctacagcaacccctgccctccatgcccgccaaagttatcagtgtagatgaattggaataccgacagtgagcagggcaggcagactcaactaagcccggacctgtggtggcacactgggcaggaccctgcttcatctcgggttggtttatgggcttttactttggagcactctgtgtgaagctgtttggtggaacccatgcatctggtgtggtccgcattatgatggaaggatcttaaccagtcgagtggagtgtacattgtctgaatacaggatgcacaatgttgtcaatcctggaaatggtctttcttttttgtaagatatgtgaatgaagtgttggtgtcctcaccaagaggtggcacctaagggttctgaggaaataaatgtatagacccttatgtacagacctgtgtataaacaacttttgtatatacatataggatagcttttttgaactatacagctgtacataaaagtagctgatattagttaggcctgtgtcaacagtttggatttttttcacttgtacatttgggattttcttttggttgattaaaattgcatatgctaagtgtgtgaatg

SEQ ID NO: 323763 - DNA, 2151 bp, Artificial Sequence
  derived and/or modified sequence
ttttcttcagatgatagaagatgttttgggagaagggtcagtctctgccagtcggttcagtaggtggttctctaacccgagcagatcaggaagccgatccagcagtcttgggtcaacaccacatgaagagctagagagacttgcaggtctggagcaagccatcctctctcctggacagaactcggggaattactttgctcctataccattggaagaccatgctgaaaataaagtggatattttagaaatgctacagaaagccaaagtggatttgaaacctcttctttccagcctttctgcaaataaagaaaaacttaaagaaagctcacattcaggggttgtgctttcagtggaggaggtagaagcaggtctgaagggcttgaaggttgaccagcaagtgaagaattcaactcccttcatggcagaacacctagaagagaccttgagtgccgtaaccaacaatcgacaactgaagaaagacggagacatgactgcgttcaacaagctagtgagcacaatgaaggcaagtgggactttgccttctcagcccaaagtcagcgaacttctgggtcaaccagttcagagacctgcttcttccaatcttctgagtggccttatggggagcttggagcctacaacatctttactgggccaaagagcaccctctcctcccttgtcacaggtgtttcaaactcgagcagcctcagctgactaccttcgcccaagaataccatcaccaattggtttcacaccaggaccacagcagctactcggagatccattccaaggcatgcgcaaacccatgagccccatcacagcccagatgagccagctggagttgcaacaggcagctttagaagggctggccttgccacatgaccttgctgtacaggcagcaaacttctaccagcctggttttggcaaaccacaggtggacagaaccagagatggattcagaaacaggcaacagcgagtgaccaagtcaccagcacccgtgcatcgagggaattcctcttcccctgcccctgctgcctccatcacaagcatgctttctccttcctttacccctacctcagtgattcgtaagatgtacgagagcaaagagaaaagcaaggaggagccagcatctggaaaagcagctcttggtgacagtaaagaggatactcagaaggccagtgaagaaaacctcctgtcatccagctctgtacccagtgccgatcgagactcttctcccactacaaattccaaactgtcagcattacagaggtcttcgtgttccaccccactgtcccaggccaaccgttacaccaaagaacaagattatcgacctaaagcaactgggagaaaaacacccaccttggcatccccagttcctacaacaccttttctccgccctgtccaccaagttccccttgtcccccatgtccctatggttaggcctgctcaccagcttcacccagggttggtacagaggatgctggcccagggagtacatccacagcatcttccaagtttgctccaaactggtgtgcttcctcctgggatggacttgagtcatttacagggaatatctggccccatcctgggtcagcccttttaccctttacctgctgctagtcaccctctcttaaaccctcgtcctggaacacctctgcatctggcaatggtgcaacagcagctacagcgctcagttctgcatcctccaggctctggttcccatgcagcagctgtcagcgttcagacaacccctcagaacgtgcccagccggtcaggcctgccccacatgcactcccagctggagcatcgccccagccagaggagcagctcccctgtgggccttgccaaatggtttggctcagatgtgctacagcaacccctgccctccatgcccgccaaagttatcagtgtagatgaattggaataccgacagtgagcagggcaggcagactcaactaagcccggacctgtggtggcacactgggcaggaccctgcttcatctcgggttggtttatgggcttttactttggagcactctgtgtgaagctgtttggtggaacccatgcatctggtgtggtccgcattatgatggaaggatcttaaccagtcgagtggagtgtacattgtctgaatacaggatgcacaatgttgtc

SEQ ID NO: 323764 - DNA, 3420 bp, Artificial Sequence
  derived and/or modified sequence
gtgcagagcattgtagaccaaggagccatggataggagaagtatgggtgaaacagaaagtggagatgctttccttgacctgaagaagcctcctgcctccaaatgcccccatcgctatacaaaagaagaactcttggatataaaagaactcccccattccaaacagaggccttcatgcctttctgaaaaatatgacagtgatggtgtctgggaccctgagaagtggcatgcctctctctacccagcttcagggcggagctcaccagtggaaagtctgaagaaagagttggatacagaccggccttccctggtgcgcaggatagtagatccacgagagcgtgtgaaagaagatgacttagatgttgttctcagccctcagagacggagctttggagggggctgccacgtgacagccgctgttagctcccggcgctcaggaagtccattagagaaagatagtgatgggcttcgtctgcttggtggacgtaggattggcagtgggaggataatctctgcccggacctttgagaaggatcaccgtcttagcgataaggacctgcgggacttgagagacagagaccgagagagggacttcaaggacaagcgtttcaggagagagtttggagatagtaagcgtgtctttggtgagcgtagaagaaatgattcttacacagaagaagaaccagagtggttctctgctggacccacaagtcagtctgaaaccatcgaactgactggctttgatgataagatactagaagaagatcacaaagggagaaaaagaacaaggcgacggacagcctctgtgaaggaaggtatagtagagtgcaatggaggagtggccgaagaggatgaagtggaggtcatccttgcacaggagcctgcggctgatcaggaagtgccaagggatgctgtcttgcctgagcagtccccaggagactttgactttaatgagttctttaaccttgataaggtgccatgcttggcttcgatgatagaagatgttttgggagaagggtcagtctctgccagtcggttcagtaggtggttctctaacccgagcagatcaggaagccgatccagcagtcttgggtcaacaccacatgaagagctagagagacttgcaggtctggagcaagccatcctctctcctggacagaactcggggaattactttgctcctataccattggaagaccatgctgaaaataaagtggatattttagaaatgctacagaaagccaaagtggatttgaaacctcttctttccagcctttctgcaaataaagaaaaacttaaagaaagctcacattcaggggttgtgctttcagtggaggaggtagaagcaggtctgaagggcttgaaggttgaccagcaagtgaagaattcaactcccttcatggcagaacacctagaagagaccttgagtgccgtaaccaacaatcgacaactgaagaaagacggagacatgactgcgttcaacaagctagtgagcacaatgaaggcaagtgggactttgccttctcagcccaaagtcagcgaacttctgggtcaaccagttcagagacctgcttcttccaatcttctgagtggccttatggggagcttggagcctacaacatctttactgggccaaagagcaccctctcctcccttgtcacaggtgtttcaaactcgagcagcctcagctgactaccttcgcccaagaataccatcaccaattggtttcacaccaggaccacagcagctactcggagatccattccaaggcatgcgcaaacccatgagccccatcacagcccagatgagccagctggagttgcaacaggcagctttagaagggctggccttgccacatgaccttgctgtacaggcagcaaacttctaccagcctggttttggcaaaccacaggtggacagaaccagagatggattcagaaacaggcaacagcgagtgaccaagtcaccagcacccgtgcatcgagggaattcctcttcccctgcccctgctgcctccatcacaagcatgctttctccttcctttacccctacctcagtgattcgtaagatgtacgagagcaaagagaaaagcaaggaggagccagcatctggaaaagcagctcttggtgacagtaaagaggatactcagaaggccagtgaagaaaacctcctgtcatccagctctgtacccagtgccgatcgagactcttctcccactacaaattccaaactgtcagcattacagaggtcttcgtgttccaccccactgtcccaggccaaccgttacaccaaagaacaagattatcgacctaaagcaactgggagaaaaacacccaccttggcatccccagttcctacaacaccttttctccgccctgtccaccaagttccccttgtcccccatgtccctatggttaggcctgctcaccagcttcacccagggttggtacagaggatgctggcccagggagtacatccacagcatcttccaagtttgctccaaactggtgtgcttcctcctgggatggacttgagtcatttacagggaatatctggccccatcctgggtcagcccttttaccctttacctgctgctagtcaccctctcttaaaccctcgtcctggaacacctctgcatctggcaatggtgcaacagcagctacagcgctcagttctgcatcctccaggctctggttcccatgcagcagctgtcagcgttcagacaacccctcagaacgtgcccagccggtcaggcctgccccacatgcactcccagctggagcatcgccccagccagaggagcagctcccctgtgggccttgccaaatggtttggctcagatgtgctacagcaacccctgccctccatgcccgccaaagttatcagtgtagatgaattggaataccgacagtgagcagggcaggcagactcaactaagcccggacctgtggtggcacactgggcaggaccctgcttcatctcgggttggtttatgggcttttactttggagcactctgtgtgaagctgtttggtggaacccatgcatctggtgtggtccgcattatgatggaaggatcttaaccagtcgagtggagtgtacattgtctgaatacaggatgcacaatgttgtcaatcctggaaatggtctttcttttttgtaagatatgtgaatgaagtgttggtgtcctcaccaagaggtggcacctaagggttctgaggaaataaatgtatagacccttatgtacagacctgtgtataaacaacttttgtatatacatataggatagcttttttgaactatacagctgtacataaaagtagctgatattagttaggcctgtgtcaacagtttggatttttttcacttgtacatttgggattttcttttggttgattaaaattgcatatgctaagtgtgtg

SEQ ID NO: 323765 - DNA, 3695 bp, Artificial Sequence
  derived and/or modified sequence
gcgggcgccggggcgcccgcagggggtgggcaggggcgcgaggcccgcaaggcggccggcgggtagccggcgggctggctggcggggaccgagccgccgggccggggaggacggctgcgggcctgcgctagctccagcttgaagcgcccgggccgggagattcggcctccctcctccctgcggccggccgcccctcagtgcagagcattgtagaccaaggagccatggataggagaagtatgggtgaaacagaaagtggagatgctttccttgacctgaagaagcctcctgcctccaaatgcccccatcgctatacaaaagaagaactcttggatataaaagaactcccccattccaaacagaggccttcatgcctttctgaaaaatatgacagtgatggtgtctgggaccctgagaagtggcatgcctctctctacccagcttcagggcggagctcaccagtggaaagtctgaagaaagagttggatacagaccggccttccctggtgcgcaggatagtagatccacgagagcgtgtgaaagaagatgacttagatgttgttctcagccctcagagacggagctttggagggggctgccacgtgacagccgctgttagctcccggcgctcaggaagtccattagagaaagatagtgatgggcttcgtctgcttggtggacgtaggattggcagtgggaggataatctctgcccggacctttgagaaggatcaccgtcttagcgataaggacctgcgggacttgagagacagagaccgagagagggacttcaaggacaagcgtttcaggagagagtttggagatagtaagcgtgtctttggtgagcgtagaagaaatgattcttacacagaagaagaaccagagtggttctctgctggacccacaagtcagtctgaaaccatcgaactgactggctttgatgataagatactagaagaagatcacaaagggagaaaaagaacaaggcgacggacagcctctgtgaaggaaggtatagtagagtgcaatggaggagtggccgaagaggatgaagtggaggtcatccttgcacaggagcctgcggctgatcaggaagtgccaagggatgctgtcttgcctgagcagtccccaggagactttgactttaatgagttctttaaccttgataaggtgccatgcttggcttcgatgatagaagatgttttgggagaagggtcagtctctgccagtcggttcagtaggtggttctctaacccgagcagatcaggaagccgatccagcagtcttgggtcaacaccacatgaagagctagagagacttgcaggtctggagcaagccatcctctctcctggacagaactcggggaattactttgctcctataccattggaagaccatgctgaaaataaagtggatattttagaaatgctacagaaagccaaagtggatttgaaacctcttctttccagcctttctgcaaataaagaaaaacttaaagaaagctcacattcaggggttgtgctttcagtggaggaggtagaagcaggtctgaagggcttgaaggttgaccagcaagtgaagaattcaactcccttcatggcagaacacctagaagagaccttgagtgccgtaaccaacaatcgacaactgaagaaagacggagacatgactgcgttcaacaagctagtgagcacaatgaaggcaagtgggactttgccttctcagcccaaagtcagccgaaaccttgaaagccatttgatgtcccctgctgagattccaggccagcctgtccctaagaacatcctgcaggaacttctgggtcaaccagttcagagacctgcttcttccaatcttctgagtggccttatggggagcttggagcctacaacatctttactgggccaaagagcaccctctcctcccttgtcacaggtgtttcaaactcgagcagcctcagctgactaccttcgcccaagaataccatcaccaattggtttcacaccaggaccacagcagctactcggagatccattccaaggcatgcgcaaacccatgagccccatcacagcccagatgagccagctggagttgcaacaggcagctttagaagggctggccttgccacatgaccttgctgtacaggcagcaaacttctaccagcctggttttggcaaaccacaggtggacagaaccagagatggattcagaaacaggcaacagcgagtgaccaagtcaccagcacccgtgcatcgagggaattcctcttcccctgcccctgctgcctccatcacaagcatgctttctccttcctttacccctacctcagtgattcgtaagatgtacgagagcaaagagaaaagcaaggaggagccagcatctggaaaagcagctcttggtgacagtaaagaggatactcagaaggccagtgaagaaaacctcctgtcatccagctctgtacccagtgccgatcgagactcttctcccactacaaattccaaactgtcagcattacagaggtcttcgtgttccaccccactgtcccaggccaaccgttacaccaaagaacaagattatcgacctaaagcaactgggagaaaaacacccaccttggcatccccagttcctacaacaccttttctccgccctgtccaccaagttccccttgtcccccatgtccctatggttaggcctgctcaccagcttcacccagggttggtacagaggatgctggcccagggagtacatccacagcatcttccaagtttgctccaaactggtgtgcttcctcctgggatggacttgagtcatttacagggaatatctggccccatcctgggtcagcccttttaccctttacctgctgctagtcaccctctcttaaaccctcgtcctggaacacctctgcatctggcaatggtgcaacagcagctacagcgctcagttctgcatcctccaggctctggttcccatgcagcagctgtcagcgttcagacaacccctcagaacgtgcccagccggtcaggcctgccccacatgcactcccagctggagcatcgccccagccagaggagcagctcccctgtgggccttgccaaatggtttggctcagatgtgctacagcaacccctgccctccatgcccgccaaagttatcagtgtagatgaattggaataccgacagtgagcagggcaggcagactcaactaagcccggacctgtggtggcacactgggcaggaccctgcttcatctcgggttggtttatgggcttttactttggagcactctgtgtgaagctgtttggtggaacccatgcatctggtgtggtccgcattatgatggaaggatcttaaccagtcgagtggagtgtacattgtctgaatacaggatgcacaatgttgtcaatcctggaaatggtctttcttttttgtaagatatgtgaatgaagtgttggtgtcctcaccaagaggtggcacctaagggttctgaggaaataaatgtatagacccttatgtacagacctgtgtataaacaacttttgtatatacatataggatagcttttttgaactatacagctgtacataaaagtagctgatattagttaggcctgtgtcaacagtttggatttttttcacttgtacatttgggattttcttttggttgattaaaattgcatatgctaagtgtgtgaatgaa

SEQ ID NO: 323766 - DNA, 2958 bp, Artificial Sequence
  derived and/or modified sequence
atggataggcggagtatgggagagaccgaatccggcgacgcttttttggacctgaaaaagccccctgcctctaagtgtccacacaggtacaccaaagaagaactgttggacatcaaggaacttcctcactcaaagcagagaccttcctgcctgtcagaaaagtacgacagcgacggggtgtgggatccagaaaagtggcacgcatccctgtatccagcctcaggaaggagcagtcctgtggagtcactgaagaaggagcttgacaccgaccgtcccagcctggttagaagaatagttgatccacgcgagagagtgaaggaggatgacctggatgtggtgctcagccctcagcgccgctcttttggcggcgggtgtcacgtcaccgcagccgtgagctctagaaggtccgggtctcctttggagaaagactcggatggtcttcgtcttttgggcggtaggaggattgggtctgggcggattatttccgctcggacttttgagaaggatcaccggctaagcgacaaggacctccgcgatctccgagatcgggacagagagcgggatttcaaagataaacgattccggcgagaatttggtgactctaaacgcgttttcggtgagcggaggcgcaatgacagttacacggaagaagagcctgagtggttctcggcggggccaacctctcagtccgagacaatcgaattaaccggctttgacgataaaatactagaagaggaccataaggggaggaaaagaactaggagaagaaccgcatccgtgaaggagggtatcgtagaatgtaatggtggtgtggctgaggaggatgaggttgaggtgatactggcgcaggagccagctgctgaccaggaagtaccacgcgacgccgtcttgcccgaacagtctccaggcgacttcgattttaacgaattttttaacctggataaagttccatgcttagccagcatgattgaagatgttttgggtgaaggctccgtctctgcaagccggttctcgcggtggttctccaacccaagcagaagtggaagtaggagtagcagtctgggatcaaccccccacgaggagctagaaaggctggccgggctggagcaggcgatcctgtctcccgggcagaactctgggaattacttcgcccctatccctctcgaagaccacgctgagaacaaagtggatatccttgaaatgctgcaaaaagccaaggtggacctgaagcccctgcttagctcattgtccgcaaataaagaaaagctgaaggaaagttctcattccggtgtggtgctttccgtggaggaagtggaagccgggctcaagggtctgaaagtggaccaacaggttaagaactcaactccattcatggccgagcacctcgaagagaccctgagtgccgtaacaaataataggcagcttaagaaggacggggatatgactgcgtttaacaagttggtttccacaatgaaagcatcaggcactcttccaagccagccgaaggtctctcgaaacctggagtcacatctgatgagtcctgccgaaataccaggacagcctgtgcccaagaatattctgcaggagcttctgggccagcccgtgcagcgacctgccagctccaacctgctgtccggccttatgggttctttagagcccaccacatccctgctgggccagagagccccctctcccccactatcacaggtgttccagacccgcgccgcgtcagcggattacttgcgcccccgaattccatcacctattgggtttacaccaggtccacaacagcttttaggcgatccctttcagggcatgcgcaagcccatgtcaccaataacagctcaaatgtctcagctcgaactgcagcaagccgccctcgaagggctggccctgccccacgatctggctgttcaggccgccaacttctatcagcccggcttcggtaagcctcaagttgataggacgcgcgacggttttcgtaatagacagcagagggtcactaagtcaccggcccctgtgcatcgtggtaactcttcgtcccccgccccggcagcgtccattacctcaatgttatccccaagctttactcctaccagcgttatacggaagatgtacgagagtaaggagaaatctaaagaagagcccgcctcaggaaaagcggctctgggcgattcaaaagaagatactcagaaagcctccgaggagaatctgctttctagctcttcagtgccatccgcagatcgagactcctctcccacaactaatagtaaactgtccgcactacagcgctcatcttgcagcacacctttaagccaggccaaccggtacaccaaggagcaagattacagacctaaggccaccggccgcaagaccccaacactcgcctcacctgtgcccaccacaccatttctaaggcctgttcaccaggtgcctcttgtcccccatgttcccatggtgaggcccgcccaccaactgcaccctgggctcgtccaacgcatgctggcccagggggtccacccccaacatctgccttcactgctgcagaccggcgtgctaccaccggggatggatctctcacacttacagggaatttcaggcccgatccttgggcagcctttttaccctctgccagcggcgtctcacccactgttgaatcccaggcctggcaccccactgcatctcgctatggtgcagcaacagctgcagagatccgtcctgcaccctcctggctccggttctcacgctgcggccgtatccgtgcagaccacaccccaaaatgtgccttcccggagtggcctgccccatatgcactctcaattagaacaccgcccctcacagaggtcttcctctccggtgggactcgcgaagtggtttgggtcagacgtactgcagcagcctctgccgagcatgccagcgaaagttattagtgtggatgagcttgaataccgccagtag

SEQ ID NO: 323767 - DNA, 1923 bp, Artificial Sequence
  derived and/or modified sequence
atgatcgaggacgttctgggagagggctccgtgagcgcaagcagatttagtagatggttttcaaacccaagcagatcaggatcccgttcttccagcttaggaagcacaccacatgaagaattggaaagactggccggactggagcaggctatcttatctccagggcagaacagcggtaattatttcgcccccattcctctcgaagaccacgcagagaacaaggtagacattttggaaatgctccagaaggcaaaggtggatttgaagcccctgctcagctccctaagcgctaataaggaaaaactcaaagaaagctcacactctggcgtggttttatcagtcgaggaagtggaagccgggctaaaggggctgaaagtagatcagcaggtgaagaatagtactccattcatggctgaacatctagaggagacgctgtcagcagtgaccaacaatcggcagctgaaaaaagacggcgacatgacagcgttcaacaagctggtcagtaccatgaaagcctcaggaacactgcccagccagcctaaggtgtccgagctgctcggccagccagtgcagaggcctgccagctccaacttgctgtctgggctcatgggctctctggagcccactacttctcttctcggccagagagcccctagtccgcctttgagccaggtcttccagacaagggctgcttccgccgactatcttagacctcgtatcccttctcccatcgggttcacacctgggccacagcaactgctgggcgatccctttcagggaatgagaaagccaatgagcccgattaccgcccaaatgtcccagttggagttacagcaggcagccctggaggggctggccctacctcatgatcttgcagtgcaagcggccaacttctatcagcctggatttggaaagccccaagtcgacaggacccgcgacgggttcagaaaccggcagcagcgggtcactaaatctcctgctccagtacatagaggcaattcctctagccctgcgcccgctgcttccattacatctatgttatcaccgtcttttacacccacgtccgttataaggaaaatgtatgaatccaaggagaagagtaaagaagagcctgcatctggaaaggccgcactcggcgacagcaaggaggacacacagaaagcctccgaagagaatctcctgagctcttctagtgtaccgtccgctgacagggacagcagcccaacaacaaattcaaagctctccgcactccaacgtagctcttgctctactcctctgtctcaggcaaacagatacacgaaggagcaagattaccgccccaaggccactgggcgtaaaacaccgactctggcttcccctgtcccaactacgccctttctgcgtcctgtccatcaggtgcccctagtgcctcacgtccctatggtgcgccctgctcaccagcttcaccctggactggtgcaaaggatgctggcccagggggtgcacccgcagcacttaccctcactgctgcaaactggggtgctgcctccaggcatggacttgagccatctgcagggaatatcaggacctattctgggccagccgttctacccactcccagctgcatctcacccgctcctcaacccacggccaggcaccccgctacaccttgccatggtccaacagcagctgcaacggagcgtcctgcacccccccggttctggatcacacgcagccgctgtgtcagtacaaacaacaccccagaatgtgccgtcccgtagcggcctgcctcatatgcatagtcagctggagcacagacccagtcaacggtcatcttcccccgtggggttagcaaagtggtttggctctgacgtattgcagcaaccactaccatctatgcccgcaaaagtcataagtgtcgatgaactggagtataggcaatag

SEQ ID NO: 323768 - DNA, 2886 bp, Artificial Sequence
  derived and/or modified sequence
atggataggagatcaatgggggaaaccgagtccggggacgccttcttggacctgaagaagcctcccgctagcaaatgcccccatcgctacacgaaagaggagctgctcgacataaaggaactcccacatagcaagcagcggccgtcttgtctgtctgaaaagtacgactctgacggtgtgtgggaccctgagaagtggcacgcatcactgtatccagccagtggtcgttcttctccagtcgaatccctgaaaaaagaactggacactgaccgcccttccttagtccgccgtattgtggacccacgcgaacgcgtgaaggaggacgatttagacgtagtgctgagtccccagcgacgctccttcgggggcgggtgccacgtgactgccgcagtcagttcaagacgcagtggttcaccattggagaaggactccgatgggctgaggttgctgggcgggaggcgaattggttccggacgcatcatcagcgcccggacttttgaaaaggaccatcggctctccgacaaggacctgcgagaccttagggatagggatcgggaacgcgactttaaagataagaggttccgtagggagtttggtgactcaaagagagtgttcggcgagcgtaggcgtaatgactcatacactgaggaggagccagaatggttttccgccggccccacgagccagtctgagacgattgaattaacaggcttcgatgataaaatcttggaggaagaccacaaaggtcgaaagcgcacccgcaggcgcaccgcctccgtgaaagaaggaatcgtcgagtgcaacgggggagttgccgaggaggatgaggtggaagtgatcctcgctcaggagcccgccgcagaccaggaggtccctcgcgatgccgtattgcccgaacagtcaccaggtgattttgatttcaatgagtttttcaacctggataaagtgccatgcctggcctctatgattgaagacgtgctgggggaaggctcagtcagtgcatcaagattctctcgttggtttagtaatccgtcccgttccggaagtcggagcagctctctgggatccaccccacacgaagagcttgagcggctggcaggcctggaacaggcaatcctgtcgcctggccagaatagcgggaactatttcgcaccgattcctctcgaggatcacgcagaaaacaaggttgacatcctggaaatgcttcaaaaagcaaaagtggatctcaaacccttgctcagtagtctttcagcaaacaaagagaaattaaaggagtcttcccacagtggcgttgtcctgtcagttgaagaggtggaggccggcctaaagggtctgaaagtggaccaacaagtaaaaaacagcactccctttatggcggagcacctcgaggagacactgagcgccgtgacgaataatcggcagcttaagaaggacggagacatgacagccttcaataagctggtatcaaccatgaaggcctctggaacattgcccagtcagcctaaggtttccgaacttttgggtcagcctgtccagcgcccggcgtcgagcaacctgctgtccggattgatgggctcactggagcccaccacatccctgttaggtcaaagggcaccctcacccccactctcccaggtgtttcaaacaagagctgcaagtgccgattacctcagacctcgcattccttcacctataggatttacgcctggcccccagcaactcctgggggatccattccagggaatgcgtaagcccatgtcaccaatcactgcacagatgtcacagctagagctacagcaggcagcactcgagggccttgcacttcctcacgacttagccgtgcaggcagcaaacttttaccagccaggttttggaaagcctcaggtcgataggacaagggatgggtttcgcaaccggcagcaaagggtcacaaagtccccagcgccagtgcaccggggcaactcaagttcaccagcacctgcggctagcataacgtctatgctgtcaccctcattcaccccaacctctgtgatcagaaagatgtacgaatccaaagaaaaatcaaaggaggaacccgcctctgggaaggcggcgctgggggattctaaggaggatacccaaaaggcctccgaagaaaacctcctctccagctcaagcgtcccaagcgccgatcgcgacagctctcctaccacaaactcgaaactgtccgccctgcagagaagctcttgttcaacccctctctctcaggccaaccgctatacaaaggaacaggactataggcccaaggcgactggaagaaaaactcccacactggcctcccccgtacccaccactccttttctgaggcccgtgcaccaggttcctctggtcccgcatgtgccaatggttcgccccgcacaccaattgcacccaggcctcgttcagagaatgctcgcccagggggtgcaccctcaacatctcccctcattgctccagactggcgtgctgccccctggaatggaccttagtcacctccagggaatcagtggaccaatactcggccagccattctacccattgcccgcagcttcccatccgctgttgaaccctcgccccggaaccccacttcacctggctatggtccagcagcagctgcaaagaagtgtgctccacccaccggggtcaggcagccatgctgcagctgtttcggtgcagaccacaccgcagaacgtcccatcccgcagcgggcttccgcacatgcactctcagctggaacacagacctagtcagagatcatcctccccagtgggactggctaagtggttcggttccgacgtcctgcagcagccgctgccgagcatgcctgccaaagtcataagcgtcgatgagctcgagtacagacagtag

SEQ ID NO: 323769 - DNA, 2958 bp, Artificial Sequence
  derived and/or modified sequence
atggatcgaaggtcgatgggtgagacagaaagtggcgatgcctttctcgatctaaagaaacctcccgccagcaaatgccctcacagatacaccaaagaagaactcctggacattaaggaactccctcactcaaaacagcgccccagttgtctatccgaaaagtacgattctgacggagtttgggacccagagaagtggcatgcctcactttatcctgccagcgggcgctccagcccagtggaaagtctgaagaaagagttggacacggatcgaccaagcctcgtccgcaggattgtggatccgcgggaacgggttaaggaagacgacctggatgtcgtgttatcccctcagaggcggtcattcggcggggggtgtcacgtgaccgcagcagtaagctcaagacgaagcggaagtcctctggagaaggatagcgacggtctgcgcttgctgggcggaaggaggattgggagcggcaggattatctcagcgagaaccttcgagaaggatcaccgcctgagtgacaaggacttgcgcgacctgcgggacagggatcgcgaacgtgactttaaggacaagcggttccggagggagtttggtgacagtaaaagggtgtttggcgaacgaaggaggaatgactcctatacagaggaggagcccgagtggttcagcgccggccctacatcacagagcgagactatagagctgacgggcttcgatgacaagatcctggaagaagatcataagggacgcaagagaactcgacgtaggactgcaagtgtgaaagagggcatcgtggagtgcaatggaggcgtggcagaggaggatgaagttgaggtgattttggcccaagagcccgccgccgatcaagaggtccccagggacgctgtgcttcccgaacagtctcccggagactttgattttaacgaattcttcaacctggataaggtgccttgccttgcgtccatgattgaggacgtcttaggggagggctcagtgtccgcctcccggttcagccgctggttcagcaatccctcaaggtctggcagtcgcagctcttccctcggatcaaccccccacgaggagctcgagagactggccggcctggagcaggccatactgagtccaggccagaattctggcaattattttgcacctatccctctcgaggaccacgctgagaacaaggtcgatatacttgagatgcttcaaaaagcgaaggtggacctgaagcccctcctcagttcactttcggccaacaaggagaagcttaaagaatcctcccattcaggcgttgttctgtctgtggaggaggtggaggccggactgaagggcctaaaagtggaccagcaggtgaaaaattccacccctttcatggctgagcatttggaagaaacactctcggccgttacaaataacaggcagctcaagaaagatggcgatatgaccgcttttaacaagcttgtgagtacaatgaaggcctccggaactcttccctctcagccaaaggtaagcaggaacctggaatcccacttgatgtctcccgcagagatcccgggtcagcccgtgcctaaaaatattctgcaggaactcctcggccaacccgttcaacggcccgcctcttctaatctgctttctgggctaatgggcagtctggaaccaacaacaagcctgctggggcagcgagctccttccccgcccctgtcgcaagtcttccaaacccgagcagcatccgcagattacttgaggcctagaatccccagtcccattggttttacccccgggcctcagcagctactcggcgatccttttcaggggatgcgcaagcccatgagccctatcacagctcagatgtctcagctcgagctgcaacaagcagccttggagggactagctctgcctcacgatctcgcagtgcaggccgcaaatttctaccagccgggcttcggtaagcctcaagtcgaccggactagagatgggttccggaaccgacagcagcgagtgaccaaatctcccgccccagttcatcggggtaattcatcttcccctgcccctgccgcctccattacgtccatgctgagcccctcgttcacgcccacctccgtgattcggaaaatgtacgaatcaaaagagaagtccaaggaggaacccgcttctgggaaggctgcacttggtgattccaaggaggacactcagaaagcatctgaggaaaatctactgtcatcctcaagcgtcccgagtgcagaccgcgactcaagccctaccactaattccaaactatcagcactgcagcgcagcagctgcagcactccccttagtcaggcgaaccgttatacaaaggagcaggactatcgacccaaggctaccgggcgcaaaacacccacgttagccagccccgtgccgaccacccccttcttgcgaccagtgcatcaggtgcccttagttccccatgtgccaatggtacgccctgcacatcaactccaccccggtctcgtgcagcgcatgttggcgcaaggagtgcatccccagcatctgccttctctgctccagaccggcgtccttccacccgggatggacctctcacatttgcagggcataagcggaccgatactggggcagcctttttatcctttgccagccgcttcgcacccgctgctgaatccaagacctggtactcctctgcatcttgccatggtgcaacaacagttgcaacgaagcgttctgcaccccccgggtagtgggagtcatgcagccgccgtctcagtgcagaccactccacagaatgttccctctagatcggggctcccccacatgcactctcagttggagcatcggcccagccagagatcttcttctcccgtcggtttggccaagtggttcggatctgacgtcctccagcaacctcttccttccatgccagccaaggtgatttctgtggacgagctggaatacagacaatag

SEQ ID NO: 323770 - DNA, 2958 bp, Artificial Sequence
  derived and/or modified sequence
atggacagaagatccatgggagaaacagaaagtggagatgccttcctggacctgaagaagcccccagccagcaaatgtccccaccgctacaccaaggaggagctgctggacatcaaggagctgccccacagcaagcagaggcccagctgcctgtctgagaagtatgacagtgatggagtgtgggaccctgagaagtggcacgccagcctgtacccagccagcggccgcagcagccctgtggagagcctgaagaaggagctggacacagaccggcccagcctggtgcggcgcatcgtggacccccgggagcgggtgaaggaggatgacctggatgtggtgctgagcccccagaggaggagctttggaggcggctgccacgtgacagctgctgtgagcagccgccgcagcggcagccccctggagaaggacagtgatggcctgcggctgctgggcggcagaagaattggcagcggccgcatcatcagcgcccggacctttgagaaggaccaccggctgagtgacaaggacctgcgggacctgcgggaccgggaccgggagcgggacttcaaggacaagcgcttcagaagagaatttggagacagcaagagggtgtttggagagaggagaagaaatgacagctacacagaggaggagcctgagtggttctctgctggccccaccagccagagcgagaccatcgagctgaccggctttgatgacaagatcctggaggaggaccacaagggcaggaagaggaccaggagaagaacagcctctgtgaaggagggcatcgtggagtgcaatggaggagtggccgaggaggatgaggtggaggtgatcctggcccaggagcctgctgctgaccaggaggtgcccagagatgctgtgctgcctgagcagagccctggggactttgacttcaatgagttcttcaacctggacaaggtgccctgcctggcctccatgattgaagatgtgctgggggagggctctgtgtctgccagccgcttcagccgctggttcagcaaccccagccgcagcggcagccgcagcagcagcctgggcagcacccctcatgaggagctggagcggctggccggcctggagcaggccatcctgagccctggccagaacagcggcaactactttgcccccatccccctggaggaccacgccgagaacaaggtggacatcctggagatgctgcagaaggccaaggtggacctgaagcccctgctgagcagcctgagcgccaacaaggagaagctgaaggagagcagccacagcggcgtggtgctgtctgtggaggaggtggaggccggcctgaagggcctgaaggtggaccagcaggtgaagaacagcacccccttcatggccgagcacctggaggagaccctgtctgctgtgaccaacaaccggcagctgaagaaggatggagacatgacagccttcaacaagctggtgtccaccatgaaggccagcggcaccctgcccagccagcccaaggtgtccaggaacctggagagccacctgatgagccctgctgagatccctggccagcctgtgcccaagaacatcctgcaggagctgctgggccagcctgtgcagaggcctgccagcagcaacctgctgagcggcctgatgggcagcctggagcccaccaccagcctgctgggccagagggcccccagcccccccctgagccaggtgttccagaccagggctgccagcgctgactacctgcggccccgcatccccagccccatcggcttcaccccaggcccccagcagctgctgggggaccccttccagggcatgaggaagcccatgagccccatcacagcccagatgagccagctggagctgcagcaggccgccctggagggcctggccctgccccatgacctggccgtgcaggccgccaacttctaccagcccggctttgggaagccccaggtggacaggaccagagatggcttcaggaaccggcagcagagggtgaccaagagccctgcccctgtgcaccggggcaacagcagcagccctgccccagctgccagcatcacctccatgctgagccccagcttcacccccaccagcgtcatcaggaagatgtatgagagcaaggagaagagcaaggaggagcccgccagcggcaaggccgccctgggggacagcaaggaggacacccagaaggccagcgaggagaacctgctgagcagcagctctgtgcccagcgctgaccgggacagcagccccaccaccaacagcaagctgagcgccctgcagaggagcagctgcagcacccccctgagccaggccaaccgctacaccaaggagcaggactaccggcccaaggccaccggcaggaagacccccaccctggccagccctgtgcccaccacccccttcctgcggcctgtgcaccaggtgcccctggtgccccacgtgcccatggtgcggcctgcccaccagctgcaccctggcctggtgcagaggatgctggcccagggcgtgcacccccagcacctgcccagcctgctgcagacaggagtgctgcccccaggcatggacctgagccacctgcagggcatcagcggccccatcctgggccagcccttctaccccctgcctgctgccagccaccccctgctgaaccccaggcctggcacccccctgcacctggccatggtgcagcagcagctgcagaggtctgtgctgcaccccccaggcagcggcagccacgccgctgctgtgtctgtgcagaccaccccccagaatgtgcccagccgcagcggcctgccccacatgcacagccagctggagcaccggcccagccagaggagcagcagccctgtgggcctggccaagtggtttggaagtgatgtgctgcagcagcccctgcccagcatgcctgccaaggtgatctctgtggatgagctggagtaccggcagtag

SEQ ID NO: 323771 - DNA, 1923 bp, Artificial Sequence
  derived and/or modified sequence
atgattgaagatgtgctgggggagggctctgtgtctgccagccgcttcagccgctggttcagcaaccccagccgcagcggcagccgcagcagcagcctgggcagcacccctcatgaggagctggagcggctggccggcctggagcaggccatcctgagccctggccagaacagcggcaactactttgcccccatccccctggaggaccatgctgagaacaaggtggacatcctggagatgctgcagaaggccaaggtggacctgaagcccctgctgagcagcctgagcgccaacaaggagaagctgaaggagagcagccacagcggcgtggtgctgtctgtggaggaggtggaggccggcctgaagggcctgaaggtggaccagcaggtgaagaacagcacccccttcatggccgagcacctggaggagaccctgtctgctgtgaccaacaaccggcagctgaagaaggatggagacatgacagccttcaacaagctggtgtccaccatgaaggccagcggcaccctgcccagccagcccaaggtgtctgagctgctgggccagcctgtgcagaggcctgccagcagcaacctgctgagcggcctgatgggcagcctggagcccaccaccagcctgctgggccagagggcccccagcccccccctgagccaggtgttccagacccgggccgccagcgctgactacctgcggccccgcatccccagccccatcggcttcaccccaggcccccagcagctgctgggggaccccttccagggcatgaggaagcccatgagccccatcacagcccagatgagccagctggagctgcagcaggccgccctggagggcctggccctgccccatgacctggccgtgcaggccgccaacttctaccagcccggctttgggaagccccaggtggacaggaccagagatggcttcaggaaccggcagcagagggtgaccaagagccctgcccctgtgcaccggggcaacagcagcagccctgccccagctgccagcatcacctccatgctgagccccagcttcacccccaccagcgtcatcaggaagatgtatgagagcaaggagaagagcaaggaggagcccgccagcggcaaggccgccctgggggacagcaaagaagacacccagaaggccagcgaggagaacctgctgagcagcagctctgtgcccagcgctgaccgggacagcagccccaccaccaacagcaagctgagcgccctgcagaggagcagctgcagcacccccctgagccaggccaaccgctacaccaaggagcaggactaccggcccaaggccactggaaggaagacccccaccctggccagccctgtgcccaccacccccttcctgcggcctgtgcaccaggtgcccctggtgccccacgtgcccatggtgcggcctgcccaccagctgcaccctggcctggtgcagaggatgctggcccagggcgtgcacccccagcacctgcccagcctgctgcagacaggagtgctgcccccaggcatggacctgagccacctgcagggcatcagcggccccatcctgggccagcccttctaccccctgcctgctgccagccaccccctgctgaacccccggcccggcacccccctgcacctggccatggtgcagcagcagctgcagaggtctgtgctgcaccccccaggcagcggcagccatgctgctgctgtgtctgtgcagaccaccccccagaatgtgcccagccgcagcggcctgccccacatgcacagccagctggagcaccggcccagccagaggagcagcagccctgtgggcctggccaagtggtttggaagtgatgtgctgcagcagcccctgcccagcatgcctgccaaggtgatctctgtggatgagctggagtaccggcagtag

SEQ ID NO: 323772 - DNA, 2886 bp, Artificial Sequence
  derived and/or modified sequence
atggacagaagatccatgggagaaacagaaagtggagatgccttcctggacctgaagaagcccccagccagcaaatgtccccaccgctacaccaaggaggagctgctggacatcaaggagctgccccacagcaagcagaggcccagctgcctgtctgagaagtatgacagtgatggagtgtgggaccctgagaagtggcacgccagcctgtacccagccagcggccgcagcagccctgtggagagcctgaagaaggagctggacacagaccggcccagcctggtgcggcgcatcgtggacccccgggagcgggtgaaggaggatgacctggatgtggtgctgagcccccagaggaggagctttggaggcggctgccacgtgacagctgctgtgagcagccgccgcagcggcagccccctggagaaggacagtgatggcctgcggctgctgggcggcagaagaattggcagcggccgcatcatcagcgcccggacctttgagaaggaccaccggctgagtgacaaggacctgcgggacctgcgggaccgggaccgggagcgggacttcaaggacaagcgcttcagaagagaatttggagacagcaagagggtgtttggagagaggagaagaaatgacagctacacagaggaggagcctgagtggttctctgctggccccaccagccagagcgagaccatcgagctgaccggctttgatgacaagatcctggaggaggaccacaagggcaggaagaggaccaggagaagaacagcctctgtgaaggagggcatcgtggagtgcaatggaggagtggccgaggaggatgaggtggaggtgatcctggcccaggagcctgctgctgaccaggaggtgcccagagatgctgtgctgcctgagcagagccctggggactttgacttcaatgagttcttcaacctggacaaggtgccctgcctggcctccatgattgaagatgtgctgggggagggctctgtgtctgccagccgcttcagccgctggttcagcaaccccagccgcagcggcagccgcagcagcagcctgggcagcacccctcatgaggagctggagcggctggccggcctggagcaggccatcctgagccctggccagaacagcggcaactactttgcccccatccccctggaggaccacgccgagaacaaggtggacatcctggagatgctgcagaaggccaaggtggacctgaagcccctgctgagcagcctgagcgccaacaaggagaagctgaaggagagcagccacagcggcgtggtgctgtctgtggaggaggtggaggccggcctgaagggcctgaaggtggaccagcaggtgaagaacagcacccccttcatggccgagcacctggaggagaccctgtctgctgtgaccaacaaccggcagctgaagaaggatggagacatgacagccttcaacaagctggtgtccaccatgaaggccagcggcaccctgcccagccagcccaaggtgtctgagctgctgggccagcctgtgcagaggcctgccagcagcaacctgctgagcggcctgatgggcagcctggagcccaccaccagcctgctgggccagagggcccccagcccccccctgagccaggtgttccagaccagggctgccagcgctgactacctgcggccccgcatccccagccccatcggcttcaccccaggcccccagcagctgctgggggaccccttccagggcatgaggaagcccatgagccccatcacagcccagatgagccagctggagctgcagcaggccgccctggagggcctggccctgccccatgacctggccgtgcaggccgccaacttctaccagcccggctttgggaagccccaggtggacaggaccagagatggcttcaggaaccggcagcagagggtgaccaagagccctgcccctgtgcaccggggcaacagcagcagccctgccccagctgccagcatcacctccatgctgagccccagcttcacccccaccagcgtcatcaggaagatgtatgagagcaaggagaagagcaaggaggagcccgccagcggcaaggccgccctgggggacagcaaggaggacacccagaaggccagcgaggagaacctgctgagcagcagctctgtgcccagcgctgaccgggacagcagccccaccaccaacagcaagctgagcgccctgcagaggagcagctgcagcacccccctgagccaggccaaccgctacaccaaggagcaggactaccggcccaaggccaccggcaggaagacccccaccctggccagccctgtgcccaccacccccttcctgcggcctgtgcaccaggtgcccctggtgccccacgtgcccatggtgcggcctgcccaccagctgcaccctggcctggtgcagaggatgctggcccagggcgtgcacccccagcacctgcccagcctgctgcagacaggagtgctgcccccaggcatggacctgagccacctgcagggcatcagcggccccatcctgggccagcccttctaccccctgcctgctgccagccaccccctgctgaaccccaggcctggcacccccctgcacctggccatggtgcagcagcagctgcagaggtctgtgctgcaccccccaggcagcggcagccacgccgctgctgtgtctgtgcagaccaccccccagaatgtgcccagccgcagcggcctgccccacatgcacagccagctggagcaccggcccagccagaggagcagcagccctgtgggcctggccaagtggtttggaagtgatgtgctgcagcagcccctgcccagcatgcctgccaaggtgatctctgtggatgagctggagtaccggcagtag

SEQ ID NO: 323773 - DNA, 2958 bp, Artificial Sequence
  derived and/or modified sequence
atggaccggcggagcatgggcgagaccgagagcggcgacgccttcctagatctgaagaaaccccctgctagcaaatgtccccacagatacaccaaagaggaactgcttgatatcaaggaactaccccattccaaacagcgaccatcgtgtctgtccgagaaatacgatagtgatggtgtttgggatcccgagaaatggcatgcttccctttatccggctagcgggaggtcttctccggttgagagtttgaaaaaggaacttgacaccgataggccatcactggtcagaagaatcgtggaccctcgtgagagagtaaaggaggatgaccttgatgtcgtactgagtccccagaggagaagcttcggcggggggtgccacgtcactgcagctgtaagttcgagaaggagcggctccccacttgaaaaagacagcgacggcctgcggctgctgggcggacgtcgaatcggcagcggcagaattattagcgcacgaacatttgaaaaggaccataggctgagcgataaggacctgagagatctgcgagacagagatcgagaaagagacttcaaagataaaagattcaggagagaattcggggattctaagcgcgtgttcggcgagagaagaaggaatgacagctacaccgaggaagaacctgaatggttttctgctgggcccacaagccaatctgagacaattgagctgacaggattcgacgacaaaatactcgaggaggatcacaaggggcggaagcggacgagaaggcgcactgcatctgtgaaggaaggcatcgtggagtgcaacgggggggttgcagaggaagatgaagtggaggttattttggcacaggagccggcagctgaccaggaggtgcctcgggatgccgtgctcccagagcaaagcccaggcgattttgattttaatgagttcttcaatctcgacaaggtcccttgtctcgcctccatgattgaagacgtgttgggagaggggagcgtctctgcatcgagattctcaagatggttttctaatccatctcggtcagggtctaggtcttcctcactggggagcacccctcacgaggagcttgagcggctcgcaggtctagagcaagctatcctttctcccggccagaacagtggaaactacttcgctcccattcctctcgaggatcacgccgaaaataaggttgatatattggaaatgctgcagaaggccaaagtggatcttaagccactgctctcttcgctgtccgctaacaaagaaaagctgaaagagtcaagccattcaggggtcgtcttgtccgtagaggaggtggaggccgggttgaaagggctgaaagttgaccagcaggttaagaacagcactcctttcatggctgaacacctggaggagactctgagtgccgtgacaaacaacaggcagttaaaaaaggacggcgacatgaccgcattcaacaagctagtgtctacaatgaaggcctccggcaccttgccctcccaacccaaggtgtctcggaatctggaaagtcacctgatgtctccagcagaaatcccaggccaacctgtgcctaagaatattcttcaagaactgctgggacagcctgtacaacgacccgctagttcaaatctgctgagcggtcttatgggcagtctggaacccaccacctccctcctgggacagagggcccccagccctccattgagtcaggttttccagacacgcgccgcttctgctgactacctgagacctcgcatcccctctccaatcggttttacccctgggccccagcagctgctgggggatccctttcagggcatgcggaaacctatgtccccgattacagcccagatgagtcagttggagctacagcaagccgctctcgagggcctggccttgccccatgatttggccgtccaagcggctaatttctaccagcccggcttcgggaagccccaagtcgaccggacccgcgacggtttccgaaacagacaacagcgagtcacgaagtccccggcccccgtgcacaggggaaatagttcttccccggcccccgccgccagtataaccagtatgttgtcccccagttttactccaacaagcgtgataaggaagatgtacgaaagcaaagaaaagtcaaaagaggaaccagctagcggtaaggcagccctcggagattcaaaggaggacacccaaaaggccagcgaggagaatctgctgtcttcgtcaagcgtgccgtcagccgacagggacagtagcccgactactaatagcaagctcagcgcacttcaacgctcaagctgctccaccccactgtcacaggctaacaggtacactaaagagcaggactacagacctaaggccactggccgcaagaccccgaccttggcaagcccagtgccaaccactccattcctgagacctgttcaccaagtccccctggtgccgcatgtcccgatggtgagacccgcccaccaactgcacccgggactcgtccaaagaatgctcgctcaaggcgtgcacccacagcacctgccaagcctgttgcagacaggcgtgcttccccctgggatggacctgtcccatctacaggggatcagtggccccatactcggtcagcccttttacccactccctgcagcctctcaccccctcctcaacccacgtccgggcacccccctgcacctagccatggtgcaacagcagctacagagaagtgtcctacaccctcctggcagtggctcgcatgcggcggctgtgtcagtgcagactactccacagaatgtaccatctagatccggtctcccccatatgcatagccagctcgagcaccgccccagccaaaggagcagcagtcctgtcggcctggcaaagtggtttggctctgatgttcttcagcagcctttaccatctatgcctgccaaagtgatcagcgtggacgaactcgagtatcgccagtag

SEQ ID NO: 323774 - DNA, 1923 bp, Artificial Sequence
  derived and/or modified sequence
atgatcgaggacgtgctgggcgagggcagcgtgagcgccagccggttctctcggtggtttagtaatccgtcaaggtccggcagccgatcttcatctctaggctccacaccccatgaagagctggaaaggctggccggactggagcaggccatcctgtcccccgggcaaaattctgggaattacttcgcaccgatacccctcgaagatcacgcagagaacaaagtcgatatcttagagatgctgcaaaaagctaaagtcgacctgaaacctctgctgtcttcactctccgcaaataaggaaaagctgaaagagtcctcccattctggcgtggtgctaagcgtggaggaagtagaggccggtctgaagggcttgaaggttgatcaacaagtcaaaaactcaacacctttcatggcggagcacctggaggaaaccctgagcgcggtcaccaacaatcgccagctgaaaaaagatggtgatatgactgccttcaacaagctggtgagtaccatgaaggcctcaggcacgctgcctagtcagccaaaagtgagcgaactactgggccagccagtgcagaggcccgcttccagcaacctgctctccggtctgatgggctctctggagccaacaacgtctttgctgggtcagcgtgctccctcaccaccactgtcgcaggtcttccagactagggccgcttcggccgactatctcagaccaaggatccccagccctatcggctttacccccggaccacagcaactgctcggggacccattccaggggatgcgcaaacctatgagccctattacagctcagatgtcgcagctcgagcttcagcaggctgcactagaaggtctagccctgccacatgatctcgccgtgcaagctgcaaatttctaccagcccggcttcgggaagccacaagtggaccgtaccagagacggattccggaataggcagcaacgcgtcactaagtcaccagccccagtgcataggggaaacagcagctccccggccccagcagccagtataacaagtatgctgagcccaagcttcacccccacctctgtcattaggaaaatgtatgagtctaaagagaaatccaaggaggagccagcttctggaaaggctgcgctaggggattccaaagaagacacccaaaaagcgagtgaagagaacctactgtcctcatcgtctgtcccttctgcagacagagacagcagtccaacgacaaatagcaagctatccgctttgcagaggtcctcgtgctcaactccactgtcacaggcaaataggtatactaaggaacaggattataggccaaaggcaactgggcggaagactccaacactggcgagtcctgtccctaccacccctttccttaggccggtccaccaggtcccactggtgccccatgttcccatggtgcgcccagcccatcagcttcaccccgggctggttcaacggatgctcgcccagggagtccatccccagcatctgccatccttgcttcaaactggcgtcctcccacccgggatggacctgagtcacctgcaggggatcagtgggcccattctcggacagcccttttacccgttgcctgccgcatctcacccactcctcaatccccgaccgggcacccctctgcacctggccatggttcagcagcagcttcaaagaagtgtgctgcatcctccggggtctgggagccatgctgccgcagtttctgtacagactactccacagaatgtgcccagtcgttccggcctcccccacatgcactctcagctggaacataggcccagccagcgttccagctcacctgtgggacttgccaaatggtttggttccgacgtcctgcagcagccgctgccatctatgccggcgaaagtgataagcgtggacgaattggagtatagacagtag

SEQ ID NO: 323775 - DNA, 2886 bp, Artificial Sequence
  derived and/or modified sequence
atggaccggcggagcatgggcgagaccgagagcggcgacgccttcctggatctaaagaaaccccccgcgtctaaatgcccgcaccggtacacaaaggaagagctactcgatatcaaagaactgcctcatagtaagcaacggccctcttgtctaagcgagaaatacgattcagatggagtctgggatccggagaaatggcatgccagcctctatcccgcttcaggcaggagttctcctgtggagtcgctgaagaaggagttggacacagaccgtccttccctcgtgaggaggattgtagatccccgcgaacgcgtaaaggaggatgacctagacgtcgtgctgtctccccagcgccgtagcttcggagggggctgccatgtcaccgcagctgtctctagcaggcggagcggaagccccttggagaaagattccgacggactgaggttactgggcgggagacgaatcgggagcggccgaatcatctcagccagaaccttcgaaaaggatcacaggttatccgataaggatcttagagatctaagagacagggaccgcgaacgcgacttcaaagacaagcgcttccgcagggagttcggagattcaaagcgcgttttcggggagcgccgcaggaacgattcttatacagaggaagaaccagaatggttttcggcgggccccacctcacagtccgagactatagagctaactggcttcgatgacaaaatcctggaggaagaccacaaggggcgcaaacgaactcgaaggagaaccgcctcggtgaaggaaggcatcgtggaatgcaatgggggcgttgctgaagaggatgaagtggaggtgattctggctcaggaacctgctgccgaccaggaagtgccacgcgacgcggtgctccctgagcagagtcctggagacttcgattttaatgagttttttaatttggacaaggtcccctgcctcgcctccatgatcgaggacgtgctgggcgaggggtcggttagtgcgtcccgtttcagtaggtggttcagtaatcctagtcgcagcggttcacggtcgtctagcttgggctctactccccacgaggagctagagcggcttgccggactcgagcaggccatactcagtccagggcaaaactctggaaactacttcgccccaattcctctggaggatcatgctgagaataaagtggacatcctggaaatgcttcaaaaggccaaggttgacctgaaacctcttctgagttcgttatctgccaacaaggaaaagctcaaagaatctagtcactctggcgttgtgctgagcgtcgaggaagtagaagccggcctgaagggcctgaaagtagatcagcaggtaaagaattctactcccttcatggcagaacatctcgaggagaccctaagcgcagtcaccaacaatcgccagcttaaaaaagacggagatatgactgctttcaataagttagtcagcaccatgaaagcctccggcaccctgccttctcagcctaaggtctccgagctgcttggccagccagttcagcgacctgcctccagtaatttgctgtcggggttgatgggcagcctcgaaccaaccacatccttgctgggccaacgcgctccctcacctccgctgagtcaggtcttccagacgagagcagccagtgcagactatctgagaccaagaataccctcgccaatagggtttacccccgggcctcagcaattgctaggcgaccctttccagggcatgaggaagcctatgagtccaattactgcacagatgtcacagctagagctgcaacaggccgcactcgagggtcttgccctgccccatgatcttgctgtccaggccgctaacttctaccagcctgggtttgggaaacctcaagtcgaccgcactagggacggattccgaaatcgtcagcagagggttaccaaaagccctgctcctgttcaccgagggaatagttcaagtcctgcccccgcagcaagcataactagtatgctgagcccctcattcacccccacctccgttattcgtaagatgtacgaatccaaggaaaagtcgaaagaggaacccgcttccggaaaggctgctttgggcgattccaaggaagacactcaaaaggcatccgaagagaacttactgtcctcatcatctgttccttccgctgatcgtgactcaagccctactaccaatagtaagctgtcagccctgcagaggagtagttgttccacaccactcagccaggcaaacagatataccaaagaacaggactaccgacctaaggccactggacggaagacgccgacactcgccagtccagtgcctaccacgccattcctgcgcccagtacaccaagtaccgctggttcctcatgtcccaatggtgcgcccggctcaccagctacatcccggcttggtacagaggatgctagcacagggtgtgcaccctcagcacctcccaagcttacttcagactggcgtgctgcccccagggatggacctgagtcatctgcaggggatctccgggccaatactggggcagcccttttatcccttgcctgcggcatctcaccccctgcttaatccccgcccaggaactccacttcatcttgccatggtacaacagcagcttcagcgatctgtcctccacccacctggatcaggatctcacgctgccgcagtctcagtacagactacaccacagaatgttccatccagatctggattgcctcacatgcacagtcagctggagcacagaccatcccaaagatcttcctcacccgtaggtttggctaaatggtttggatcggatgtacttcagcagcccctgcctagcatgcctgctaaggtgataagcgtcgacgagctggaatatcgacagtag

SEQ ID NO: 323776 - DNA, 2958 bp, Artificial Sequence
  derived and/or modified sequence
atggaccggcggagcatgggcgagaccgagagcggcgacgccttcttggacctaaagaaacctccagccagcaaatgccctcatcgctatactaaggaagagctgctggacataaaggagctgccccactctaaacagcggccctcgtgcctctcagaaaagtacgacagcgatggagtgtgggaccctgaaaaatggcacgcctcactctaccccgctagtggaaggagctcgcccgttgaaagcctgaaaaaggagttggacacagatagaccgtcactggtgaggcgaatcgtagacccaagagaacgagtcaaggaggatgacctggatgtcgtgctaagccctcaaaggagaagttttggcggtggctgtcacgtgacggccgccgtgtcttcacgtcgatctggctcgcccttggagaaggattccgacggtttgcgtctgcttggcgggagaaggattggcagcggtcgaatcattagtgccagaacttttgagaaggaccataggctatccgataaagatctgcgcgatctgcgcgatcgcgaccgagaacgcgattttaaggataaaagattcaggagggagtttggggactcaaaacgggtgttcggagaacggcggcgcaatgacagctataccgaggaagagcccgagtggtttagcgctggtcccactagtcagagtgagaccatagagttgaccggatttgacgacaagattctggaagaagaccacaaaggtcgtaagcgtactcgacgtcggaccgcatctgttaaagaagggatcgtggagtgcaatggaggggtcgccgaggaagacgaggtggaagtgattctagcccaggagcccgctgctgaccaggaagtgcctcgggatgccgtgctgccggagcagtctcccggcgacttcgatttcaacgaattctttaatctggataaggtaccctgtctggcctctatgatagaagatgttcttggagagggatcggtatcagcctctaggttctctcggtggtttagtaatccatctcggtcgggttcgaggtcgtcctcccttggtagcaccccacatgaagaacttgagcggctggccggtcttgaacaagccatcttgtcacctggccaaaactctggcaactattttgcccccatccccctcgaagatcacgctgagaataaagtggatatactggagatgctgcaaaaggccaaagtcgacctcaaacctctcttgtcaagcctgtctgctaacaaggagaaactcaaggagtccagtcacagcggtgtcgtactctcagtggaagaggtggaggccggcctcaagggactgaaagttgatcaacaggtgaagaatagcactccatttatggcagagcacctggaggagaccctctccgcggtcactaacaaccgccagcttaagaaagatggcgacatgacagcctttaacaaacttgtgagtaccatgaaggctagcggcacactcccctcccagcctaaggtgtctcgcaacttagagtcacacctcatgtcgcccgccgagattccaggtcaacccgtccccaagaatatcttacaggagctcctgggccagcccgtgcagcgtcccgcatctagcaatctgctgtccgggctgatgggcagcctggaacctacaaccagtctgctcggacaaagggccccaagtccacccctctcccaggtgttccagacaagagccgccagcgccgactacttacgtcctcgcattccaagtcctatcggattcacccccggaccacagcagctgctgggggatcccttccagggaatgcgtaaacctatgagcccaataacggcacagatgtcccagctcgagcttcaacaggctgctcttgaaggattagctttgccccatgaccttgccgtgcaggccgctaacttttatcagccaggattcgggaaaccccaggtcgatcgtacccgagacgggtttcgcaatcggcagcagagggtaacaaaatcccccgctcctgtgcacaggggaaactcttcatcacctgcacccgccgcaagcattactagtatgctgtcaccatctttcacccccacatcagtcattagaaagatgtacgagtccaaagagaagtccaaagaagaacccgccagcggcaaagccgcattgggagattccaaagaagacacccagaaagctagcgaggagaatctcctctcttcctcgtccgtgccttctgccgaccgcgacagctctcctactacaaatagcaaactctctgctctgcagaggagtagttgtagtacccccctgagtcaagccaaccgttatactaaagagcaagactaccgtccgaaggctacaggtcgaaagacgccgactctggcgtcccctgtgcccacgacgccatttttgcgcccagttcaccaggtccccctggtgcctcatgttcctatggtgaggcccgcccaccagctgcatcccggactggtgcagcgaatgttggcgcagggcgtgcacccccagcacctaccctcactgttacagactggggtgcttcctccaggtatggacctgtctcatctgcagggcatctccggtcctattctaggacagcccttctaccccctccctgctgctagccaccctctgttaaacccgcggccaggaacgccgctccacttggcaatggtgcagcagcagctccaacggagtgtattgcaccctcctgggtctggcagccacgcggccgctgtatcggtgcaaactacaccacagaacgtgccttcaagatccggactgccgcatatgcattctcaactggaacatagaccttcccagcggtcctcatcaccagtggggctggctaagtggtttgggagcgacgtgctgcaacagccactgccttcaatgcccgctaaggttatctcagtggacgaactggagtaccgccagtag

SEQ ID NO: 323777 - DNA, 2958 bp, Artificial Sequence
  derived and/or modified sequence
atggatcggcgtagtatgggagaaaccgaaagcggggacgccttcctggacctcaagaagcctcccgcttccaaatgccctcataggtacaccaaggaggaactcttggacataaaagaactcccacacagtaaacagagacccagttgtctctcggaaaaatatgactcagacggtgtctgggacccggagaagtggcacgcttcactataccccgcaagtgggagatccagtcctgtggaatccctgaaaaaggaacttgatacggataggcccagccttgtaaggcggatcgtggaccccagggaaagagtgaaggaagacgacctggacgtggtcttgtctcctcaaaggaggagttttggaggcggttgccacgtcactgctgcagtcagttctcgtagaagcgggtctcctctcgagaaggactctgacgggctgcggttattgggaggccgaaggattggcagtggcagaatcatttccgccaggacttttgagaaagatcaccggctatcagacaaagacctgcgtgacctccgggatcgggatcgggaaagagatttcaaggataaaaggttccgcagggagttcggcgactcaaaaagagtgttcggcgaacggcgaagaaatgattcatacaccgaggaggaacctgaatggttctctgccggacccacctctcagagcgagacaatagaactaacaggattcgatgataaaatcttggaggaggaccacaaaggtcggaaaagaacacggagacgtacagcctccgttaaggagggaatcgtagagtgtaacgggggtgtagccgaggaagatgaggttgaggtgattctcgctcaggagccggcagcagaccaggaggtacccagggatgcagtcttgccagaacagagtcccggtgactttgactttaacgagttctttaacctcgacaaggtaccgtgcctggccagcatgatcgaagacgttctgggtgagggatccgtgagcgcttcacggttcagtcgctggttcagcaacccaagtaggtcagggtcaaggagcagctcactgggcagcactccgcatgaggaactagaacgcctcgccggtctcgaacaagcgatcctgtcaccgggacagaattctggcaactattttgctcctatccctttagaggaccacgcagaaaacaaggtagatatccttgagatgttgcaaaaagcaaaggtggacctcaagcccctgttgtcctcactgtctgcgaataaggagaaactgaaagaatctagccactccggcgtggtgttgagtgtggaagaagttgaggctggactgaagggtctcaaagtcgatcagcaggtcaaaaattctaccccctttatggctgagcacctggaagagactctgtccgctgtgactaataatcgccagttgaaaaaagacggtgatatgaccgccttcaacaagttagtgtctaccatgaaggcatcagggaccctgcccagccagcccaaagtaagtcgtaatctggaatctcatctgatgtctccagccgaaatccctggccaacccgttcctaagaacatactgcaagagttacttgggcagcctgtccaacgtcccgctagctccaacttactcagcggattaatgggtagtctggagccaactacatccctgttaggacagcgggctccaagcccacctttgtctcaggtgttccaaacaagggctgcaagtgcggattatcttagacccagaatcccttcgcctatagggttcactcccggaccacagcagcttctcggtgacccattccagggcatgagaaaacctatgtcaccaattaccgcccagatgtctcagttggaattgcagcaggctgccctggagggtttagccctgccgcatgatctggctgttcaggctgccaacttctaccagccaggcttcggaaagccgcaagtggacaggacccgtgacggttttcgcaaccggcaacagcgggtcaccaagagtcccgcacctgtacacaggggcaattcctcttcacctgccccagccgcttctataacttcgatgctgagccctagcttcacacctacctcagtgatacgcaagatgtacgaatccaaagaaaagagcaaagaggagcccgcatctggcaaagcggctttgggagattccaaggaggacactcagaaggcgtctgaagaaaatcttctgtccagcagctcagttccttctgctgatcgagactcatcccctacaaccaactctaaactatccgcccttcaaaggtcaagctgctctacccccctgtctcaggccaaccggtatactaaggagcaggactataggcctaaagccacgggccgaaaaacaccaacactggcatctcccgtaccaactacacccttcctcaggcctgtccaccaggtgcctctagtccctcacgtgcctatggtcaggccagcacatcagctgcacccaggacttgttcagcggatgctggcccagggcgtccacccacagcaccttccttcgctcctgcagacgggagtcctgcccccaggcatggatctgtctcatttgcagggtatctctggacctattctcgggcagcctttctaccccttgccagccgcttcccacccgctgttaaacccccgaccagggactccactgcacctggcgatggttcagcagcagctacagagaagtgtgcttcacccacccggatctggctctcatgcggcagccgtgtctgtgcagaccacgcctcagaatgttccatctcgtagcgggctccctcacatgcacagtcagctagaacataggccttcacagaggagcagcagcccagttggcctcgcaaagtggttcggctccgacgtcttgcaacagcccctcccttcaatgcctgccaaagtgattagtgttgacgaactggaatatcggcagtag

SEQ ID NO: 323778 - DNA, 1923 bp, Artificial Sequence
  derived and/or modified sequence
atgatcgaagacgtactaggtgagggctcagtttctgcatccagattttctcggtggtttagtaatccttctagaagcggatcgagaagctcaagtctcggcagcactcctcatgaagaacttgaaagattagctggactggagcaggctattctttctccaggtcagaacagtgggaattatttcgcccctattccacttgaggaccacgccgaaaacaaggtggatatactcgaaatgctgcagaaggccaaagtcgatctgaaacctttactttcttctctcagcgcaaataaggagaagttgaaggaatcctctcactctggcgtggtcctgtcagtcgaggaagtggaggcaggattgaaaggcttaaaagttgaccaacaggtgaagaactctacccctttcatggccgaacacctggaggaaacactttccgccgtgaccaataatagacagctgaaaaaggacggcgatatgactgcatttaataagctggtgtcaacaatgaaggcttcgggtacgctgccatcccagcccaaggtctccgaacttctcggtcagccagtccagagacctgcatcatccaacctgctgagcgggttgatgggtagcctggaacccacaacaagtctactaggacagagggccccatctccacccctgtcacaggtcttccagacacgggctgcctctgcggactacctgcgaccacggattcccagcccgattggatttacccccggaccccaacagctgctgggggacccctttcaaggaatgcgaaagccgatgagtcccatcactgcccagatgtctcagctggagctccagcaggcggctctggaaggccttgctctgcctcatgacttggctgtgcaggctgcgaatttttatcagccagggtttggtaagcctcaggttgaccgcacacgggatggattccggaacaggcagcagcgcgtgactaaaagccctgcccctgtgcatagaggaaactcctccagcccagcccctgccgcaagcatcacctccatgctgtctccttcttttacccctacctccgtgatacgcaagatgtatgaatctaaagagaagtcaaaagaagagcctgcttcgggcaaagctgctctgggcgattcaaaagaggatactcagaaggctagcgaagaaaacctgcttagcagttccagcgtgccctccgcggacagagactcaagcccaaccaccaatagcaagctctcagctctgcagcgctcatcctgtagcacccccctgtcacaggcaaatagatacacaaaggagcaagattaccggccaaaagccactggaagaaaaacacctacactggcttctcccgtccccacaacacccttcttacgccctgtgcaccaggtgccgttggtgccccatgttccgatggtaagacccgcacatcagctgcacccgggactcgtccaaagaatgctggcccaaggtgttcacccccagcacctcccatcattgcttcagacaggagtcctaccccctggcatggatttaagccaccttcagggcatctccgggccaattttgggacagccattctaccccctgccggcagctagtcatccgctgctgaacccgaggcccggaacccctctgcatttggccatggtgcagcaacaactccaaagaagcgttctgcaccctccgggaagcggtagtcacgctgcagccgtgtccgtgcagactactccacagaacgttcccagcagatcaggtctgccgcacatgcactctcaactggagcatcggccttcacagcggagcagttccccagtcggactcgcgaaatggttcggtagcgatgtgctccaacaaccgctgccctccatgccagcgaaagtgataagtgtcgacgaattagagtaccggcagtag

SEQ ID NO: 323779 - DNA, 2886 bp, Artificial Sequence
  derived and/or modified sequence
atggatcgacgcagcatgggggagactgagtcaggtgacgcttttttagacctgaaaaagccccctgcctcaaaatgccctcatcgttacaccaaggaggaactccttgatatcaaggagctgccccacagtaaacagagaccttcctgtctgagtgagaaatatgactcggacggggtgtgggaccctgagaaatggcacgccagcctgtaccccgcttcaggacgctcttctcccgtagaaagtctgaagaaggagctggacacagatcgaccctcactagtgcggagaatcgtcgaccctcgcgaaagagtcaaggaggatgacctcgacgtcgtgctatcaccccaaaggaggtccttcggaggtgggtgtcacgtcacggccgcagtgtcaagtagacgttctgggtctcctctggagaaggattctgacggcttgaggttgctcggagggagaagaatcggctcagggagaattatttccgccaggacctttgagaaggatcataggttgtctgacaaggacctcagagatctaagggaccgggaccgggagcgtgattttaaagacaagcgattccgtagagagttcggcgatagcaagcgtgtgtttggcgagagaaggcgcaatgactcctacaccgaggaagaacctgaatggttcagcgcgggacccacctcccaatcagagactatcgaactgaccgggttcgatgacaagatcttagaggaagatcacaaaggacgcaagaggacacgcagacgaactgctagcgtcaaggaaggcattgtcgaatgcaacggcggagtggccgaggaggatgaggttgaagttattttggctcaggaaccagcagcagaccaggaggtcccccgagatgcggtgctgcctgagcagagccccggagacttcgactttaacgaattcttcaatctagacaaggttccgtgtctcgctagcatgattgaggacgtgctgggggagggttcagtgtctgcctctaggttctcccgttggtttagcaaccctagtcgtagcggctcccggagcagttcactgggttcaactccgcatgaggaattggaaaggctggcagggctggagcaggccattctgtcgccaggtcagaactctgggaactattttgcaccaatccccctggaggaccacgccgagaataaagtcgatatcttagaaatgctgcagaaagcgaaagtggatctcaaaccactcttgagcagcttgtcagccaataaggagaagctgaaagagagcagccattccggagtcgtgctgagtgtggaggaggttgaggccggtctgaaaggcttaaaagtagaccagcaggtcaagaacagcactcccttcatggctgaacaccttgaagagacattatcggcggttactaataaccgtcagctcaagaaggatggggatatgactgctttcaacaagctcgtctcgactatgaaggcgtcgggaaccctgccttcccagcccaaggtctccgaactgctggggcagcccgttcaacgacctgcttcctctaatttgctctccgggctgatggggagtctggaaccaactacctcactcctgggacaacgtgcaccgtcccccccactgtcacaggtctttcagactcgcgctgcttcagcagactatctgaggccacggattccctctcccattggatttacacctggacctcagcaacttcttggagacccttttcaagggatgaggaaacccatgagcccaatcacggcccagatgtcccagctggaactgcagcaggccgctctcgaagggctcgccctgcctcatgatctggctgtccaagcagccaatttttaccaaccaggcttcgggaaacctcaggtcgatcgtacaagggacggcttcagaaatcgacagcagcgggtgactaagagccccgctcccgtgcatcgtggtaatagcagctctccggcaccagccgcaagtattactagcatgctgagtccctctttcactcctacctcagtgatccgtaagatgtatgagagtaaagagaaatccaaggaggaacctgctagtggcaaggcagctctcggcgacagtaaagaggatactcagaaagccagtgaagagaatctgctctccagctccagcgttcccagcgccgatagagattcctcaccaaccaccaactctaagctgtccgctctccagcgctcatcatgctctacccccctctcccaagctaaccgatataccaaggagcaggactaccgccctaaagccactggcagaaagacaccaaccttggcctctccggttccaaccaccccctttctgagaccagtgcatcaggtgcctcttgtgcctcacgtgccaatggtgcgcccagcccatcagctccaccccggactggttcagcggatgctcgcccagggcgtccatccacaacacctcccgtccctgctccagacaggagtcttaccccctggcatggacttatcacatttacagggaatctccgggcctatcctggggcagcccttctatcctctaccagctgcatcacatcccctgctgaatcctcggcctgggaccccacttcacttggcaatggttcagcagcagcttcagcggagcgtactccacccccctggatctggctctcatgcagcggctgtatctgttcaaacaactccccagaatgttcctagtcgcagtggactacctcacatgcacagccagctcgagcaccggccttctcagcgcagctcttcacctgtgggcctggccaagtggtttggctcggacgttctccagcagcctctgcctagcatgcccgctaaggtgatcagcgtagatgagctggaataccgtcaatag
